(19) United States
(12) Patent Application Publication
(10) Pub. No.: US 2002/0168711 A1
(43) Pub. Date: Nov. 14, 2002

(54) Nucleic acids, proteins, and antibodies

(76) Inventors: Craig A. Rosen, Laytonsville, MD (US); Steven M. Ruben, Olney, MD (US); Steven C. Barash, Rockville, MD (US)

Correspondence Address: HUMAN GENOME SCIENCES INC, 9410 KEY WEST AVENUE, ROCKVILLE, MD, 20850

(21) Appl. No.: 09/764,868

(22) Filed: Jan. 17, 2001

Related U.S. Application Data
(60) Provisional application No. 60/179,065, filed on Jan. 31, 2000.
(60) Provisional application No. 60/180,628, filed on Feb. 4, 2000.
(60) Provisional application No. 60/214,886, filed on Jun. 28, 2000.
(60) Provisional application No. 60/217,487, filed on Jul. 11, 2000.
(60) Provisional application No. 60/225,758, filed on Aug. 14, 2000.
(60) Provisional application No. 60/220,963, filed on Jul. 26, 2000.
(60) Provisional application No. 60/217,496, filed on Jul. 11, 2000.
(60) Provisional application No. 60/225,447, filed on Aug. 14, 2000.
(60) Provisional application No. 60/218,290, filed on Jul. 14, 2000.
(60) Provisional application No. 60/225,757, filed on Aug. 14, 2000.
(60) Provisional application No. 60/226,868, filed on Aug. 22, 2000.
(60) Provisional application No. 60/216,647, filed on Jul. 7, 2000.
(60) Provisional application No. 60/225,267, filed on Aug. 14, 2000.
(60) Provisional application No. 60/216,880, filed on Jul. 7, 2000.
(60) Provisional application No. 60/225,270, filed on Aug. 14, 2000.
(60) Provisional application No. 60/251,869, filed on Dec. 8, 2000.
(60) Provisional application No. 60/235,834, filed on Sep. 27, 2000.
(60) Provisional application No. 60/234,274, filed on Sep. 21, 2000.
(60) Provisional application No. 60/234,223, filed on Sep. 21, 2000.
(60) Provisional application No. 60/228,924, filed on Aug. 30, 2000.
(60) Provisional application No. 60/224,518, filed on Aug. 14, 2000.
(60) Provisional application No. 60/236,369, filed on Sep. 29, 2000.
(60) Provisional application No. 60/224,519, filed on Aug. 14, 2000.
(60) Provisional application No. 60/220,964, filed on Jul. 26, 2000.
(60) Provisional application No. 60/241,809, filed on Oct. 20, 2000.
(60) Provisional application No. 60/249,299, filed on Nov. 17, 2000.
(60) Provisional application No. 60/236,327, filed on Sep. 29, 2000.
(60) Provisional application No. 60/241,785, filed on Oct. 20, 2000.
(60) Provisional application No. 60/244,617, filed on Nov. 1, 2000.
(60) Provisional application No. 60/225,268, filed on Aug. 14, 2000.
(60) Provisional application No. 60/236,368, filed on Sep. 29, 2000.
(60) Provisional application No. 60/251,856, filed on Dec. 8, 2000.
(60) Provisional application No. 60/251,868, filed on Dec. 8, 2000.
(60) Provisional application No. 60/229,344, filed on Sep. 1, 2000.
(60) Provisional application No. 60/234,997, filed on Sep. 25, 2000.
(60) Provisional application No. 60/229,343, filed on Sep. 1, 2000.
(60) Provisional application No. 60/229,345, filed on Sep. 1, 2000.
(60) Provisional application No. 60/229,287, filed on Sep. 1, 2000.
(60) Provisional application No. 60/229,513, filed on Sep. 5, 2000.
(60) Provisional application No. 60/231,413, filed on Sep. 8, 2000.
(60) Provisional application No. 60/229,509, filed on Sep. 5, 2000.
(60) Provisional application No. 60/236,367, filed on Sep. 29, 2000.
(60) Provisional application No. 60/237,039, filed on Oct. 2, 2000.
(60) Provisional application No. 60/237,038, filed on Oct. 2, 2000.
(60) Provisional application No. 60/236,370, filed on Sep. 29, 2000.
(60) Provisional application No. 60/236,802, filed on Oct. 2, 2000.
(60) Provisional application No. 60/237,037, filed on Oct. 2, 2000.
(60) Provisional application No. 60/237,040, filed on Oct. 2, 2000.
(60) Provisional application No. 60/240,960, filed on Oct. 20, 2000.
(60) Provisional application No. 60/239,935, filed on Oct. 13, 2000.

(51) Int. Cl. C12P 21/02; C12N 5/06; C07H 21/04; C12N 9/00; C07K 14/435

(52) U.S. Cl. 435/69.1; 435/325; 435/320.1; 435/183; 530/350; 536/23.1

(57) ABSTRACT

The present invention relates to novel proteins. More specifically, isolated nucleic acid molecules are provided encoding novel polypeptides. Novel polypeptides and antibodies that bind to these polypeptides are provided. Also provided are vectors, host cells, and recombinant and synthetic methods for producing human polynucleotides and/or polypeptides, and antibodies. The invention further relates to diagnostic and therapeutic methods useful for diagnosing, treating, preventing and/or prognosing disorders related to these novel polypeptides. The invention further relates to screening methods for identifying agonists and antagonists of polynucleotides and polypeptides of the invention. The present invention further relates to methods and/or compositions for inhibiting or enhancing the production and function of the polypeptides of the present invention.

### Statement under 37 C.F.R. §1.77(b)(4)

[0001] This application refers to a “Sequence Listing” listed below, which is provided as an electronic document on two identical compact discs (CD-R), labeled “Copy 1” and “Copy 2.” These compact discs each contain the following files, which are hereby incorporated in their entirety herein:

| Document | File Name | Size in bytes | Date of Creation |
|---|---|---|---|
| Sequence Listing | PTZ32_seqList.txt | 3,411,250 | 01/15/2001 |
| V Viewer | SetupDLL.exe | 695,808 | 12/19/2000 |
| Setup File | | | |
| V Viewer Help | v.cnt | 7,984 | 01/05/2001 |
| File Controller | | | |
| V Viewer | v.exe | 753,664 | 12/19/2000 |
| Program File | | | |
| V Viewer | v.hlp | 447,766 | 01/05/2001 |
| Help File | | | |

[0002] The Sequence Listing may be viewed on an IBM-PC machine running the MS-Windows operating system by using the V viewer software, licensed by HGS, Inc., included on the compact discs (see World Wide Web URL: http://www.fileviewer.com).

### FIELD OF THE INVENTION

[0003] The present invention relates to novel proteins. More specifically, isolated nucleic acid molecules are provided encoding novel polypeptides. Novel polypeptides and antibodies that bind to these polypeptides are provided. Also provided are vectors, host cells, and recombinant and synthetic methods for producing human polynucleotides and/or polypeptides, and antibodies. The invention further relates to diagnostic and therapeutic methods useful for diagnosing, treating, preventing and/or prognosing disorders related to these novel polypeptides. The invention further relates to screening methods for identifying agonists and antagonists of polynucleotides and polypeptides of the invention. The present invention further relates to methods and/or compositions for inhibiting or enhancing the production and function of the polypeptides of the present invention.

### BACKGROUND OF THE INVENTION

[0004] One of the most critical tasks a cell must perform is to respond to cues from its environment, i.e., extracellular signals. Some of the most important extracellular signals come from other cells. The ability for cells to be able to send and receive signals from one another is of paramount importance in multicellular organisms because it allows individual cells within a body to become highly specialized and yet work in a coordinated fashion with other cells of the body. Cellular signaling mechanisms regulate a variety of cellular processes such as, for example, proliferation, differentiation, survival, movement, and secretion. Defects in cellular signaling can lead to a number of diseases and disorders such as cancers, immune system disorders and nervous system disorders. For more expansive reviews on this subject, please refer to Hunter, Cell 100:113-127 and Chapter 15 of Molecular Biology of the Cell, Third Edition, edited by Alberts et al. (1994), which are herein incorporated by reference in their entirety.

[0005] Signal transduction requires molecules that serve as the extracellular signaling molecules as well as a set of receptors that “receive” the signal. Frequently, an additional set of proteins is necessary in order for the cell to translate the signal it has received into an appropriate response via the activation or inhibition of a particular set of genes or proteins. The signaling molecules, the receptor proteins, and the molecules that relay the signal between the receptor and the final effector molecules collectively form what are known as signal transduction pathways.

[0006] To date, several common types of signal transduction pathways have been identified. One way to classify a signal transduction pathway is based on the class of receptor protein it utilizes. Two well known classes of receptor proteins are G-protein coupled receptors and enzyme-linked receptors. This latter class of enzyme-linked receptors includes receptor tyrosine kinases, tyrosine kinase associated receptors, receptor serine/threonine kinases, receptor tyrosine phosphatases, and receptor guanylyl cyclases.

[0007] Signal Transduction Through G-protein Coupled Receptors

[0008] G protein coupled receptors are the largest family of cell surface receptors. They are seven-pass transmembrane receptors which activate trimeric G proteins (G proteins) upon ligand binding. G proteins are GTPases composed of three subunits: alpha, beta and gamma. G proteins function as molecular switches existing in two states: an active GTP bound state and an inactive GDP bound state. Ligand binding to G protein coupled receptors induce inactive G proteins to release GDP allowing GTP to bind in its place. Binding of GTP to a G protein causes the alpha subunit to dissociate from the beta and gamma subunits which remain associated with one another. Eventually, the GTPase activity of the alpha subunit results in hydrolysis of the bound GTP molecule to GDP, thus inactivating the G protein.

[0009] There are several types of G proteins that have been classified based upon their function. Stimulatory G proteins (Gₛ) are involved in adenylate cyclase activation; inhibitory G proteins (Gᵢ) function to inhibit the activity of adenylate cyclase. Yet another type of G protein, G_{q} proteins, functions in the activation of phosphoinositide-specific phospholipase C enzyme.

[0010] Activation of adenylate cyclase by an activated Gₛ protein results in the production of the cyclic nucleotide, cyclic AMP (cAMP). cAMP mediates its effects mostly through its activation of cAMP dependent kinase (A-kinase), a serine/threonine kinase. Activation of A-kinase helps to further relay the signal from the G protein coupled receptor to the target proteins. In muscle cells, for instance, activation of A-kinase following adrenaline signaling ultimately results in the activation of an enzyme, glycogen phosphorylase, which catalyzes the release of glucose molecules which can be used to produce energy from glycogen. In other instances, activated A-kinase translocates to the nucleus where it phosphorylates the cAMP response element binding (CREB) protein, which when phosphorylated, acts as a transcription factor to stimulate the expression of genes that have cAMP response elements (CRE) sequences in their regulatory regions.

[0011] G_{q} proteins, when activated, activate the enzyme phospholipase C-beta which hydrolyzes PI 4,5-biphosphate (PIP₂) producing inositol triphosphate (IP₃) and diacylglycerol (DAG). IP₃ functions as a second messenger that causes the release of Ca²⁺ from intracellular stores. Released calcium then binds to Ca²⁺ binding proteins such as calmodulin, which in its calcium bound state, is able to activate Ca²⁺/calmodulin dependent protein kinases (CaM-kinases). Activated CaM kinases then continue to relay the signal to more downstream molecules in the signal transduction pathway. The other product produced by phospholipase C-beta, DAG, functions to activate the serine/threonine kinase known as protein kinase C (PKC). Activated PKC phosphorylates target proteins depending on the cell type, and in many cells these phosphorylation events lead to the increased transcription of specific genes. The highest concentrations of protein kinase C are found in the brain where PKC phosphorylates ion channels in nerve cells thereby altering their excitability. PKC activation can be induced by treating cells with phorbol esters which are able to cross the plasma membrane, bind to, and activate PKC directly.

[0012] Signal Transduction Through Receptor Tyrosine Kinases

[0013] The receptor protein tyrosine kinases (RPTKs) are some of the most well studied receptors, and the signaling cascades they initiate demonstrate two of the fundamental concepts in signal transduction: the regulation of protein phosphorylation and the recruitment of proteins into a signaling cascade via protein-protein interaction domains.

[0014] Binding of the cognate ligand to a RPTK, such as epidermal growth factor (EGF) binding to the epidermal growth factor receptor (EGFR), induces RPTKs to dimerize and cross-phosphorylate each other on multiple tyrosine residues. The phosphorylated receptor dimer is the activated form of the receptor.

[0015] The phosphorylated tyrosines on activated RPTKs are then recognized/bound by other components of the signal transduction pathway. One of the important discoveries in the field of signal transduction was the recognition of conserved domains which allow for protein-protein interactions in signaling pathways. The most prevalent binding domain that recognizes phosphotyrosine (P—Tyr) residues is known as the SH2 domain (for Src homology region 2, named after the Src protein in which the SH2 domain was first discovered). Another domain that recognizes P—Tyr residues is called the P—Tyr binding domain (PTB). The discovery of the SH2 domain was quickly followed by the discovery of several other protein-protein interaction domains involved in signal transduction and by the realization that most of these domains are modular in nature, meaning these domains fold independently—a most convenient feature for protein engineering. To date, more than 100 such protein interaction domains involved in signaling have been defined via comparative sequence analysis. Most of these domains recognize short linear sequences (approximately 4-10 amino acid residues in length), in some cases requiring phosphorylation of specific residues within the sequence allowing for inducible association. A convenient web based database, with links to abstracts of papers characterizing these domains can be found at http://smart.EMBL-Heidelberg.de.

[0016] Proteins containing SH2 and PTB domains translocate to the plasma membrane where they associate with the activated RPTKs which, in turn, activates them through phosphorylation. By way of example, activation of the platelet derived growth factor receptor (PDGFR) results in the autophosphorylation of tyrosine residues in the cytoplasmic tail of the PDGFR. These P—Tyr residues then serve as the binding sites for other proteins, such as a GTPase (discussed in more detail below), phospholipase C-gamma, and the regulatory subunit of PI-3-kinase, which are each able to recognize the P—Tyr residues in PDGFR via SH2 domains. The interaction of these proteins with the activated PDGFR results in the translocation of these proteins to the plasma membranes where they have their substrates and the PDGFR mediated activation of these proteins via phosphorylation.

[0017] In the previous example, each of the proteins recruited to the activated RPTK via their SH2 domains also had catalytic activities that allowed them to propagate a signal. There are proteins involved in signal transduction, however, which have no ability in and of themselves to propagate a signal. Instead, these proteins, known as adaptor proteins, serve to couple activated RPTKs to other components of the signal transduction pathway which do have the capacity to propagate the signal. One such adaptor protein is known as Grb2. It contains one SH2 domain and two SH3 domains (another Src homology domain that mediates protein interactions). Grb 2 is constitutively associated with Sos protein, a guanine nucleotide releasing protein (GNRP), via its SH3 domain. Thus, when Grb2 associates with an activated receptor via its SH2 domain, it also brings Sos into proximity with the RPTK which activates the Sos protein via phosphorylation.

[0018] GNRP proteins, such as Sos, are one of two types of proteins that help regulate the activity of proteins belonging to the Ras superfamily of monomeric GTPases. Ras proteins are proteins that are associated with the cytoplasmic side of the plasma membrane and help relay signals from RPTK to the nucleus to stimulate cell proliferation or differentiation. Ras proteins exist in two states, an inactive state in which ras is bound to GDP and an active state in which ras is bound to GTP. Activated GNRP proteins promote the exchange of bound GDP for GTP on ras proteins, thereby activating ras. Ras, itself, is a GTPase that hydrolyzes GTP to GDP, and would therefore tend to inactivate itself over time. However, ras is an inefficient GTPase, so the inactivation of ras is enhanced by GTPase activating proteins (GAPs) which increase the rate of hydrolysis of GTP by ras.

[0019] Activated Ras kinases then act to activate more downstream signaling events, including activation of the mitogen-activated protein kinase (MAPK) pathway which is a cascade of serine/threonine kinases. Ras binds to and activates a MAPK kinase kinase (MAPKKK, such as Raf-1, for example), which in turn activates a MAPK kinase (MAPKK) via phosphorylation, which in turn activates a MAPK. MAPKs relay signals downstream by phosphorylating various proteins in the cell including other kinases and/or regulatory proteins in the cell. For instance, an activated MAPK can enter the nucleus and help to initiate transcription of genes that must be expressed in order for the cell to respond to the extracellular signal, such as genes required for DNA replication in response to the extracellular proliferation signal.

[0020] Another class of signaling receptors, receptor serine/threonine kinases (RSK) has recently been identified. An example of an RSK is the TGF-beta receptor. Additionally, it has also been recently recognized that there are modular binding domains that recognize phosphoserine/phosphothreonine (P—Ser/P—Thr) residues. For instance, 14-3-3 domains recognize phosphoserines in specific amino acid contexts [RSX(P—Ser)XP] or [R(Y/F)X(P—Ser)XP] and may function in the assembly of signaling complexes. Other residues such as histidine and arginine can also be phosphorylated, and it is possible that additional kinases which phosphorylate these residues, or protein domains that bind phosphohistidine or phosphoarginine will be discovered.

[0021] Signaling via Intracellular Receptors

[0022] Some extracellular signals do not have cell surface receptors such as G protein coupled receptors or receptor tyrosine kinases. Instead, these extracellular signals are able to traverse the plasma membrane and interact with their receptors in the cytoplasm. Examples of such signals are the steroid hormones and the gas nitrous oxide (NO). The steroid hormone receptors, once bound by their ligand, are generally able to translocate to the nucleus where they bind regulatory DNA elements that control the gene expression of specific genes. NO gas, on the other hand, generally enters a cell and reacts with iron in the active site of the enzyme guanylate cyclase, stimulating it to produce cyclic GMP (cGMP). cGMP acts as a second messenger (similar to the way cAMP functions) and can stimulate further downstream signaling by binding to other proteins.

[0023] Terminating Signal Transduction

[0024] As the effects of signal transduction are transient, there must also be mechanisms for terminating signal cascades. For example, G proteins are self-inactivating, and there are a set of proteins, GAPs, that are devoted to increasing the rate of hydrolysis of bound GTP by ras proteins. Cyclic nucleotide second messengers such as cAMP and cGMP are hydrolyzed by phosphodiesterases. In the case of kinases, there generally exist a set of complementary phosphatases that function to dephosphorylate phosphorylated residues, thereby bringing the signaling event to a close.

[0025] Signal Transduction Pathway Components and Disease

[0026] Because signal transduction is involved in the regulation of so many cellular processes, including proliferation, differentiation, survival, and apoptosis, it is not surprising that defects in cellular signal transduction pathway components lead to a number of diseases and disorders, especially cancers. For a review on Signal transduction pathway components and diseases, see Hunter, Philosophical Transactions of the Royal Society of London Series B 353:583-605 (1998) which is herein incorporated by reference in its entirety. For instance, approximately 30% of human cancers have mutations in a ras gene, and at least 18 tyrosine kinases have been identified as oncogenes in either acutely transforming retroviruses or in human tumors, such as for example, Src. And more than 95% of chronic myelogenous leukemias express an activated form of the c-Abl non-receptor tyrosine kinases.

[0027] Mutations in signaling pathways are also implicated in a plethora of other diseases. Mutation in Bruton's tyrosine kinase leads to X-linked agammaglobulinemia. Inactivation of ZAP70 or JAK3 leads to a severe combined immunodeficiency disease. Coffin-Lowry syndrome occurs when the X-linked Rsk2 protein serine kinase gene is inactivated. Myotonic dystrophy occurs when expression of the myotonic dystrophy serine kinase gene is decreased. Overexpression of the aurora2 serine kinase is implicated in colon carcinoma.

[0028] The malfunction of signal transduction pathway components, particularly kinases, in diseases indicate that these genes are good targets for drugs/pharmaceuticals that either inhibit or activate their function. In fact, some such drugs have been developed and are already in use or in clinical trials. For instance, an inhibitor of cyclin dependent kinase 2 (cdk2), a kinase important in regulating cellular proliferation, is in clinical trials for cancer treatment, as are inhibitors of epidermal growth factor receptor tyrosine kinases and vascular endothelial growth factor receptor (VEGFR) tyrosine kinases. Inhibition of VEGFR activity reduces or eliminates the vascularization of tumors directed by VEGFR. An antagonistic monoclonal antibody, herceptin, against the erbB2 receptor tyrosine kinase is being used in breast cancer therapies to treat breast cancers where ErbB2 is overexpressed.

[0029] Thus there exists a clear need for identifying and exploiting novel signal transduction pathway component polynucleotides and polypeptides. Although structurally related, such proteins may possess diverse and multifaceted functions in a variety of cell and tissue types. The inventive purified signal transduction pathway component polypeptides are research tools useful for the identification, characterization and purification of additional proteins involved in signal transduction. Furthermore, the identification of new signal transduction pathway component polynucleotides and polypeptides permits the development of a range of derivatives, agonists and antagonists at the nucleic acid and protein levels which in turn have applications in the treatment and diagnosis of a range of conditions such as, for example, cancer and other proliferative disorders (e.g., chronic myelogenous leukemia), immunological disorders (e.g., severe combined immunodeficiency and X-linked agammaglobulinemia), and nervous system disorders (Coffin-Lowry Syndrome), amongst other conditions.

### SUMMARY OF THE INVENTION

[0030] The present invention relates to novel proteins. More specifically, isolated nucleic acid molecules are provided encoding novel polypeptides. Novel polypeptides and antibodies that bind to these polypeptides are provided. Also provided are vectors, host cells, and recombinant and synthetic methods for producing human polynucleotides and/or polypeptides, and antibodies. The invention further relates to diagnostic and therapeutic methods useful for diagnosing, treating, preventing and/or prognosing disorders related to these novel polypeptides. The invention further relates to screening methods for identifying agonists and antagonists of polynucleotides and polypeptides of the invention. The present invention further relates to methods and/or compositions for inhibiting or enhancing the production and function of the polypeptides of the present invention.

### DETAILED DESCRIPTION

[0031] Tables

[0032] Table 1A summarizes some of the polynucleotides encompassed by the invention (including cDNA clones related to the sequences (Clone ID NO:Z), contig sequences (contig identifier (Contig ID:) and contig nucleotide sequence identifier (SEQ ID NO:X)) and further summarizes certain characteristics of these polynucleotides and the polypeptides encoded thereby. The first column provides the gene number in the application for each clone identifier. The second column provides a unique clone identifier, “Clone ID NO:Z”, for a cDNA clone related to each contig sequence disclosed in Table 1A. The third column provides a unique contig identifier, “Contig ID:” for each of the contig sequences disclosed in Table 1A. The fourth column provides the sequence identifier, “SEQ ID NO:X”, for each of the contig sequences disclosed in Table 1A. The fifth column, “ORF (From-To)”, provides the location (i.e., nucleotide position numbers) within the polynucleotide sequence of SEQ ID NO:X that delineate the preferred open reading frame (ORF) that encodes the amino acid sequence shown in the sequence listing and referenced in Table 1A as SEQ ID NO:Y (column 6). Column 7 lists residues comprising predicted epitopes contained in the polypeptides encoded by each of the preferred ORFs (SEQ ID NO:Y). Identification of potential immunogenic regions was performed according to the method of Jameson and Wolf (CABIOS, 4; 181-186 (1988)); specifically, the Genetics Computer Group (GCG) implementation of this algorithm, embodied in the program PEPTIDESTRUCTURE (Wisconsin Package v10.0, Genetics Computer Group (GCG), Madison, Wis.). This method returns a measure of the probability that a given residue is found on the surface of the protein. Regions where the antigenic index score is greater than 0.9 over at least 6 amino acids are indicated in Table 1A as “Predicted Epitopes”. In particular embodiments, polypeptides of the invention comprise, or alternatively consist of, one, two, three, four, five or more of the predicted epitopes described in Table 1A. It will be appreciated that depending on the analytical criteria used to predict antigenic determinants, the exact address of the determinant may vary slightly. Column 8, “Tissue Distribution” shows the expression profile of tissue, cells, and/or cell line libraries which express the polynucleotides of the invention. The first number in column 8 (preceding the colon), represents the tissue/cell source identifier code corresponding to the key provided in Table 4. Expression of these polynucleotides was not observed in the other tissues and/or cell libraries tested. For those identifier codes in which the first two letters are not “AR”, the second number in column 8 (following the colon), represents the number of times a sequence corresponding to the reference polynucleotide sequence (e.g., SEQ ID NO:X) was identified in the tissue/cell source. Those tissue/cell source identifier codes in which the first two letters are “AR” designate information generated using DNA array technology. Utilizing this technology, cDNAs were amplified by PCR and then transferred, in duplicate, onto the array. Gene expression was assayed through hybridization of first strand cDNA probes to the DNA array. cDNA probes were generated from total RNA extracted from a variety of different tissues and cell lines. Probe synthesis was performed in the presence of ³³P dCTP, using oligo(dT) to prime reverse transcription. After hybridization, high stringency washing conditions were employed to remove non-specific hybrids from the array. The remaining signal, emanating from each gene target, was measured using a Phosphorimager. Gene expression was reported as Phosphor Stimulating Luminescence (PSL) which reflects the level of phosphor signal generated from the probe hybridized to each of the gene targets represented on the array. A local background signal subtraction was performed before the total signal generated from each array was used to normalize gene expression between the different hybridizations. The value presented after “[array code]:” represents the mean of the duplicate values, following background subtraction and probe normalization. One of skill in the art could routinely use this information to identify normal and/or diseased tissue(s) which show a predominant expression pattern of the corresponding polynucleotide of the invention or to identify polynucleotides which show predominant and/or specific tissue and/or cell expression. Column 9 provides the chromosomal location of polynucleotides corresponding to SEQ ID NO:X. Chromosomal location was determined by finding exact matches to EST and cDNA sequences contained in the NCBI (National Center for Biotechnology Information) UniGene database. Given a presumptive chromosomal location, disease locus association was determined by comparison with the Morbid Map, derived from Online Mendelian Inheritance in Man (Online Mendelian Inheritance in Man, OMIM™. McKusick-Nathans Institute for Genetic Medicine, Johns Hopkins University (Baltimore, Md.) and National Center for Biotechnology Information, National Library of Medicine (Bethesda, Md.) 2000. World Wide Web URL: http://www.ncbi.nlm.nih.gov/omim/). If the putative chromosomal location of the Query overlaps with the chromosomal location of a Morbid Map entry, an OMIM identification number is disclosed in column 10 labeled “OMIM Disease Reference(s)”. A key to the OMIM reference identification numbers is provided in Table 5.

[0033] Table 1B summarizes additional polynucleotides encompassed by the invention (including cDNA clones related to the sequences (Clone ID NO:Z), contig sequences (contig identifier (Contig ID:) contig nucleotide sequence identifiers (SEQ ID NO:X)), and genomic sequences (SEQ ID NO:B). The first column provides a unique clone identifier, “Clone ID NO:Z”, for a cDNA clone related to each contig sequence. The second column provides the sequence identifier, “SEQ ID NO:X”, for each contig sequence. The third column provides a unique contig identifier, “Contig ID:” for each contig sequence. The fourth column, provides a BAC identifier “BAC ID NO:A” for the BAC clone referenced in the corresponding row of the table. The fifth column provides the nucleotide sequence identifier, “SEQ ID NO:B” for a fragment of the BAC clone identified in column four of the corresponding row of the table. The sixth column, “Exon From-To”, provides the location (i.e., nucleotide position numbers) within the polynucleotide sequence of SEQ ID NO:B which delineate certain polynucleotides of the invention that are also exemplary members of polynucleotide sequences that encode polypeptides of the invention (e.g., polypeptides containing amino acid sequences encoded by the polynucleotide sequences delineated in column six, and fragments and variants thereof).

[0034] Table 2 summarizes homology and features of some of the polypeptides of the invention. The first column provides a unique clone identifier, “Clone ID NO:Z”, corresponding to a cDNA clone disclosed in Table 1A. The second column provides the unique contig identifier, “Contig ID:” corresponding to contigs in Table 1A and allowing for correlation with the information in Table 1A. The third column provides the sequence identifier, “SEQ ID NO:X”, for the contig polynucleotide sequence. The fourth column provides the analysis method by which the homology/identity disclosed in the Table was determined. Comparisons were made between polypeptides encoded by the polynucleotides of the invention and either a non-redundant protein database (herein referred to as “NR”), or a database of protein families (herein referred to as “PFAM”) as further described below. The fifth column provides a description of the PFAM/NR hit having a significant match to a polypeptide of the invention. Column six provides the accession number of the PFAM/NR hit disclosed in the fifth column. Column seven, “Score/Percent Identity”, provides a quality score or the percent identity, of the hit disclosed in columns five and six. Columns 8 and 9, “NT From” and “NT To” respectively, delineate the polynucleotides in “SEQ ID NO:X” that encode a polypeptide having a significant match to the PFAM/NR database as disclosed in the fifth and sixth columns. In specific embodiments polypeptides of the invention comprise, or alternatively consist of, an amino acid sequence encoded by a polynucleotide in SEQ ID NO:X as delineated in columns 8 and 9, or fragments or variants thereof.

[0035] Table 3 provides polynucleotide sequences that may be disclaimed according to certain embodiments of the invention. The first column provides a unique clone identifier, “Clone ID”, for a cDNA clone related to contig sequences disclosed in Table 1A. The second column provides the sequence identifier, “SEQ ID NO:X”, for contig sequences disclosed in Table 1A. The third column provides the unique contig identifier, “Contig ID:”, for contigs disclosed in Table 1A. The fourth column provides a unique integer ‘a’ where ‘a’ is any integer between 1 and the final nucleotide minus 15 of SEQ ID NO:X, and the fifth column provides a unique integer ‘b’ where ‘b’ is any integer between 15 and the final nucleotide of SEQ ID NO:X, where both a and b correspond to the positions of nucleotide residues shown in SEQ ID NO:X, and where b is greater than or equal to a +14. For each of the polynucleotides shown as SEQ ID NO:X, the uniquely defined integers can be substituted into the general formula of a-b, and used to describe polynucleotides which may be preferably excluded from the invention. In certain embodiments, preferably excluded from the invention are at least one, two, three, four, five, ten, or more of the polynucleotide sequence(s) having the accession number(s) disclosed in the sixth column of this Table (including for example, published sequence in connection with a particular BAC clone). In further embodiments, preferably excluded from the invention are the specific polynucleotide sequence(s) contained in the clones corresponding to at least one, two, three, four, five, ten, or more of the available material having the accession numbers identified in the sixth column of this Table (including for example, the actual sequence contained in an identified BAC clone).

[0036] Table 4 provides a key to the tissue/cell source identifier code disclosed in Table 1A, column 8. Column 1 provides the tissue/cell source identifier code disclosed in Table 1A, Column 8. Columns 2-5 provide a description of the tissue or cell source. Codes corresponding to diseased tissues are indicated in column 6 with the word “disease”. The use of the word “disease” in column 6 is non-limiting. The tissue or cell source may be specific (e.g. a neoplasm), or may be disease-associated (e.g., a tissue sample from a normal portion of a diseased organ). Furthermore, tissues and/or cells lacking the “disease” designation may still be derived from sources directly or indirectly involved in a disease state or disorder, and therefore may have a further utility in that disease state or disorder. In numerous cases where the tissue/cell source is a library, column 7 identifies the vector used to generate the library.

[0037] Table 5 provides a key to the OMIM reference identification numbers disclosed in Table 1A, column 10. OMIM reference identification numbers (Column 1) were derived from Online Mendelian Inheritance in Man (Online Mendelian Inheritance in Man, OMIM. McKusick-Nathans Institute for Genetic Medicine, Johns Hopkins University (Baltimore, Md.) and National Center for Biotechnology Information, National Library of Medicine, (Bethesda, Md.) 2000. World Wide Web URL: http://www.ncbi.nlm.nih.gov/omim/). Column 2 provides diseases associated with the cytologic band disclosed in Table 1A, column 9, as determined using the Morbid Map database.

[0038] Table 6 summarizes ATCC Deposits, Deposit dates, and ATCC designation numbers of deposits made with the ATCC in connection with the present application.

[0039] Table 7 shows the cDNA libraries sequenced, and ATCC designation numbers and vector information relating to these cDNA libraries.

[0040] Table 8 provides a physical characterization of clones encompassed by the invention. The first column provides the unique clone identifier, “Clone ID NO:Z”, for certain cDNA clones of the invention, as described in Table 1A. The second column provides the size of the cDNA insert contained in the corresponding cDNA clone.

[0041] Definitions

[0042] The following definitions are provided to facilitate understanding of certain terms used throughout this specification.

[0043] In the present invention, “isolated” refers to material removed from its original environment (e.g., the natural environment if it is naturally occurring), and thus is altered “by the hand of man” from its natural state. For example, an isolated polynucleotide could be part of a vector or a composition of matter, or could be contained within a cell, and still be “isolated” because that vector, composition of matter, or particular cell is not the original environment of the polynucleotide. The term “isolated” does not refer to genomic or cDNA libraries, whole cell total or mRNA preparations, genomic DNA preparations (including those separated by electrophoresis and transferred onto blots), sheared whole cell genomic DNA preparations or other compositions where the art demonstrates no distinguishing features of the polynucleotide/sequences of the present invention.

[0044] As used herein, a “polynucleotide” refers to a molecule having a nucleic acid sequence encoding SEQ ID NO:Y or a fragment or variant thereof; a nucleic acid sequence contained in SEQ ID NO:X (as described in column 3 of Table 1A) or the complement thereof; a cDNA sequence contained in Clone ID NO:Z (as described in column 2 of Table 1A and contained within a library deposited with the ATCC); a nucleotide sequence encoding the polypeptide encoded by a nucleotide sequence in SEQ ID NO:B as defined in column 6 of Table 1B or a fragment or variant thereof; or a nucleotide coding sequence in SEQ ID NO:B as defined in column 6 of Table 1B or the complement thereof. For example, the polynucleotide can contain the nucleotide sequence of the full length cDNA sequence, including the 5′ and 3′ untranslated sequences, the coding region, as well as fragments, epitopes, domains, and variants of the nucleic acid sequence. Moreover, as used herein, a “polypeptide” refers to a molecule having an amino acid sequence encoded by a polynucleotide of the invention as broadly defined (obviously excluding poly-Phenylalanine or poly-Lysine peptide sequences which result from translation of a polyA tail of a sequence corresponding to a cDNA).

[0045] In the present invention, “SEQ ID NO:X” was often generated by overlapping sequences contained in multiple clones (contig analysis). A representative clone containing all or most of the sequence for SEQ ID NO:X is deposited at Human Genome Sciences, Inc. (HGS) in a catalogued and archived library. As shown, for example, in column 2 of Table 1A, each clone is identified by a cDNA Clone ID (identifier generally referred to herein as Clone ID NO:Z). Each Clone ID is unique to an individual clone and the Clone ID is all the information needed to retrieve a given clone from the HGS library. Furthermore, certain clones disclosed in this application have been deposited with the ATCC on Oct. 5, 2000, having the ATCC designation numbers PTA 2574 and PTA 2575; and on Jan. 5, 2001, having the depositor reference numbers TS-1, TS-2, AC-1, and AC-2. In addition to the individual cDNA clone deposits, most of the cDNA libraries from which the clones were derived were deposited at the American Type Culture Collection (hereinafter “ATCC”). Table 7 provides a list of the deposited cDNA libraries. One can use the Clone ID NO:Z to determine the library source by reference to Tables 6 and 7. Table 7 lists the deposited cDNA libraries by name and links each library to an ATCC Deposit. Library names contain four characters, for example, “HTWE.” The name of a cDNA clone (Clone ID) isolated from that library begins with the same four characters, for example “HTWEP07”. As mentioned below, Table 1A correlates the Clone ID names with SEQ ID NO:X. Thus, starting with an SEQ ID NO:X, one can use Tables 1, 6 and 7 to determine the corresponding Clone ID, which library it came from and which ATCC deposit the library is contained in. Furthermore, it is possible to retrieve a given cDNA clone from the source library by techniques known in the art and described elsewhere herein. The ATCC is located at 10801 University Boulevard, Manassas, Va. 20110-2209, USA. The ATCC deposits were made pursuant to the terms of the Budapest Treaty on the international recognition of the deposit of microorganisms for the purposes of patent procedure.

[0046] In specific embodiments, the polynucleotides of the invention are at least 15, at least 30, at least 50, at least 100, at least 125, at least 500, or at least 1000 continuous nucleotides but are less than or equal to 300 kb, 200 kb, 100 kb, 50 kb, 15 kb, 10 kb, 7.5 kb, 5 kb, 2.5 kb, 2.0 kb, or 1 kb, in length. In a further embodiment, polynucleotides of the invention comprise a portion of the coding sequences, as disclosed herein, but do not comprise all or a portion of any intron. In another embodiment, the polynucleotides comprising coding sequences do not contain coding sequences of a genomic flanking gene (i.e., 5′ or 3′ to the gene of interest in the genome). In other embodiments, the polynucleotides of the invention do not contain the coding sequence of more than 1000, 500, 250, 100, 50, 25, 20, 15, 10, 5, 4, 3, 2, or 1 genomic flanking gene(s).

[0047] A “polynucleotide” of the present invention also includes those polynucleotides capable of hybridizing, under stringent hybridization conditions, to sequences contained in SEQ ID NO:X, or the complement thereof (e.g., the complement of any one, two, three, four, or more of the polynucleotide fragments described herein), the polynucleotide sequence delineated in columns 8 and 9 of Table 2 or the complement thereof, and/or cDNA sequences contained in Clone ID NO:Z (e.g., the complement of any one, two, three, four, or more of the polynucleotide fragments, or the cDNA clone within the pool of cDNA clones deposited with the ATCC, described herein), and/or the polynucleotide sequence delineated in column 6 of Table 1B or the complement thereof. “Stringent hybridization conditions” refers to an overnight incubation at 42 degree C. in a solution comprising 50% formamide, 5×SSC (750 mM NaCl, 75 mM trisodium citrate), 50 mM sodium phosphate (pH 7.6), 5×Denhardt's solution, 10% dextran sulfate, and 20 μg/ml denatured, sheared salmon sperm DNA, followed by washing the filters in 0.1×SSC at about 65 degree C.

[0048] Also contemplated are nucleic acid molecules that hybridize to the polynucleotides of the present invention at lower stringency hybridization conditions. Changes in the stringency of hybridization and signal detection are primarily accomplished through the manipulation of formamide concentration (lower percentages of formamide result in lowered stringency); salt conditions, or temperature. For example, lower stringency conditions include an overnight incubation at 37 degree C. in a solution comprising 6×SSPE (20×SSPE=3M NaCl; 0.2M NaH₂PO₄; 0.02M EDTA, pH 7.4), 0.5% SDS, 30% formamide, 100 ug/ml salmon sperm blocking DNA; followed by washes at 50 degree C. with 1×SSPE, 0.1% SDS. In addition, to achieve even lower stringency, washes performed following stringent hybridization can be done at higher salt concentrations (e.g. 5×SSC).

[0049] Note that variations in the above conditions may be accomplished through the inclusion and/or substitution of alternate blocking reagents used to suppress background in hybridization experiments. Typical blocking reagents include Denhardt's reagent, BLOTTO, heparin, denatured salmon sperm DNA, and commercially available proprietary formulations. The inclusion of specific blocking reagents may require modification of the hybridization conditions described above, due to problems with compatibility.

[0050] Of course, a polynucleotide which hybridizes only to polyA+ sequences (such as any 3′ terminal polyA+ tract of a cDNA shown in the sequence listing), or to a complementary stretch of T (or U) residues, would not be included in the definition of “polynucleotide,” since such a polynucleotide would hybridize to any nucleic acid molecule containing a poly (A) stretch or the complement thereof (e.g., practically any double-stranded cDNA clone generated using oligo dT as a primer).

[0051] The polynucleotide of the present invention can be composed of any polyribonucleotide or polydeoxribonucleotide, which may be unmodified RNA or DNA or modified RNA or DNA. For example, polynucleotides can be composed of single- and double-stranded DNA, DNA that is a mixture of single- and double-stranded regions, single- and double-stranded RNA, and RNA that is mixture of single- and double-stranded regions, hybrid molecules comprising DNA and RNA that may be single-stranded or, more typically, double-stranded or a mixture of single- and double-stranded regions. In addition, the polynucleotide can be composed of triple-stranded regions comprising RNA or DNA or both RNA and DNA. A polynucleotide may also contain one or more modified bases or DNA or RNA backbones modified for stability or for other reasons. “Modified” bases include, for example, tritylated bases and unusual bases such as inosine. A variety of modifications can be made to DNA and RNA; thus, “polynucleotide” embraces chemically, enzymatically, or metabolically modified forms.

[0052] The polypeptide of the present invention can be composed of amino acids joined to each other by peptide bonds or modified peptide bonds, i.e., peptide isosteres, and may contain amino acids other than the 20 gene-encoded amino acids. The polypeptides may be modified by either natural processes, such as posttranslational processing, or by chemical modification techniques which are well known in the art. Such modifications are well described in basic texts and in more detailed monographs, as well as in a voluminous research literature. Modifications can occur anywhere in a polypeptide, including the peptide backbone, the amino acid side-chains and the amino or carboxyl termini. It will be appreciated that the same type of modification may be present in the same or varying degrees at several sites in a given polypeptide. Also, a given polypeptide may contain many types of modifications. Polypeptides may be branched, for example, as a result of ubiquitination, and they may be cyclic, with or without branching. Cyclic, branched, and branched cyclic polypeptides may result from posttranslation natural processes or may be made by synthetic methods. Modifications include acetylation, acylation, ADP-ribosylation, amidation, covalent attachment of flavin, covalent attachment of a heme moiety, covalent attachment of a nucleotide or nucleotide derivative, covalent attachment of a lipid or lipid derivative, covalent attachment of phosphotidylinositol, cross-linking, cyclization, disulfide bond formation, demethylation, formation of covalent cross-links, formation of cysteine, formation of pyroglutamate, formylation, gamma-carboxylation, glycosylation, GPI anchor formation, hydroxylation, iodination, methylation, myristoylation, oxidation, pegylation, proteolytic processing, phosphorylation, prenylation, racemization, selenoylation, sulfation, transfer-RNA mediated addition of amino acids to proteins such as arginylation, and ubiquitination. (See, for instance, PROTEINS—STRUCTURE AND MOLECULAR PROPERTIES, 2nd Ed., T. E. Creighton, W. H. Freeman and Company, New York (1993); POSTTRANSLATIONAL COVALENT MODIFICATION OF PROTEINS, B. C. Johnson, Ed., Academic Press, New York, pgs. 1-12 (1983); Seifter et al., Meth. Enzymol. 182:626-646 (1990); Rattan et al., Ann. N.Y. Acad. Sci. 663:48-62 (1992)).

[0053] “SEQ ID NO:X” refers to a polynucleotide sequence described, for example, in Tables 1A or 2, while “SEQ ID NO:Y” refers to a polypeptide sequence described in column 6 of Table 1A. SEQ ID NO:X is identified by an integer specified in column 4 of Table 1A. The polypeptide sequence SEQ ID NO:Y is a translated open reading frame (ORF) encoded by polynucleotide SEQ ID NO:X. “Clone ID NO:Z” refers to a cDNA clone described in column 2 of Table 1A.

[0054] “A polypeptide having functional activity” refers to a polypeptide capable of displaying one or more known functional activities associated with a full-length (complete) protein. Such functional activities include, but are not limited to, biological activity, antigenicity [ability to bind (or compete with a polypeptide for binding) to an anti-polypeptide antibody], immunogenicity (ability to generate antibody which binds to a specific polypeptide of the invention), ability to form multimers with polypeptides of the invention, and ability to bind to a receptor or ligand for a polypeptide.

[0055] The polypeptides of the invention can be assayed for functional activity (e.g. biological activity) using or routinely modifying assays known in the art, as well as assays described herein. Specifically, one of skill in the art may routinely assay signal transduction pathway component polypeptides (including fragments and variants) of the invention for activity using assays as described in Examples 38, 39, 49, 52-57, 64 and 67.

[0056] “A polypeptide having biological activity” refers to a polypeptide exhibiting activity similar to, but not necessarily identical to, an activity of a polypeptide of the present invention, including mature forms, as measured in a particular biological assay, with or without dose dependency. In the case where dose dependency does exist, it need not be identical to that of the polypeptide, but rather substantially similar to the dose-dependence in a given activity as compared to the polypeptide of the present invention (i.e., the candidate polypeptide will exhibit greater activity or not more than about 25-fold less and, preferably, not more than about tenfold less activity, and most preferably, not more than about three-fold less activity relative to the polypeptide of the present invention).

[0057] Table 1A summarizes some of the polynucleotides encompassed by the invention (including contig sequences (SEQ ID NO:X) and clones (Clone ID NO:Z) and further summarizes certain characteristics of these polynucleotides and the polypeptides encoded thereby.

[0058] Polynucleotides and Polypeptides of the Invention

TABLE 1A

| | | | | | | | | | |
|---|---|---|---|---|---|---|---|---|---|
| | | | | | AA | | Tissue Distribution | | |
| | | | | | SEQ | | Library code: count | | OMIM |
| Gene | Clone ID | Contig | SEQ ID | ORF | ID | | (see Table IV for | Cytologic | Disease |
| No: | NO: Z | ID: | NO: X | (From-To) | NO: Y | Predicted Epitopes | Library Codes) | Band | Reference(s): |

| | | | | | | | | | | |
|---|---|---|---|---|---|---|---|---|---|---|
| 1 | HDPTE21 | 1165861 | 11 | 33-1790 | 624 | Pro-16 to Gln-22, | AR051: 26, AR050: | | | |
| | | | | | | Arg-34 to Asn-41, | 22, AR054: 21, AR089: | | | |
| | | | | | | Arg-49 to Lys-55, | 1, AR061: 1 | | | |
| | | | | | | Leu-156 to Thr-163, | H0529: 4, L0770: 4, | | | |
| | | | | | | Glu-169 to Glu-174, | L0748: 4, L0749: 3, | | | |
| | | | | | | Ser-198 to Glu-214, | L0777: 3, S0036: 2, | | | |
| | | | | | | Glu-246 to Pro-252, | L0756: 2, S0360: 1, | | | |
| | | | | | | Arg-260 to Ser-271, | H0036: 1, H0318: 1, | | | |
| | | | | | | Val-286 to Gly-291, | H0457: 1, H0051: 1, | | | |
| | | | | | | Ser-304 to Glu-335, | H0328: 1, H0644: 1, | | | |
| | | | | | | Pro-436 to Pro-451, | S0002: 1, L0761: 1, | | | |
| | | | | | | Ser-482 to Gly-487, | L0766: 1, L0804: 1, | | | |
| | | | | | | Val-498 to Ser-505, | L0784: 1, H0521: 1 and | | | |
| | | | | | | Asp-564 to Lys-585. | L0759: 1. | | | |
| | | 887711 | 443 | 1-639 | 1056 | | | | | |
| | | 901381 | 444 | 570-112 | 1057 | Gly-26 to Gly-32. | | | | |
| 2 | H6EDR51 | 1197894 | 12 | 1-1935 | 625 | Glu-35 to Gln-44, | AR089: 1, AR061: 1 | | | |
| | | | | | | Arg-70 to Val-77, | L0794: 11, L0777: 9, | | | |
| | | | | | | Ala-113 to Gly-123, | H0255: 4, H0559: 4, | | | |
| | | | | | | Ser-128 to Phe-133, | H0486: 3, H0581: 3, | | | |
| | | | | | | Gly-235 to His-242, | L0809: 3, H0521: 3, | | | |
| | | | | | | Glu-249 to Leu-254, | S0404: 3, H0556: 2, | | | |
| | | | | | | Pro-286 to Arg-292, | H0580: 2, H0635: 2, | | | |
| | | | | | | Ser-309 to Glu-316, | H0271: 2, H0135: 2, | | | |
| | | | | | | Lys-337 to Glu-360, | H0703: 2, L0748: 2, | | | |
| | | | | | | Gln-336 to Gln-376, | L0758: 2, H0543: 2, | | | |
| | | | | | | Glu-383 to Ala-388, | H0422: 2, H0265: 1, | | | |
| | | | | | | Leu-391 to Leu-406, | H0583: 1, H0656: 1, | | | |
| | | | | | | Gln-413 to Ala-420, | H0638: 1, S0354: 1, | | | |
| | | | | | | Leu-430 to Leu-452, | S0360: 1, H0637: 1, | | | |
| | | | | | | Lys-461 to Glu-467, | H0600: 1, H0592: 1, | | | |
| | | | | | | Leu-476 to Lys-485, | H0586: 1, H0587: 1, | | | |
| | | | | | | Lys-491 to Arg-496, | H0257: 1, H0069: 1, | | | |
| | | | | | | Arg-500 to Gln-509, | H0253: 1, S0049: 1, | | | |
| | | | | | | Ala-513 to Asp-539, | H0199: 1, S0368: 1, | | | |
| | | | | | | Gln-544 to Ala-550, | H0212: 1, H0494: 1, | | | |
| | | | | | | Glu-569 to Val-576, | H0529: 1, L0763: 1, | | | |
| | | | | | | Arg-598 to Ser-620, | L0637: 1, L0761: 1, | | | |
| | | | | | | Asn-622 to Ala-627, | L0630: 1, L0764: 1, | | | |
| | | | | | | Ser-632 to Asn-645. | L0648: 1, L0768: 1, | | | |
| | | | | | | | L0766: 1, L0378: 1, | | | |
| | | | | | | | L0806: 1, L0655: 1, | | | |
| | | | | | | | L0657: 1, L0659: 1, | | | |
| | | | | | | | L0789: 1, H0593: 1, | | | |
| | | | | | | | H0670: 1, S0378: 1, | | | |
| | | | | | | | S0152: 1, H0696: 1, | | | |
| | | | | | | | H0134: 1, L0779: 1, | | | |
| | | | | | | | H0445: 1, H0542: 1 and | | | |
| | | | | | | | H0423: 1. | | | |
| | | 930788 | 445 | 1-1248 | 1058 | Glu-26 to Gln-35, | | | | |
| | | | | | | Arg-61 to Val-68, | | | | |
| | | | | | | Ala-104 to Gly-114, | | | | |
| | | | | | | Ser-119 to Phe-124, | | | | |
| | | | | | | Gly-226 to His-233, | | | | |
| | | | | | | Glu-240 to Leu-245, | | | | |
| | | | | | | Pro-277 to Arg-283. | | | | |
| 3 | HAPRA41 | 1154054 | 13 | 2-1276 | 626 | Ser-5 to Arg-24, | AR061: 3, AR089: 2 | | | |
| | | | | | | Trp-27 to Ala-32, | L0777: 2, S0001: 1, | | | |
| | | | | | | Arg-48 to Gln-54, | S0222: 1, H0575: 1, | | | |
| | | | | | | Lys-71 to Gln-79, | H0618: 1, H0253: 1, | | | |
| | | | | | | Pro-93 to His-101, | H0266: 1, H0038: 1, | | | |
| | | | | | | Lys-104 to Thr-110, | H0616: 1, L0643: 1, | | | |
| | | | | | | Ser-119 to Gln-125, | L0352: 1 and L0758: 1. | | | |
| | | | | | | Val-141 to Pro-152, | | | | |
| | | | | | | Leu-158 to Gly-171, | | | | |
| | | | | | | Asn-183 to Ala-198, | | | | |
| | | | | | | Gly-217 to Asp-233, | | | | |
| | | | | | | Ser-244 to Asn-258, | | | | |
| | | | | | | Lys-264 to Leu-269, | | | | |
| | | | | | | Ser-310 to Gly-316, | | | | |
| | | | | | | Thr-326 to Glu-333, | | | | |
| | | | | | | Ser-396 to Pro-403, | | | | |
| | | | | | | Leu-416 to Lys-425. | | | | |
| | | 926285 | 446 | 3-500 | 1059 | Ser-3 to Arg-21, | | | | |
| | | | | | | Trp-24 to Ala-29, | | | | |
| | | | | | | Arg-45 to Gln-51, | | | | |
| | | | | | | Lys-68 to Gln-76, | | | | |
| | | | | | | Pro-90 to His-98, | | | | |
| | | | | | | Lys-101 to Thr-107, | | | | |
| | | | | | | Ser-116 to Gln-122. | | | | |
| 4 | HBXBI07 | 1171958 | 14 | 1-228 | 627 | Ser-6 to Pro-14. | AR061: 1, AR089: 1 | | | |
| | | | | | | | S0038: 1 | | | |
| | | 954118 | 447 | 107-838 | 1060 | | | | | |
| 5 | HBXCM38 | 910086 | 15 | 402-1535 | 628 | Val-36 to Glu-43, | AR061: 2, AR089: 1 | | | |
| | | | | | | Lys-66 to Glu-71. | L0439: 6, S0038: 3, | | | |
| | | | | | | | L0803: 3, H0455: 2, | | | |
| | | | | | | | L0769: 2, L0809: 2, | | | |
| | | | | | | | L0741: 2, L0756: 2, | | | |
| | | | | | | | S6024: 1, S0001: 1, | | | |
| | | | | | | | H0663: 1, S0222: 1, | | | |
| | | | | | | | H0441: 1, H0438: 1, | | | |
| | | | | | | | H0036: 1, S0049: 1, | | | |
| | | | | | | | H0309: 1, H0566: 1, | | | |
| | | | | | | | H0024: 1, S0388: 1, | | | |
| | | | | | | | S0051: 1, T0010: 1, | | | |
| | | | | | | | H0059: 1, L0645: 1, | | | |
| | | | | | | | L0774: 1, L0790: 1, | | | |
| | | | | | | | L0663: 1, L0665: 1, | | | |
| | | | | | | | H0345: 1, L0742: 1, | | | |
| | | | | | | | L0748: 1, L0749: 1, | | | |
| | | | | | | | H0707: 1, L0595: 1 and | | | |
| | | | | | | | L0366: 1. | | | |
| 6 | HCE3E50 | 1227586 | 16 | 4-1650 | 629 | Pro-1 to Ser-10, | AR061: 1, AR089: 1 | | | |
| | | | | | | Pro-24 to Ser-29, | H0521: 14, L0439: 6, | | | |
| | | | | | | Pro-43 to Glu-61. | L0754: 6, L0794: 4, | | | |
| | | | | | | | L0748: 4, S0278: 3, | | | |
| | | | | | | | L0766: 3, L0751: 3, | | | |
| | | | | | | | L0747: 3, L0749: 3, | | | |
| | | | | | | | H0556: 2, H0486: 2, | | | |
| | | | | | | | H0250: 2, H0179: 2, | | | |
| | | | | | | | H0271: 2, S0002: 2, | | | |
| | | | | | | | S0426: 2, L0770: 2, | | | |
| | | | | | | | L0769: 2, L0775: 2, | | | |
| | | | | | | | L0659: 2, L0411: 1, | | | |
| | | | | | | | S0134: 1, H0638: 1, | | | |
| | | | | | | | S0418: 1, S0420: 1, | | | |
| | | | | | | | S0354: 1, S0358: 1, | | | |
| | | | | | | | S0360: 1, S0222: 1, | | | |
| | | | | | | | H0613: 1, H0052: 1, | | | |
| | | | | | | | H0051: 1, L0143: 1, | | | |
| | | | | | | | L0455: 1, H0124: 1, | | | |
| | | | | | | | H0090: 1, H0551: 1, | | | |
| | | | | | | | H0412: 1, S0038: 1, | | | |
| | | | | | | | H0646: 1, S0344: 1, | | | |
| | | | | | | | L0667: 1, L0772: 1, | | | |
| | | | | | | | L0800: 1, L0662: 1, | | | |
| | | | | | | | L0768: 1, L0804: 1, | | | |
| | | | | | | | L0805: 1, L0790: 1, | | | |
| | | | | | | | S0052: 1, H0593: 1, | | | |
| | | | | | | | S0330: 1, H0539: 1, | | | |
| | | | | | | | H0518: 1, S0332: 1, | | | |
| | | | | | | | S0027: 1, L0741: 1, | | | |
| | | | | | | | L0743: 1, L0740: 1, | | | |
| | | | | | | | L0779: 1, L0731: 1, | | | |
| | | | | | | | L0758: 1, H0445: 1, | | | |
| | | | | | | | L0605: 1, S0196: 1 and | | | |
| | | | | | | | H0423: 1. | | | |
| | | 961098 | 448 | 2-616 | 1061 | | | | | |
| 7 | HCEQD04 | 1150868 | 17 | 3-371 | 630 | His-1 to Cys-13, | AR061: 5, AR089: 4 | | | |
| | | | | | | Glu-31 to Ala-49, | H0052: 2 | | | |
| | | | | | | Asp-82 to Pro-88. | | | | |
| | | 927873 | 449 | 1-354 | 1062 | Glu-2 to Cys-11, | | | | |
| | | | | | | Glu-29 to Ala-47, | | | | |
| | | | | | | Asp-80 to Pro-86. | | | | |
| 8 | HDPHI92 | 909900 | 18 | 366-1346 | 631 | Asn-1 to Gly-6, | AR089: 7, AR061: 3 | | | |
| | | | | | | Pro-34 to Arg-43, | H0521: 7, L0766: 5, | | | |
| | | | | | | Lys-51 to Ile-56, | H0318: 3, L0655: 3, | | | |
| | | | | | | Lys-58 to Arg-63, | H0522: 3, H0543: 3, | | | |
| | | | | | | Tyr-73 to Gly-85, | H0657: 2, H0553: 2, | | | |
| | | | | | | Ala-98 to Ala-104, | L0632: 2, L0748: 2, | | | |
| | | | | | | Ser-115 to Asp-124, | H0445: 2, L0605: 2, | | | |
| | | | | | | Gly-189 to Gly-194, | H0422: 2, H0265: 1, | | | |
| | | | | | | Pro-199 to Leu-204, | H0556: 1, S0114: 1, | | | |
| | | | | | | Ala-214 to Asp-225, | H0583: 1, H0650: 1, | | | |
| | | | | | | Thr-260 to Gln-268, | S0116: 1, H0341: 1, | | | |
| | | | | | | Pro-279 to Ser-284. | S0360: 1, H0676: 1, | | | |
| | | | | | | | H0497: 1, H0486: 1, | | | |
| | | | | | | | H0075: 1, H0581: 1, | | | |
| | | | | | | | H0421: 1, S0388: 1, | | | |
| | | | | | | | H0271: 1, H0031: 1, | | | |
| | | | | | | | H0090: 1, H0591: 1, | | | |
| | | | | | | | H0038: 1, L0638: 1, | | | |
| | | | | | | | L0667: 1, L0363: 1, | | | |
| | | | | | | | L0774: 1, L0775: 1, | | | |
| | | | | | | | L0658: 1, L0659: 1, | | | |
| | | | | | | | L0809: 1, L0647: 1, | | | |
| | | | | | | | L0790: 1, H0701: 1, | | | |
| | | | | | | | H0658: 1, H0555: 1, | | | |
| | | | | | | | L0779: 1, L0777: 1, | | | |
| | | | | | | | L0731: 1 and H0423: 1. | | | |
| 9 | HDPLT89 | 962403 | 19 | 83-931 | 632 | Lys-13 to Gly-28, | AR054: 57, AR051: | | | |
| | | | | | | Arg-64 to Gly-71, | 36, AR050: 36, AR089: | | | |
| | | | | | | Pro-131 to Glu-137, | 4, AR061: 1 | | | |
| | | | | | | Gln-152 to Asp-159, | L0731: 19, L0766: 16, | | | |
| | | | | | | Lys-170 to Gly-179, | H0521: 11, L0748: 7, | | | |
| | | | | | | Thr-183 to Trp-188, | L0754: 7, L0806: 6, | | | |
| | | | | | | Arg-193 to Glu-206, | L0749: 6, L0794: 5, | | | |
| | | | | | | Asp-222 to Val-228, | L0666: 5, S0360: 4, | | | |
| | | | | | | Ser-262 to Ser-277. | L0663: 4, L0740: 4, | | | |
| | | | | | | | L0747: 4, H0656: 3, | | | |
| | | | | | | | L0771: 3, L0662: 3, | | | |
| | | | | | | | L0774: 3, L0665: 3, | | | |
| | | | | | | | L0439: 3, L0777: 3, | | | |
| | | | | | | | L0755: 3, H0638: 2, | | | |
| | | | | | | | H0431: 2, H0620: 2, | | | |
| | | | | | | | H0494: 2, S0002: 2, | | | |
| | | | | | | | L0769: 2, L0803: 2, | | | |
| | | | | | | | L0438: 2, H0689: 2, | | | |
| | | | | | | | H0659: 2, H0658: 2, | | | |
| | | | | | | | H0518: 2, S0206: 2, | | | |
| | | | | | | | L0750: 2, S0242: 2, | | | |
| | | | | | | | H0423: 2, H0650: 1, | | | |
| | | | | | | | H0341: 1, H0661: 1, | | | |
| | | | | | | | H0662: 1, H0300: 1, | | | |
| | | | | | | | S0418: 1, S0376: 1, | | | |
| | | | | | | | H0580: 1, S0045: 1, | | | |
| | | | | | | | L0717: 1, H0453: 1, | | | |
| | | | | | | | H0370: 1, H0497: 1, | | | |
| | | | | | | | H0574: 1, H0632: 1, | | | |
| | | | | | | | H0486: 1, L0021: 1, | | | |
| | | | | | | | S0474: 1, H0544: 1, | | | |
| | | | | | | | H0046: 1, H0050: 1, | | | |
| | | | | | | | H0510: 1, H0594: 1, | | | |
| | | | | | | | S0340: 1, S0003; 1, | | | |
| | | | | | | | T0023; 1, H0553: 1, | | | |
| | | | | | | | H0644: 1, H0674: 1, | | | |
| | | | | | | | H0040: 1, H0102: 1, | | | |
| | | | | | | | H0641: 1, H0538: 1, | | | |
| | | | | | | | L0763: 1, L0648: 1, | | | |
| | | | | | | | L0768: 1, L0387: 1, | | | |
| | | | | | | | L0804: 1, L0775; 1, | | | |
| | | | | | | | L0805: 1, L0655: 1, | | | |
| | | | | | | | L0783: 1, L0788: 1, | | | |
| | | | | | | | S0374: 1, H0691: 1, | | | |
| | | | | | | | H0435: 1, H0670: 1, | | | |
| | | | | | | | H0648: 1, H0522: 1, | | | |
| | | | | | | | H0134: 1, S3014: 1, | | | |
| | | | | | | | L0779: 1, L0597: 1, | | | |
| | | | | | | | S0026: 1, H0542: 1, | | | |
| | | | | | | | H0543: 1, H0506: 1 and | | | |
| | | | | | | | H0352: 1. | | | |
| 10 | HDPSU48 | 1228284 | 20 | 466-987 | 633 | Gln-1 to Gly-8, | AR089: 1, AR061: 0 | | | |
| | | | | | | Ile-15 to Asp-20, | L0766: 10, L0803: 6, | | | |
| | | | | | | Lys-61 to Glu-69, | L0754: 5, S0152: 4, | | | |
| | | | | | | Pro-93 to Lys-102, | L0771: 3, H0656: 2, | | | |
| | | | | | | Ala-147 to Leu-156, | L0662; 2, L0774: 2, | | | |
| | | | | | | Pro-159 to Asp-174. | S0380: 2, H0423: 2, | | | |
| | | | | | | | H0624: 1, H0685: 1, | | | |
| | | | | | | | L0002: 1, H0583: 1, | | | |
| | | | | | | | L0760: 1, H0661: 1, | | | |
| | | | | | | | S0358: 1, S0360: 1, | | | |
| | | | | | | | H0637: 1, H0601: 1, | | | |
| | | | | | | | H0486: 1, H0457: 1, | | | |
| | | | | | | | H0247: 1, S0003: 1, | | | |
| | | | | | | | T0067: 1, S0002: 1, | | | |
| | | | | | | | S0426: 1, H0529: 1, | | | |
| | | | | | | | L0770: 1, L0764: 1, | | | |
| | | | | | | | L0806: 1, L0655: 1, | | | |
| | | | | | | | L0659: 1, L0666: 1, | | | |
| | | | | | | | L0663: 1, L0664; 1, | | | |
| | | | | | | | S0428: 1, S0126: 1, | | | |
| | | | | | | | H0435: 1, H0521: 1, | | | |
| | | | | | | | H0522: 1, L0747: 1, | | | |
| | | | | | | | L0756: 1, L0759: 1, | | | |
| | | | | | | | H0445: 1 and H0422: 1. | | | |
| | | 909949 | 450 | 227-976 | 1063 | Ser-9 to Arg-14, | | | | |
| | | | | | | Arg-48 to Arg-54, | | | | |
| | | | | | | Gln-71 to Lys-77, | | | | |
| | | | | | | Ile-91 to Asp-96, | | | | |
| | | | | | | Lys-137 to Glu-145, | | | | |
| | | | | | | Pro-169 to Lys-178, | | | | |
| | | | | | | Ala-223 to Leu-232, | | | | |
| | | | | | | Pro-235 to Asp-250. | | | | |
| 11 | HDPWE80 | 909916 | 21 | 94-765 | 634 | Asp-8 to Cys-21, | H0521: 9, L0595: 2, | | | |
| | | | | | | Val-25 to Asn-33, | L0593: 1 and L0594: 1. | | | |
| | | | | | | Thr-47 to Pro-55, | | | | |
| | | | | | | Ala-62 to Thr-68, | | | | |
| | | | | | | Val-79 to Lys-88, | | | | |
| | | | | | | Asn-91 to Asn-104, | | | | |
| | | | | | | Tyr-114 to Gly-120, | | | | |
| | | | | | | Thr-187 to Glu-192, | | | | |
| | | | | | | Ile-217 to Thr-224. | | | | |
| 12 | HDQFY84 | 1092137 | 22 | 2-2776 | 635 | Glu-94 to Tyr-102, | AR051: 2, AR050: 1, | | | |
| | | | | | | Pro-105 to Asn-112, | AR061: 1, AR054: 1, | | | |
| | | | | | | Thr-121 to Gly-137, | AR089: 0 | | | |
| | | | | | | Glu-157 to Gly-162, | S0354: 8, H0254: 2, | | | |
| | | | | | | Glu-179 to Phe-186, | S0358: 2, H0580: 2, | | | |
| | | | | | | Cys-211 to Thr-222, | H0521: 2, H0656: 1, | | | |
| | | | | | | Ser-240 to Lys-245, | H0590: 1, H0457: 1, | | | |
| | | | | | | Thr-262 to Asn-279, | H0271: 1 and H0488: 1. | | | |
| | | | | | | Arg-288 to Pro-306, | | | | |
| | | | | | | Asn-332 to Gln-339, | | | | |
| | | | | | | Ser-375 to Leu-382, | | | | |
| | | | | | | Arg-408 to Gly-415, | | | | |
| | | | | | | Asp-423 to Thr-428, | | | | |
| | | | | | | Ser-471 to Asn-476, | | | | |
| | | | | | | Pro-545 to Gly-551, | | | | |
| | | | | | | Ser-606 to Pro-616, | | | | |
| | | | | | | Ala-662 to Gly-667, | | | | |
| | | | | | | Thr-675 to Tyr-682, | | | | |
| | | | | | | Glu-714 to Trp-720, | | | | |
| | | | | | | Pro-722 to Val-732, | | | | |
| | | | | | | Pro-787 to Thr-795, | | | | |
| | | | | | | Arg-811 to Glu-816, | | | | |
| | | | | | | Gln-880 to Thr-891. | | | | |
| | | 971615 | 451 | 506-1567 | 1064 | | | | | |
| 13 | HEONQ19 | 930705 | 23 | 3-806 | 636 | Ala-13 to Arg-20, | AR089: 2, AR061: 0 | | | |
| | | | | | | Gln-35 to Lys-48. | H0457: 9, L0596: 3, | | | |
| | | | | | | | L0803: 2, H0673: 1, | | | |
| | | | | | | | L0455: 1, L0369: 1, | | | |
| | | | | | | | L0764: 1, L0389: 1, | | | |
| | | | | | | | L0375: 1, L0655: 1, | | | |
| | | | | | | | L0809: 1, L0790: 1 and | | | |
| | | | | | | | L0752: 1. | | | |
| 14 | HFCBB56 | 910073 | 24 | 209-565 | 637 | | AR061: 1, AR089: 1 | | | |
| | | | | | | | H0009: 1 | | | |
| 15 | HFKKZ94 | 1163070 | 25 | 3-719 | 638 | Arg-15 to Trp-20, | AR061: 4, AR089: 2 | | | |
| | | | | | | Asn-26 to Pro-34, | S0278: 4, H0581: 4, | | | |
| | | | | | | Lys-115 to Glu-125, | L0751: 4, H0620: 3, | | | |
| | | | | | | Glu-154 to Trp-163, | L0764: 3, L0662: 3, | | | |
| | | | | | | Ser-192 to Val-197, | L0659: 3, L0439: 3, | | | |
| | | | | | | Gly-216 to Arg-222. | L0754: 3, H0542: 3, | | | |
| | | | | | | | H0170: 2, H0402: 2, | | | |
| | | | | | | | H0580: 2, H0550: 2, | | | |
| | | | | | | | H0333: 2, H0012: 2, | | | |
| | | | | | | | T0010: 2, H0252: 2, | | | |
| | | | | | | | H0063: 2, H0059: 2, | | | |
| | | | | | | | S0002: 2, L0775: 2, | | | |
| | | | | | | | L0655: 2, L0663: 2, | | | |
| | | | | | | | L0665: 2, H0593: 2, | | | |
| | | | | | | | H0658: 2, H0539: 2, | | | |
| | | | | | | | H0555: 2, L0743: 2, | | | |
| | | | | | | | L0744: 2, L0752: 2, | | | |
| | | | | | | | L0731: 2, H0543: 2, | | | |
| | | | | | | | H0624: 1, H0265: 1, | | | |
| | | | | | | | H0650: 1, H0656: 1, | | | |
| | | | | | | | S0212: 1, H0306: 1, | | | |
| | | | | | | | H0305: 1, S0360: 1, | | | |
| | | | | | | | S0046: 1, H0619: 1, | | | |
| | | | | | | | S0222: 1, S6014: 1, | | | |
| | | | | | | | H0613: 1, H0492: 1, | | | |
| | | | | | | | H0250: 1, H0635: 1, | | | |
| | | | | | | | H0427: 1, L0021: 1, | | | |
| | | | | | | | H0036: 1, H0421: 1, | | | |
| | | | | | | | H0399: 1, H0416: 1, | | | |
| | | | | | | | H0188: 1, S0250: 1, | | | |
| | | | | | | | L0143: 1, H0617: 1, | | | |
| | | | | | | | H0673: 1, H0124: 1, | | | |
| | | | | | | | H0163: 1, H0634: 1, | | | |
| | | | | | | | H0087: 1, T0067: 1, | | | |
| | | | | | | | H0264: 1, H0272: 1, | | | |
| | | | | | | | H0412: 1, H0413: 1, | | | |
| | | | | | | | H0100: 1, S0344: 1, | | | |
| | | | | | | | S0426: 1, L0770: 1, | | | |
| | | | | | | | L0638: 1, L0761: 1, | | | |
| | | | | | | | L0794: 1, L0650: 1, | | | |
| | | | | | | | L0661: 1, L0546: 1, | | | |
| | | | | | | | S0053: 1, H0689: 1, | | | |
| | | | | | | | H0521: 1, S3014: 1, | | | |
| | | | | | | | L0748: 1, L0740: 1, | | | |
| | | | | | | | L0779: 1, L0780: 1, | | | |
| | | | | | | | L0753: 1, L0759: 1, | | | |
| | | | | | | | H0445: 1, H0595: 1, | | | |
| | | | | | | | L0362: 1, H0653: 1 and | | | |
| | | | | | | | H0506: 1. | | | |
| | | 926486 | 452 | 1-720 | 1065 | Arg-16 to Trp-21, | | | | |
| | | | | | | Asn-27 to Pro-35, | | | | |
| | | | | | | Lys-116 to Glu-126, | | | | |
| | | | | | | Glu-155 to Trp-164, | | | | |
| | | | | | | Ser-193 to Val-198, | | | | |
| | | | | | | Gly-217 to Arg-223. | | | | |
| 16 | HHBGJ53 | 1187668 | 26 | 312-1 | 639 | | AR089: 8, AR061: 5 | | | |
| | | | | | | | L0740: 2 and H0373: | | | |
| | | | | | | | 1. | | | |
| | | 909912 | 453 | 1-282 | 1066 | Ser-1 to Ser-7, | | | | |
| | | | | | | Ser-25 to Arg-31. | | | | |
| | | | | | | 1. | | | | |
| 17 | HHFJF24 | 1212624 | 27 | 1374-538 | 640 | Lys-1 to Ala-6, | AR089: 1, AR061; 0 | | | |
| | | | | | | Ser-38 to Gln-43. | S0001: 1, H0619: 1, | | | |
| | | | | | | | H0586: 1, H0427: 1 and | | | |
| | | | | | | | L0595: 1. | | | |
| | | 910065 | 454 | 3-206 | 1067 | | | | | |
| 18 | HHFMM10 | 1178801 | 28 | 368-751 | 641 | Ser-19 to Thr-29, | AR089: 20, AR061: 7 | | | |
| | | | | | | Lys-62 to Arg-67, | H0031: 2, H0619: 1 | | | |
| | | | | | | Gln-102 to Phe-113. | and S0036: 1. | | | |
| | | 962997 | 455 | 95-493 | 1068 | Gly-1 to Ser-13, | | | | |
| | | | | | | Ile-24 to Phe-29. | | | | |
| 19 | HHPBA42 | 901921 | 29 | 1-912 | 642 | Gly-9 to Gln-15. | AR061: 133, AR089: | | | |
| | | | | | | | 118 | | | |
| | | | | | | | L0764: 4, L0659: 4, | | | |
| | | | | | | | L0761: 3, S0360: 2, | | | |
| | | | | | | | H0031: 2, L0662: 2, | | | |
| | | | | | | | L0747: 2, L0750: 2, | | | |
| | | | | | | | H0624: 1, H0295: 1, | | | |
| | | | | | | | S0356: 1, S0132: 1, | | | |
| | | | | | | | H0351: 1, L0394: 1, | | | |
| | | | | | | | L0738: 1, H0051: 1, | | | |
| | | | | | | | H0328: 1, L0796: 1, | | | |
| | | | | | | | L0646: 1, L0800: 1, | | | |
| | | | | | | | L0794: 1, L0549: 1, | | | |
| | | | | | | | L0803: 1, L0806: 1, | | | |
| | | | | | | | L0809: 1, L0788: 1, | | | |
| | | | | | | | L0789; 1, S0374: 1, | | | |
| | | | | | | | H0435: 1, H0539: 1, | | | |
| | | | | | | | S0378: 1, S0146: 1, | | | |
| | | | | | | | L0754: 1, L0780: 1, | | | |
| | | | | | | | L0752: 1 and L0591: 1. | | | |
| 20 | HHPSP89 | 1217052 | 30 | 2-916 | 643 | Gly-1 to Ile-11, | AR089: 1, AR061: 0 | | | |
| | | | | | | Pro-49 to Asp-59, | H0038: 3, H0616: 3, | | | |
| | | | | | | Val-64 to Leu-70, | S0386: 2, L0366: 2, | | | |
| | | | | | | Gly-105 to Ser-112, | S0001: 1, S0360: 1, | | | |
| | | | | | | Ser-130 to Ala-146, | H0208: 1, S0046: 1, | | | |
| | | | | | | Asn-223 to Val-229, | S6026: 1, H0486: 1, | | | |
| | | | | | | Asn-272 to Asp-278, | H0052: 1, H0201: 1, | | | |
| | | | | | | Lys-294 to Tyr-305. | T0010: 1, S0036: 1, | | | |
| | | | | | | | L0776: 1, S0216: 1, | | | |
| | | | | | | | H0701: 1, H0593: 1, | | | |
| | | | | | | | S0152: 1, H0521: 1, | | | |
| | | | | | | | L0753: 1, L0758: 1 and | | | |
| | | | | | | | S0031: 1. | | | |
| | | 910024 | 456 | 1-906 | 1069 | Pro-46 to Asp-56, | | | | |
| | | | | | | Val-61 to Leu-67, | | | | |
| | | | | | | Gly-102 to Ser-109, | | | | |
| | | | | | | Ser-127 to Ala-143, | | | | |
| | | | | | | Asn-220 to Val-226. | | | | |
| 21 | HKABX13 | 1167182 | 31 | 1-786 | 644 | Lys-49 to Trp-55, | AR089: 12, AR061: 2 | | | |
| | | | | | | Tyr-66 to Val-79, | H0556: 1, H0250: 1, | | | |
| | | | | | | Arg-89 to Asp-106, | H0494: 1, L0809: 1 and | | | |
| | | | | | | Gln-137 to Asn-142. | L0596: 1. | | | |
| | | 958656 | 457 | 2-763 | 1070 | Pro-1 to Arg-15, | | | | |
| | | | | | | Lys-49 to Trp-55, | | | | |
| | | | | | | Tyr-66 to Val-79, | | | | |
| | | | | | | Arg-89 to Asp-106, | | | | |
| | | | | | | Gln-137 to Asn-142, | | | | |
| | | | | | | Ala-171 to Tyr-178, | | | | |
| | | | | | | Glu-224 to Ser-231. | | | | |
| 22 | HLTHG77 | 1162409 | 32 | 2-406 | 645 | Met-17 to Met-24, | AR089; 0, AR061: 0 | | | |
| | | | | | | Ser-31 to Asp-37, | S0192: 13, L0471: 4, | | | |
| | | | | | | Leu-70 to Asp-97. | H0051: 4, H0413: 4, | | | |
| | | | | | | | L0779: 4, S0418: 3, | | | |
| | | | | | | | S0388: 3, H0591: 3, | | | |
| | | | | | | | L0666: 3, S0242: 3, | | | |
| | | | | | | | S0414: 2, H0012: 2, | | | |
| | | | | | | | H0040: 2, H0100: 2, | | | |
| | | | | | | | S0422: 2, L0766: 2, | | | |
| | | | | | | | L0663: 2, S0152: 2, | | | |
| | | | | | | | L0748: 2, L0439: 2, | | | |
| | | | | | | | L0591: 2, S0196: 2, | | | |
| | | | | | | | H0170: 1, H0686: 1, | | | |
| | | | | | | | S0134: 1, S0282: 1, | | | |
| | | | | | | | S0356: 1, S0045: 1, | | | |
| | | | | | | | S0222: 1, H0441: 1, | | | |
| | | | | | | | H0587: 1, T0039: 1, | | | |
| | | | | | | | H0263: 1, T0110: 1, | | | |
| | | | | | | | H0050: 1, H0620: 1, | | | |
| | | | | | | | H0266: 1, H0644: 1, | | | |
| | | | | | | | L0555: 1, H0412: 1, | | | |
| | | | | | | | H0494: 1, L0646: 1, | | | |
| | | | | | | | L0662: 1, L0626: 1, | | | |
| | | | | | | | L0768: 1, L0794: 1, | | | |
| | | | | | | | L0375: 1, L0656: 1, | | | |
| | | | | | | | H0547: 1, H0519: 1, | | | |
| | | | | | | | H0672: 1, S0328: 1, | | | |
| | | | | | | | H0134: 1, L0758: 1, | | | |
| | | | | | | | S0031: 1, S0260: 1, | | | |
| | | | | | | | L0608: 1, H0667: 1 and | | | |
| | | | | | | | S0412: 1. | | | |
| | | 878592 | 458 | 3-1676 | 1071 | Met-14 to Met-21, | | | | |
| | | | | | | Ser-28 to Asp-34, | | | | |
| | | | | | | Leu-67 to Asp-94, | | | | |
| | | | | | | Ala-109 to Ile-123. | | | | |
| 23 | HLWBZ09 | 1179714 | 33 | 123-1349 | 646 | Val-9 to Arg-14, | AR089: 5, AR061: 3 | | | |
| | | | | | | Glu-22 to Phe-30, | L0748: 6, L0754: 4, | | | |
| | | | | | | Met-48 to Ser-59, | L0775: 3, S0206: 3, | | | |
| | | | | | | Thr-76 to Lys-81, | L0758: 3, H0543: 3, | | | |
| | | | | | | Ala-99 to Asp-104, | H0309: 2, H0553: 2, | | | |
| | | | | | | Lys-122 to Val-144, | H0644: 2, L0779: 2, | | | |
| | | | | | | Pro-159 to Glu-164, | L0752: 2, L0485: 2, | | | |
| | | | | | | Gly-169 to His-183, | L0600: 2, H0638: 1, | | | |
| | | | | | | Thr-188 to Asp-194, | S0356: 1, H0580: 1, | | | |
| | | | | | | Lys-211 to Phe-218, | S0046: 1, L0717: 1, | | | |
| | | | | | | Ser-230 to Pro-236, | S0222: 1, H0635: 1, | | | |
| | | | | | | Ala-276 to Glu-281, | H0575: 1, S0010: 1, | | | |
| | | | | | | Arg-297 to His-316, | S6028: 1, S0316: 1, | | | |
| | | | | | | Ser-330 to Ser-335, | L0483: 1, H0032: 1, | | | |
| | | | | | | Ser-367 to Thr-376, | S0036: 1, H0038: 1, | | | |
| | | | | | | Pro-383 to Cys-394. | H0040: 1, H0623: 1, | | | |
| | | | | | | | T0041: 1, H0494: 1, | | | |
| | | | | | | | L0763: 1, L0774: 1, | | | |
| | | | | | | | L0805: 1, L0776: 1, | | | |
| | | | | | | | L0663: 1, H0519: 1, | | | |
| | | | | | | | S0044: 1, H0436: 1, | | | |
| | | | | | | | S0032: 1, L0744: 1, | | | |
| | | | | | | | L0740: 1, L0747: 1, | | | |
| | | | | | | | L0750: 1, L0757: 1, | | | |
| | | | | | | | L0604: 1 and S0276: 1. | | | |
| | | 957912 | 459 | 112-477 | 1072 | Val-9 to Arg-14, | | | | |
| | | | | | | Glu-22 to Phe-30. | | | | |
| 24 | HLWEH54 | 1227713 | 34 | 1-3093 | 647 | Asn-38 to Tyr-46, | AR061: 0, AR089: 0 | | | |
| | | | | | | Pro-56 to Asp-71, | S0414: 12, L0740: 12, | | | |
| | | | | | | Asn-84 to Cys-96, | L0803: 9, L0438: 8, | | | |
| | | | | | | Ser-110 to Val-142, | L0439: 6, L0756: 6, | | | |
| | | | | | | Arg-181 to Leu-187, | L0591: 6, H0623: 5, | | | |
| | | | | | | His-193 to Gly-198, | L0595: 5, L0769: 4, | | | |
| | | | | | | Thr-201 to Arg-210, | S0045: 3, S0046: 3, | | | |
| | | | | | | Asn-224 to Leu-230, | H0031: 3, L0771: 3, | | | |
| | | | | | | Thr-246 to Gly-251, | H0648: 3, L0747: 3, | | | |
| | | | | | | Ser-267 to Ser-272, | L0749: 3, H0341: 2, | | | |
| | | | | | | Ser-284 to Gln-290, | S0420: 2, S0356: 2, | | | |
| | | | | | | Asp-294 to Asn-301, | S0354: 2, S0222: 2, | | | |
| | | | | | | Asp-318 to Asn-324, | H0013: 2, H0575: 2, | | | |
| | | | | | | Asn-338 to Glu-343, | L0738: 2, H0046: 2, | | | |
| | | | | | | Gln-353 to Glu-362, | S0051: 2, S0003: 2, | | | |
| | | | | | | Lys-374 to Lys-381, | H0551: 2, H0413: 2, | | | |
| | | | | | | Asn-397 to Ala-409, | H0056: 2, H0529: 2, | | | |
| | | | | | | Pro-426 to Tyr-436, | L0768: 2, L0794: 2, | | | |
| | | | | | | Thr-469 to Pro-474, | L0666: 2, H0547: 2, | | | |
| | | | | | | Ile-486 to Asn-492, | L0750: 2, L0779: 2, | | | |
| | | | | | | Ile-499 to Ile-505, | L0758: 2, L0686: 2, | | | |
| | | | | | | Lys-531 to Gln-539, | L0593: 2, S0412: 2, | | | |
| | | | | | | Lys-585 to His-592, | H0170: 1, L0441: 1, | | | |
| | | | | | | Lys-627 to Gly-635. | H0685: 1, H0381: 1, | | | |
| | | | | | | | H0305: 1, S0007; 1, | | | |
| | | | | | | | H0619: 1, S6026: 1, | | | |
| | | | | | | | H0549; 1, H0550: 1, | | | |
| | | | | | | | S6014: 1, H0586: 1, | | | |
| | | | | | | | H0333: 1, H0559: 1, | | | |
| | | | | | | | T0039: 1, H0156: 1, | | | |
| | | | | | | | H0098: 1, H0036: 1, | | | |
| | | | | | | | H0505: 1, H0327: 1, | | | |
| | | | | | | | S0050: 1, H0051: 1, | | | |
| | | | | | | | S0388: 1, T0010: 1, | | | |
| | | | | | | | S6028: 1, S0316: 1, | | | |
| | | | | | | | H0687: 1, H0428: 1, | | | |
| | | | | | | | H0622: 1, H0553: 1, | | | |
| | | | | | | | H0032: 1, H0166: 1, | | | |
| | | | | | | | H0673: 1, S0386: 1, | | | |
| | | | | | | | H0100: 1, H0494: 1, | | | |
| | | | | | | | L0763: 1, L0770: 1, | | | |
| | | | | | | | L0662: 1, L0804: 1, | | | |
| | | | | | | | L0806: 1, L0657: 1, | | | |
| | | | | | | | L0659: 1, L0790: 1, | | | |
| | | | | | | | L0663: 1, L0665: 1, | | | |
| | | | | | | | H0144: 1, H0691: 1, | | | |
| | | | | | | | L0352: 1, H0519: 1, | | | |
| | | | | | | | S0126: 1, H0689: 1, | | | |
| | | | | | | | H0658: 1, S0152: 1, | | | |
| | | | | | | | H0528: 1, S0037: 1, | | | |
| | | | | | | | L0780: 1, L0752: 1, | | | |
| | | | | | | | L0731: 1, L0757: 1, | | | |
| | | | | | | | S0031: 1, S0260: 1 and | | | |
| | | | | | | | H0506: 1. | | | |
| | | 932133 | 460 | 1-1044 | 1073 | Asn-38 to Tyr-46, | | | | |
| | | | | | | Pro-56 to Asp-71, | | | | |
| | | | | | | Asn-84 to Cys-96, | | | | |
| | | | | | | Ser-110 to Val-142, | | | | |
| | | | | | | Arg-181 to Leu-187, | | | | |
| | | | | | | His-193 to Gly-198, | | | | |
| | | | | | | Thr-201 to Arg-210, | | | | |
| | | | | | | Asn-224 to Leu-230, | | | | |
| | | | | | | Thr-246 to Gly-251, | | | | |
| | | | | | | Ser-267 to Ser-272, | | | | |
| | | | | | | Ser-284 to Gln-290, | | | | |
| | | | | | | Asp-294 to Asn-301, | | | | |
| | | | | | | Asp-318 to Asn-324, | | | | |
| | | | | | | Asn-338 to Thr-347. | | | | |
| 25 | HLYAA41 | 1188029 | 35 | 472-2 | 648 | Asn-1 to Ser-7, | AR089: 1, AR061: 1 | | | |
| | | | | | | Leu-9 to Asn-16, | H0445: 4, L0761: 2, | | | |
| | | | | | | Ser-48 to Gln-55, | H0421: 1, S0002: 1 and | | | |
| | | | | | | Arg-136 to Pro-141, | L0788: 1. | | | |
| | | | | | | Ala-144 to Lys-151. | | | | |
| | | 909874 | 461 | 3-386 | 1074 | Asp-1 to Ser-7, | | | | |
| | | | | | | Pro-10 to Cys-18, | | | | |
| | | | | | | Glu-36 to Ala-54, | | | | |
| | | | | | | Tyr-83 to Pro-91, | | | | |
| | | | | | | Pro-108 to Gly-115. | | | | |
| 26 | HLYDV62 | 1154065 | 36 | 472-2 | 649 | Asn-1 to Ser-7, | AR051: 24, AR054: | | | |
| | | | | | | Leu-9 to Asn-16, | 20, AR050: 20, AR061: | | | |
| | | | | | | Ser-48 to Gln-55, | 1, AR089: 1 | | | |
| | | | | | | Arg-136 to Pro-141, | H0445: 4, L0761: 2, | | | |
| | | | | | | Ala-144 to Lys-151. | H0421: 1, S0002: 1 and | | | |
| | | | | | | | L0788: 1. | | | |
| | | 927872 | 462 | 2-430 | 1075 | Pro-19 to Cys-27, | | | | |
| | | | | | | Glu-45 to Ala-63, | | | | |
| | | | | | | Asp-96 to Pro-102, | | | | |
| | | | | | | Pro-117 to Gly-124, | | | | |
| | | | | | | Pro-132 to Ser-143. | | | | |
| 27 | HMCFB47 | 1151498 | 37 | 808-275 | 650 | Arg-23 to Thr-29, | AR089: 31, AR061: 30 | | | |
| | | | | | | Gly-45 to Arg-51, | H0341: 1, H0050: 1, | | | |
| | | | | | | Pro-56 to Glu-66. | S0344: 1, L0750: 1 and | | | |
| | | | | | | | L0366: 1. | | | |
| | | 910088 | 463 | 1-393 | 1076 | Arg-8 to Pro-15, | | | | |
| | | | | | | Gly-37 to Arg-46, | | | | |
| | | | | | | Lys-59 to Leu-67, | | | | |
| | | | | | | Ala-108 to Asp-113. | | | | |
| 28 | HMSOI20 | 1178817 | 38 | 417-2222 | 651 | Arg-10 to His-17, | AR061: 1, AR089: 0 | | | |
| | | | | | | Gln-24 to Asn-29, | L0748: 2, S0001: 1, | | | |
| | | | | | | Glu-42 to His-51, | H0575: 1, S0038: 1, | | | |
| | | | | | | Glu-63 to Asp-70, | S0426; 1, H0521: 1 and | | | |
| | | | | | | His-78 to Arg-84, | L0751: 1. | | | |
| | | | | | | Lys-101 to Phe-106, | | | | |
| | | | | | | Phe-171 to Ser-180, | | | | |
| | | | | | | Lys-182 to Gln-189, | | | | |
| | | | | | | Pro-191 to Thr-197, | | | | |
| | | | | | | Glu-236 to Ala-241, | | | | |
| | | | | | | Gly-250 to Asn-256, | | | | |
| | | | | | | Ser-293 to Ser-301, | | | | |
| | | | | | | Lys-320 to Leu-325, | | | | |
| | | | | | | Glu-334 to Val-340, | | | | |
| | | | | | | Asp-453 to Gly-466, | | | | |
| | | | | | | Pro-473 to Asp-478, | | | | |
| | | | | | | Leu-576 to Lys-585. | | | | |
| | | 928168 | 464 | 1-465 | 1077 | Tyr-114 to Trp-119, | | | | |
| | | | | | | Gln-124 to Ile-129. | | | | |
| 29 | HOENH55 | 1163460 | 39 | 1-624 | 652 | Asp-1 to Arg-7, | AR061: 0, AR089: 0 | | | |
| | | | | | | Glu-19 to Leu-32, | S0126: 2, S0046: 1, | | | |
| | | | | | | Leu-36 to Ser-49, | H0645: 1, H0550: 1 and | | | |
| | | | | | | Ser-74 to Pro-100, | H0135: 1. | | | |
| | | | | | | Ser-113 to Val-130, | | | | |
| | | | | | | Thr-143 to His-154, | | | | |
| | | | | | | Gln-161 to Arg-167, | | | | |
| | | | | | | Val-194 to Phe-200. | | | | |
| | | 922141 | 465 | 1-624 | 1078 | Asp-1 to Arg-7, | | | | |
| | | | | | | Glu-19 to Leu-32, | | | | |
| | | | | | | Leu-36 to Ser-49, | | | | |
| | | | | | | Ser-74 to Pro-100, | | | | |
| | | | | | | Ser-113 to Val-130, | | | | |
| | | | | | | Thr-143 to His-154, | | | | |
| | | | | | | Gln-161 to Arg-167, | | | | |
| | | | | | | Val-194 to Phe-200. | | | | |
| 30 | HPIAI01 | 1078178 | 40 | 794-321 | 653 | Cys-52 to Trp-57, | AR050: 204, AR054: | | | |
| | | | | | | Pro-69 to Asp-74, | 168, AR051: 151, | | | |
| | | | | | | Glu-95 to Ser-115, | AR089: 9, AR061: 6 | | | |
| | | | | | | Pro-136 to Gly-143. | S0140: 2, L0783: 2, | | | |
| | | | | | | | S0150: 1, L0769: 1, | | | |
| | | | | | | | L0774: 1, L0775: 1, | | | |
| | | | | | | | L0809: 1, H0648: 1 and | | | |
| | | | | | | | L0748: 1. | | | |
| | | 909928 | 466 | 288-764 | 1079 | Glu-48 to Leu-53. | | | | |
| 31 | HPJCT50 | 1201773 | 41 | 32-1567 | 654 | Ser-3 to Trp-9, | AR089: 6, AR061: 4 | | | |
| | | | | | | Arg-12 to Ser-18, | H0561: 2, S0002: 2, | | | |
| | | | | | | Asp-42 to Gln-53, | H0521: 2, H0522: 2, | | | |
| | | | | | | Arg-79 to Gly-90, | H0656: 1, H0341: 1, | | | |
| | | | | | | Val-103 to Asp-108, | H0550; 1, T0040: 1, | | | |
| | | | | | | Gly-175 to Asn-193, | H0036: 1, H0031: 1, | | | |
| | | | | | | Ser-210 to Thr-217, | H0560: 1, S0152: 1 and | | | |
| | | | | | | Lys-242 to Glu-251, | H0134: 1. | | | |
| | | | | | | Glu-267 to Lys-273, | | | | |
| | | | | | | Leu-287 to Lys-293, | | | | |
| | | | | | | Ser-311 to Glu-318, | | | | |
| | | | | | | Pro-335 to Lys-364, | | | | |
| | | | | | | Asn-370 to Glu-376, | | | | |
| | | | | | | Ala-392 to Thr-401. | | | | |
| | | 919836 | 467 | 32-1567 | 1080 | Ser-3 to Trp-9, | | | | |
| | | | | | | Arg-12 to Ser-18, | | | | |
| | | | | | | Asp-42 to Gln-53, | | | | |
| | | | | | | Arg-79 to Gly-90, | | | | |
| | | | | | | Val-103 to Asp-108, | | | | |
| | | | | | | Gly-175 to Asn-193, | | | | |
| | | | | | | Ser-210 to Thr-217, | | | | |
| | | | | | | Lys-242 to Glu-251, | | | | |
| | | | | | | Glu-267 to Lys-273, | | | | |
| | | | | | | Leu-287 to Lys-293, | | | | |
| | | | | | | Ser-311 to Glu-318, | | | | |
| | | | | | | Pro-335 to Lys-364, | | | | |
| | | | | | | Asn-370 to Glu-376, | | | | |
| | | | | | | Ala-392 to Thr-401. | | | | |
| 32 | HPMFE91 | 1164740 | 42 | 605-1813 | 655 | Glu-6 to Asp-20, | AR061: 3, AR089: 2 | | | |
| | | | | | | Thr-25 to Lys-31, | L0766: 10, L0752: 8, | | | |
| | | | | | | Lys-73 to Ala-95, | L0439: 6, L0747: 6, | | | |
| | | | | | | Glu-102 to Phe-109, | L0740: 5, L0756: 5, | | | |
| | | | | | | Pro-112 to Pro-118, | L0779: 4, L0777: 4, | | | |
| | | | | | | Asp-136 to Leu-152, | L0731: 4, S0051: 3, | | | |
| | | | | | | Val-246 to Thr-253, | L0803: 3, L0774: 3, | | | |
| | | | | | | Thr-298 to Glu-303, | L0754: 3, S0360: 2, | | | |
| | | | | | | Val-312 to Arg-322, | H0574: 2, L0763: 2, | | | |
| | | | | | | Pro-341 to Arg-349, | L0805: 2, L0809: 2, | | | |
| | | | | | | Lys-378 to Phe-388, | L0663: 2, L0751: 2, | | | |
| | | | | | | Val-392 to Ala-397. | L0755: 2, L0759: 2, | | | |
| | | | | | | | L0601: 2, H0624: 1, | | | |
| | | | | | | | S0040: 1, S0298: 1, | | | |
| | | | | | | | S0420: 1, H0580: 1, | | | |
| | | | | | | | H0351: 1, H0600: 1, | | | |
| | | | | | | | H0331: 1, H0013: 1, | | | |
| | | | | | | | L0021: 1, H0575: 1, | | | |
| | | | | | | | H0590: 1, T0110: 1, | | | |
| | | | | | | | H0012: 1, H0615: 1, | | | |
| | | | | | | | H0031: 1, H0553: 1, | | | |
| | | | | | | | H0591: 1, H0646: 1, | | | |
| | | | | | | | S0002: 1, L0772: 1, | | | |
| | | | | | | | L0645: 1, L0773: 1, | | | |
| | | | | | | | L0662: 1, L0794: 1, | | | |
| | | | | | | | L0381: 1, L0775: 1, | | | |
| | | | | | | | L0776: 1, L0657: 1, | | | |
| | | | | | | | L0659: 1, L0528: 1, | | | |
| | | | | | | | L0790: 1, L0666: 1, | | | |
| | | | | | | | H0547: 1, H0648: 1, | | | |
| | | | | | | | H0539: 1, S0152: 1, | | | |
| | | | | | | | H0696: 1, S0044: 1, | | | |
| | | | | | | | S0028: 1, L0758: 1, | | | |
| | | | | | | | L0366: 1, S0011: 1, | | | |
| | | | | | | | S0276: 1, H0422: 1 and | | | |
| | | | | | | | S0424: 1. | | | |
| | | 910026 | 468 | 98-955 | 1081 | Pro-25 to Arg-32, | | | | |
| | | | | | | Met-56 to Ser-75, | | | | |
| | | | | | | Asn-90 to Trp-95, | | | | |
| | | | | | | Lys-111 to Arg-121, | | | | |
| | | | | | | His-134 to Arg-140, | | | | |
| | | | | | | Arg-153 to Gln-162, | | | | |
| | | | | | | Gln-169 to Gly-186. | | | | |
| 33 | HRAED51 | 1090522 | 43 | 141-626 | 656 | Phe-16 to Asp-22, | AR089: 4, AR061: 2, | | | |
| | | | | | | Val-93 to Gly-98. | S0212: 1 and H0555: 1. | | | |
| | | 909859 | 469 | 55-627 | 1082 | Pro-6 to Arg-12. | | | | |
| 34 | HSMBA19 | 1197925 | 44 | 2-502 | 657 | Leu-9 to Gln-17, | AR089: 4, AR061: 1 | | | |
| | | | | | | Leu-27 to Arg-42, | L0438: 4, L0748: 4, | | | |
| | | | | | | Leu-51 to Ser-58, | H0622: 3, L0439: 3, | | | |
| | | | | | | Ser-66 to Ser-74, | L0005: 2, L0717: 2, | | | |
| | | | | | | Asn-79 to Ala-85, | L0598: 2, S0126: 2, | | | |
| | | | | | | Ser-90 to Phe-102, | L0743: 2, L0754: 2, | | | |
| | | | | | | His-128 to Gly-143, | L0758: 2, T0002: 1, | | | |
| | | | | | | Pro-158 to Lys-167. | S0298: 1, S0360: 1, | | | |
| | | | | | | | H0675: 1, S0468: 1, | | | |
| | | | | | | | H0411: 1, H0642: 1, | | | |
| | | | | | | | H0013: 1, H0599: 1, | | | |
| | | | | | | | L0105: 1, H0581: 1, | | | |
| | | | | | | | H0421: 1, H0123: 1, | | | |
| | | | | | | | H0050: 1, S0338: 1, | | | |
| | | | | | | | S0340: 1, H0644: 1, | | | |
| | | | | | | | H0628: 1, H0616: 1, | | | |
| | | | | | | | H0264: 1, S0112: 1, | | | |
| | | | | | | | H0641: 1, L0641: 1, | | | |
| | | | | | | | L0803: 1, L0774: 1, | | | |
| | | | | | | | L0653: 1, L0526: 1, | | | |
| | | | | | | | L0809: 1, H0144: 1, | | | |
| | | | | | | | S0330: 1, H0525: 1, | | | |
| | | | | | | | H0521: 1, H0606: 1, | | | |
| | | | | | | | L0740: 1, S0011: 1 and | | | |
| | | | | | | | S0276: 1. | | | |
| | | 924885 | 470 | 1-534 | 1083 | Leu-6 to Gln-14, | | | | |
| | | | | | | Leu-24 to Arg-39, | | | | |
| | | | | | | Leu-48 to Ser-55, | | | | |
| | | | | | | Ser-63 to Ser-71, | | | | |
| | | | | | | Asn-76 to Ala-82, | | | | |
| | | | | | | Ser-87 to Phe-99, | | | | |
| | | | | | | His-125 to Gly-140, | | | | |
| | | | | | | Pro-160 to Asp-165. | | | | |
| 35 | HSYCY88 | 914775 | 45 | 448-1089 | 658 | Gln-1 to Pro-29. | AR089: 2, AR061: 2 | | | |
| | | | | | | | L0751: 11, L0747: 7, | | | |
| | | | | | | | H0009: 5, L0659: 5, | | | |
| | | | | | | | L0731: 5, S0046: 4, | | | |
| | | | | | | | L0663: 4, H0392: 3, | | | |
| | | | | | | | H0024: 3, H0124: 3, | | | |
| | | | | | | | H0135: 3, L0500: 3, | | | |
| | | | | | | | L0662: 3, L0508: 3, | | | |
| | | | | | | | L0493: 3, L0779: 3, | | | |
| | | | | | | | L0777: 3, L0758: 3, | | | |
| | | | | | | | L0759: 3, S0360: 2, | | | |
| | | | | | | | S0007: 2, H0208: 2, | | | |
| | | | | | | | H0486: 2, H0012: 2, | | | |
| | | | | | | | H0620: 2, H0264: 2, | | | |
| | | | | | | | L0770: 2, L0769: 2, | | | |
| | | | | | | | L0648: 2, L0775: 2, | | | |
| | | | | | | | L0438: 2, L0744: 2, | | | |
| | | | | | | | L0439: 2, L0749: 2, | | | |
| | | | | | | | L0756: 2, S0260: 2, | | | |
| | | | | | | | H0171: 1, S0040: 1, | | | |
| | | | | | | | S0420: 1, S0354: 1, | | | |
| | | | | | | | S0045: 1, H0619: 1, | | | |
| | | | | | | | H0549: 1, H0550: 1, | | | |
| | | | | | | | H0592: 1, H0643: 1, | | | |
| | | | | | | | H0427: 1, H0002: 1, | | | |
| | | | | | | | H0599: 1, H0042: 1, | | | |
| | | | | | | | H0575: 1, H0036: 1, | | | |
| | | | | | | | H0590: 1, H0004: 1, | | | |
| | | | | | | | H0618: 1, S0049: 1, | | | |
| | | | | | | | H0597: 1, H0327: 1, | | | |
| | | | | | | | H0150: 1, H0041: 1, | | | |
| | | | | | | | L0471: 1, H0014: 1, | | | |
| | | | | | | | H0051: 1, S6028: 1, | | | |
| | | | | | | | S0250: 1, H0428: 1, | | | |
| | | | | | | | H0622: 1, H0553: 1, | | | |
| | | | | | | | H0644: 1, S0364: 1, | | | |
| | | | | | | | H0551: 1, H0100: 1, | | | |
| | | | | | | | S0112: 1, L0520: 1, | | | |
| | | | | | | | L0502: 1, L0796: 1, | | | |
| | | | | | | | L0771: 1, L0768: 1, | | | |
| | | | | | | | L0497: 1, L0774: 1, | | | |
| | | | | | | | L0378: 1, L0509; 1, | | | |
| | | | | | | | L0776: 1, L0527: 1, | | | |
| | | | | | | | L0515: 1, L0658; 1, | | | |
| | | | | | | | L0809: 1, L0647: 1, | | | |
| | | | | | | | L0790: 1, L0791: 1, | | | |
| | | | | | | | L0792: 1, L0666: 1, | | | |
| | | | | | | | L0664: 1, L0665: 1, | | | |
| | | | | | | | H0520: 1, H0547: 1, | | | |
| | | | | | | | H0519: 1, S0126: 1, | | | |
| | | | | | | | H0690: 1, H0658: 1, | | | |
| | | | | | | | H0672: 1, H0651: 1, | | | |
| | | | | | | | S0378: 1, S0380; 1, | | | |
| | | | | | | | H0521: 1, S0037: 1, | | | |
| | | | | | | | S0028: 1, L0743: 1, | | | |
| | | | | | | | L0740: 1, L0750: 1 and | | | |
| | | | | | | | L0757; 1. | | | |
| 36 | HTEDW26 | 909749 | 46 | 3-959 | 659 | | AR061: 9, AR089; 9 | | | |
| | | | | | | | H0521: 2, L0758: 2, | | | |
| | | | | | | | H0038: 1, L0644: 1, | | | |
| | | | | | | | L0645: 1, L0764: 1, | | | |
| | | | | | | | L0662: 1, L0794: 1, | | | |
| | | | | | | | L0557: 1, L0747: 1 and | | | |
| | | | | | | | L0779: 1. | | | |
| 37 | HTEKD92 | 1090524 | 47 | 263-1165 | 660 | Asn-11 to Pro-18, | AR089: 1, AR061: 1 | | | |
| | | | | | | Tyr-31 to Asp-36, | L0805: 11, L0779: 7, | | | |
| | | | | | | Asp-98 to Ser-119, | L0803: 5, L0789: 5, | | | |
| | | | | | | Asp-142 to Glu-155, | L0776: 4, L0794: 3, | | | |
| | | | | | | Gly-215 to Ile-226, | L0777: 3, H0575: 2, | | | |
| | | | | | | Ser-237 to Ser-251, | H0687: 2, S0003: 2, | | | |
| | | | | | | Leu-255 to Arg-260, | S0214: 2, L0766: 2, | | | |
| | | | | | | His-263 to Asn-270, | L0747: 2, L0731: 2, | | | |
| | | | | | | Lys-287 to Thr-295. | H0662: 1, S0354: 1, | | | |
| | | | | | | | H0549: 1, S0665: 1, | | | |
| | | | | | | | T0048: 1, L0157: 1, | | | |
| | | | | | | | H0031: 1, H0038: 1, | | | |
| | | | | | | | S0002: 1, L0761: 1, | | | |
| | | | | | | | L0800: 1, L0806: 1, | | | |
| | | | | | | | L0787: 1, H0660: 1, | | | |
| | | | | | | | S0330: 1, L0602: 1, | | | |
| | | | | | | | S0206: 1, L0745: 1, | | | |
| | | | | | | | L0756: 1, L0752: 1, | | | |
| | | | | | | | L0759: 1, L0591: 1 and | | | |
| | | | | | | | H0543: 1. | | | |
| | | 910027 | 471 | 249-1151 | 1084 | Asn-11 to Pro-18, | | | | |
| | | | | | | Tyr-31 to Asp-36, | | | | |
| | | | | | | Asp-98 to Ser-119, | | | | |
| | | | | | | Asp-142 to Glu-155, | | | | |
| | | | | | | Gly-215 to Ile-226, | | | | |
| | | | | | | Ser-237 to Ser-251, | | | | |
| | | | | | | Leu-255 to Arg-260, | | | | |
| | | | | | | His-263 to Asn-270, | | | | |
| | | | | | | Lys-287 to Thr-295. | | | | |
| 38 | HTLDT05 | 1227127 | 48 | 625-2685 | 661 | Trp-3 to Thr-14, | AR089: 11, AR061: 7 | | | |
| | | | | | | Ala-21 to Arg-30, | H0253: 2, L0439: 1 | | | |
| | | | | | | Glu-66 to Pro-74, | and L0599: 1. | | | |
| | | | | | | Pro-103 to Gly-108, | | | | |
| | | | | | | Ile-135 to Ile-142, | | | | |
| | | | | | | Thr-185 to Asp-210, | | | | |
| | | | | | | Leu-283 to Leu-297, | | | | |
| | | | | | | Trp-328 to Leu-334. | | | | |
| | | 909752 | 472 | 2-328 | 1085 | Gly-3 to Ser-8. | | | | |
| 39 | HTPDS90 | 1197926 | 49 | 1164-955 | 662 | Asn-20 to Tyr-32, | AR089: 3, AR061: 2 | | | |
| | | | | | | Gly-41 to Arg-54. | L0754: 9, L0777: 7, | | | |
| | | | | | | | L0759: 5, H0553: 4, | | | |
| | | | | | | | H0624: 3, L0803: 3, | | | |
| | | | | | | | L0591: 3, H0599: 2, | | | |
| | | | | | | | H0039: 2, L0637: 2, | | | |
| | | | | | | | L0521: 2, L0768: 2, | | | |
| | | | | | | | L0659: 2, L0517: 2, | | | |
| | | | | | | | L0666: 2, L0731: 2, | | | |
| | | | | | | | H0171: 1, L0448: 1, | | | |
| | | | | | | | H0685: 1, H0295: 1, | | | |
| | | | | | | | S0408: 1, S0132: 1, | | | |
| | | | | | | | H0411: 1, H0415: 1, | | | |
| | | | | | | | H0586: 1, H0013: 1, | | | |
| | | | | | | | H0688: 1, H0644: 1, | | | |
| | | | | | | | H0040: 1, H0268: 1, | | | |
| | | | | | | | H0413: 1, L0641: 1, | | | |
| | | | | | | | L0662: 1, L0804: 1, | | | |
| | | | | | | | L0774: 1, L0375: 1, | | | |
| | | | | | | | L0809: 1, L0790: 1, | | | |
| | | | | | | | H0547: 1, H0435: 1, | | | |
| | | | | | | | S0378: 1, H0555: 1, | | | |
| | | | | | | | H0576: 1, S0028: 1, | | | |
| | | | | | | | L0747: 1, L0750: 1, | | | |
| | | | | | | | L0755: 1, L0581: 1, | | | |
| | | | | | | | S0242; 1 and S0196: 1. | | | |
| | | 529764 | 473 | 66-461 | 1086 | Gly-9 to Thr-14, | | | | |
| | | | | | | Lys-37 to Arg-42, | | | | |
| | | | | | | Asp-47 to Ser-54, | | | | |
| | | | | | | Asp-58 to Lys-63, | | | | |
| | | | | | | Lys-82 to Asn-89. | | | | |
| 40 | HTPHM71 | 1194698 | 50 | 1-1836 | 663 | Tyr-17 to Val-23, | AR061: 4, AR089: 2, | | | |
| | | | | | | Ala-54 to Leu-65, | L0748: 8, H0040: 5, | | | |
| | | | | | | Arg-115 to Asn-120, | H0039: 3, L0766: 3, | | | |
| | | | | | | Ser-150 to Ser-158, | H0663: 2, T0040: 2, | | | |
| | | | | | | Glu-234 to Ile-251, | L0659: 2, L0754: 2, | | | |
| | | | | | | His-272 to Asn-277, | L0756: 2, H0556: 1, | | | |
| | | | | | | Gly-284 to Gln-303, | H0583: 1, H0650: 1, | | | |
| | | | | | | Glu-327 to Lys-332, | H0013: 1, H0318: 1, | | | |
| | | | | | | Thr-362 to Leu-368, | H0194: 1, H0596: 1, | | | |
| | | | | | | Leu-390 to Asn-399, | H0545: 1, S0003: 1, | | | |
| | | | | | | Ser-432 to Tyr-444, | H0622: 1, H0634: 1, | | | |
| | | | | | | Asn-456 to Thr-467, | H0641: 1, H0647: 1, | | | |
| | | | | | | Ser-474 to Thr-484, | L0643: 1, L0794: 1, | | | |
| | | | | | | Asn-505 to Leu-510, | L0803: 1, S0052: 1, | | | |
| | | | | | | Gln-563 to Ser-568, | H0520: 1, H0539: 1, | | | |
| | | | | | | Ala-575 to Cys-582. | H0555: 1 and L0595: 1. | | | |
| | | 909878 | 474 | 3-1094 | 1087 | Tyr-14 to Phe-24. | | | | |
| | | | | | | 4. | | | | |
| 41 | HUUAR12 | 1194702 | 51 | 1-975 | 664 | Pro-1 to Gln-11, | AR089: 1, AR061: 1 | | | |
| | | | | | | Leu-36 to Gln-42, | L0809: 9, L0775: 3, | | | |
| | | | | | | Glu-81 to Trp-86, | L0758: 3, S0376: 2, | | | |
| | | | | | | Arg-108 to Lys-113, | L0439: 2, L0752: 2, | | | |
| | | | | | | Arg-143 to Asn-149, | H0656: 1, H0661: 1, | | | |
| | | | | | | Glu-154 to Asp-160, | H0586: 1, H0590: 1, | | | |
| | | | | | | Glu-169 to His-174, | H0594: 1, L0769: 1, | | | |
| | | | | | | Trp-184 to Ser-189, | L0761: 1, L0800: 1, | | | |
| | | | | | | Lys-210 to Trp-217, | L0662: 1, L0766: 1, | | | |
| | | | | | | Lys-233 to Tyr-239, | L0803: 1, L0651: 1, | | | |
| | | | | | | Asp-308 to Gly-315. | L0805: 1, L0659: 1, | | | |
| | | | | | | | L0788: 1, L0666: 1, | | | |
| | | | | | | | L0779: 1 and S0276: 1. | | | |
| | | 944393 | 475 | 3-716 | 1088 | | | | | |
| 42 | HWAGP22 | 1150195 | 52 | 310-1713 | 665 | Gly-8 to Gly-15, | AR089: 1, AR061: 1 | | | |
| | | | | | | Ser-25 to Ser-30, | L0751: 7, H0575: 2, | | | |
| | | | | | | Glu-65 to Ala-71. | H0617: 2, H0634: 2, | | | |
| | | | | | | | L0438: 2, L0747: 2, | | | |
| | | | | | | | L0601: 2, H0556: 1, | | | |
| | | | | | | | S0040: 1, H0484; 1, | | | |
| | | | | | | | H0306: 1, S0360: 1, | | | |
| | | | | | | | H0550: 1, H0607: 1, | | | |
| | | | | | | | H0586: 1, H0004: 1, | | | |
| | | | | | | | H0581: 1, H0288: 1, | | | |
| | | | | | | | H0553: 1, H0100: 1, | | | |
| | | | | | | | T0042: 1, L0764: 1, | | | |
| | | | | | | | L0766: 1, L0653: 1, | | | |
| | | | | | | | S0052: 1, H0144: 1, | | | |
| | | | | | | | H0701: 1, L0777: 1, | | | |
| | | | | | | | S0192: 1, H0542: 1 and | | | |
| | | | | | | | H0543: 1. | | | |
| | | 909919 | 476 | 3-1151 | 1089 | Arg-15 to Leu-23, | | | | |
| | | | | | | Glu-70 to Lys-76, | | | | |
| | | | | | | Lys-96 to Gln-102, | | | | |
| | | | | | | Leu-119 to Arg-124, | | | | |
| | | | | | | Ala-141 to Glu-146, | | | | |
| | | | | | | Leu-159 to Glu-169, | | | | |
| | | | | | | Thr-195 to Lys-202, | | | | |
| | | | | | | Gln-239 to Gly-251. | | | | |
| 43 | HWBCE37 | 906968 | 53 | 3-431 | 666 | | AR089: 1, AR061: 0 | | | |
| | | | | | | | H0580: 1 and H0427: | | | |
| | | | | | | | 1. | | | |
| 44 | HWLFB60 | 1223499 | 54 | 2-2233 | 667 | Gly-1 to Lys-8, | AR089: 6, AR061: 0 | | | |
| | | | | | | Arg-52 to Gly-57, | L0766: 4, L0666: 4, | | | |
| | | | | | | Asp-69 to Ser-74, | L0439: 4, S0354: 3, | | | |
| | | | | | | Arg-90 to Lys-97, | H0014: 3, H0551: 3, | | | |
| | | | | | | Asp-126 to Thr-132, | H0529: 3, L0665: 3, | | | |
| | | | | | | Cys-155 to Thr-171, | H0519: 3, L0740: 3, | | | |
| | | | | | | Lys-189 to Ala-198, | L0759: 3, H0656: 2, | | | |
| | | | | | | Lys-239 to Ser-245, | S0003: 2, H0553; 2, | | | |
| | | | | | | Gln-260 to Ser-276, | L0775: 2, L0657: 2, | | | |
| | | | | | | Ser-295 to Glu-302, | H0144: 2, H0435: 2, | | | |
| | | | | | | Asp-307 to Leu-319, | H0521: 2, L0747: 2, | | | |
| | | | | | | Ser-332 to Leu-347, | S0260: 2, L0593: 2, | | | |
| | | | | | | Ser-363 to Ala-371, | H0423: 2, S0424: 2, | | | |
| | | | | | | Ser-429 to Asp-436, | H0171: 1, H0556: 1, | | | |
| | | | | | | Ala-458 to Asn-463, | S0114: 1, S0430: 1, | | | |
| | | | | | | Pro-477 to Asn-483, | S0212: 1, S0400: 1, | | | |
| | | | | | | Ile-587 to Tyr-594, | H0662: 1, S0356: 1, | | | |
| | | | | | | Lys-603 to His-611, | S0358: 1, S0045: 1, | | | |
| | | | | | | Pro-620 to Ser-625, | S0046: 1, S0132: 1, | | | |
| | | | | | | Lys-661 to Trp-677, | H0351: 1, H0411: 1, | | | |
| | | | | | | Glu-700 to Glu-714. | H0431: 1, H0587: 1, | | | |
| | | | | | | | H0486: 1, H0036: 1, | | | |
| | | | | | | | S0010: 1, H0318: 1, | | | |
| | | | | | | | H0052: 1, H0085: 1, | | | |
| | | | | | | | H0596; 1, H0046: 1, | | | |
| | | | | | | | T0010: 1, S6028: 1, | | | |
| | | | | | | | S0312: 1, L0055: 1, | | | |
| | | | | | | | H0038: 1, H0040: 1, | | | |
| | | | | | | | H0264: 1, H0494: 1, | | | |
| | | | | | | | S0294: 1, H0509: 1, | | | |
| | | | | | | | H0641: 1, H0647: 1, | | | |
| | | | | | | | S0144: 1, S0208: 1, | | | |
| | | | | | | | L0637: 1, L0761: 1, | | | |
| | | | | | | | L0646: 1, L0765: 1, | | | |
| | | | | | | | L0771: 1, L0768: 1, | | | |
| | | | | | | | L0803: 1, L0650: 1, | | | |
| | | | | | | | L0774: 1, L0607: 1, | | | |
| | | | | | | | L0809: 1, L0791: 1, | | | |
| | | | | | | | L0664: 1, H0701: 1, | | | |
| | | | | | | | H0547: 1, H0651: 1, | | | |
| | | | | | | | S0330: 1, H0539: 1, | | | |
| | | | | | | | S0378: 1, H0134: 1, | | | |
| | | | | | | | L0748: 1, L0780: 1, | | | |
| | | | | | | | L0752: 1, L0731: 1, | | | |
| | | | | | | | L0758: 1, S0031: 1, | | | |
| | | | | | | | H0665: 1, H0542: 1 and | | | |
| | | | | | | | H0543: 1. | | | |
| | | 910018 | 477 | 2-280 | 1090 | Arg-44 to Gly-49, | | | | |
| | | | | | | Asp-61 to Ser-66, | | | | |
| | | | | | | Asp-73 to His-78. | | | | |
| 45 | HDPGS16 | 1075725 | 55 | 460-167 | 668 | Leu-39 to Tyr-45, | AR061: 0, AR089: 0 | | | |
| | | | | | | Ser-57 to Ser-63, | H0521: 1 and L0758: | | | |
| | | | | | | Thr-74 to Leu-82, | 1. | | | |
| | | | | | | Pro-91 to Asp-98. | | | | |
| | | 909833 | 478 | 188-460 | 1091 | Asp-40 to Leu-46, | | | | |
| | | | | | | Phe-50 to Arg-61, | | | | |
| | | | | | | Pro-76 to Asp-83. | | | | |
| 46 | HDQDV69 | 937850 | 56 | 2-829 | 669 | | AR089: 46, AR061: 33 | | | |
| | | | | | | | H0521: 4, H0051: 2, | | | |
| | | | | | | | L0803: 2, L0748: 2, | | | |
| | | | | | | | L0740: 2, L0756: 2, | | | |
| | | | | | | | L0752: 2, L0755: 2, | | | |
| | | | | | | | H0590: 1, H0014: 1, | | | |
| | | | | | | | S0250: 1, L0772: 1, | | | |
| | | | | | | | L0764: 1, L0804: 1, | | | |
| | | | | | | | H0522: 1, S0406: 1, | | | |
| | | | | | | | L0754: 1, L0779: 1, | | | |
| | | | | | | | L0731: 1 and L0758: 1. | | | |
| | | 949702 | 479 | 551-339 | 1092 | Lys-1 to Thr-7, | | | | |
| | | | | | | Arg-34 to Pro-41. | | | | |
| 47 | HE6BK63 | 1153879 | 57 | 3-767 | 670 | Gly-2 to Asp-11, | AR054: 21, AR050: | | | |
| | | | | | | Ser-71 to Gln-78, | 18, AR089: 17, AR051: | | | |
| | | | | | | Ser-110 to Asn-117, | 17, AR061: 14 | | | |
| | | | | | | Ser-155 to Ser-162, | H0090: 2, H0100: 2, | | | |
| | | | | | | Thr-171 to Asp-181, | L0792: 2, H0052: 1, | | | |
| | | | | | | Arg-193 to Leu-203, | H0012: 1, H0212: 1, | | | |
| | | | | | | Arg-207 to Thr-215, | S0426: 1, L0800: 1, | | | |
| | | | | | | Ala-225 to Lys-246, | L0663: 1, L0743: 1, | | | |
| | | | | | | Lys-248 to Leu-255. | L0756: 1 and L0780: 1. | | | |
| | | 661045 | 480 | 586-1191 | 1093 | Ser-12 to Gln-19, | | | | |
| | | | | | | Ser-51 to Asn-58, | | | | |
| | | | | | | Ser-96 to Ser-103, | | | | |
| | | | | | | Thr-112 to Asp-122, | | | | |
| | | | | | | Arg-134 to Leu-144, | | | | |
| | | | | | | Arg-148 to Thr-156, | | | | |
| | | | | | | Ala-166 to Lys-187, | | | | |
| | | | | | | Lys-189 to Gly-200. | | | | |
| | | | | | | 0. | | | | |
| | | 974253 | 481 | 2-403 | 1094 | Asp-2 to Asn-11. | | | | |
| 48 | HFKDR14 | 974255 | 58 | 15-1733 | 671 | Ala-5 to Gly-18. | AR061; 3, AR089: 2 | 14q32.3 | | |
| | | | | | | | L0792: 2, H0012: 1, | | | |
| | | | | | | | H0100: 1, L0663: 1, | | | |
| | | | | | | | L0756: 1 and L0780: 1. | | | |
| 49 | HFPER82 | 1152249 | 59 | 460-125 | 672 | Pro-1 to Tyr-7, | AR089: 5, AR061: 3 | | | |
| | | | | | | Glu-14 to Ser-21, | L0751: 12, L0731: 8, | | | |
| | | | | | | Pro-23 to His-31, | H0521: 7, L0747: 7, | | | |
| | | | | | | Pro-33 to Gly-38, | H0457: 5, L0748: 5, | | | |
| | | | | | | Thr-82 to Arg-87, | H0494: 4, L0662: 4, | | | |
| | | | | | | Val-91 to Gly-96. | L0759: 4, L0776: 3, | | | |
| | | | | | | | L0659: 3, L0783: 3, | | | |
| | | | | | | | L0666: 3, H0658: 3, | | | |
| | | | | | | | H0436: 3, H0556: 2, | | | |
| | | | | | | | S6024: 2, H0411: 2, | | | |
| | | | | | | | H0333: 2, H0156: 2, | | | |
| | | | | | | | H0052: 2, H0327: 2, | | | |
| | | | | | | | H0545: 2, H0172: 2, | | | |
| | | | | | | | H0050: 2, H0620: 2, | | | |
| | | | | | | | H0615: 2, H0644: 2, | | | |
| | | | | | | | H0413: 2, H0529: 2, | | | |
| | | | | | | | L0770: 2, L0769: 2, | | | |
| | | | | | | | L0772: 2, L0383: 2, | | | |
| | | | | | | | S0330: 2, H0631: 2, | | | |
| | | | | | | | L0742: 2, L0744: 2, | | | |
| | | | | | | | L0754: 2, L0749: 2, | | | |
| | | | | | | | L0777: 2, L0755: 2, | | | |
| | | | | | | | L0758: 2, L0485: 2, | | | |
| | | | | | | | S0242: 2, H0624: 1, | | | |
| | | | | | | | H0170: 1, H0171: 1, | | | |
| | | | | | | | H0295: 1, H0294: 1, | | | |
| | | | | | | | S0134: 1, H0254: 1, | | | |
| | | | | | | | H0662: 1, S0418: 1, | | | |
| | | | | | | | S0420: 1, S0360: 1, | | | |
| | | | | | | | H0675: 1, H0580: 1, | | | |
| | | | | | | | S0045: 1, S0132: 1, | | | |
| | | | | | | | H0619: 1, S0222: 1, | | | |
| | | | | | | | H0370: 1, H0486: 1, | | | |
| | | | | | | | N0009: 1, H0101: 1, | | | |
| | | | | | | | H0250: 1, H0069: 1, | | | |
| | | | | | | | H0635: 1, L0021: 1, | | | |
| | | | | | | | H0318: 1, H0085: 1, | | | |
| | | | | | | | H0544: 1, H0046: 1, | | | |
| | | | | | | | H0024: 1, H0014: 1, | | | |
| | | | | | | | L0163: 1, T0010: 1, | | | |
| | | | | | | | H0594: 1, H0284: 1, | | | |
| | | | | | | | H0673: 1, S0364: 1, | | | |
| | | | | | | | H0135: 1, H0038: 1, | | | |
| | | | | | | | H0379: 1, H0269: 1, | | | |
| | | | | | | | H0059: 1, T0004: 1, | | | |
| | | | | | | | L0351: 1, H0334: 1, | | | |
| | | | | | | | H0633: 1, S0144: 1, | | | |
| | | | | | | | S0426: 1, L0639: 1, | | | |
| | | | | | | | L0637: 1, L0761: 1, | | | |
| | | | | | | | L0646: 1, L0644: 1, | | | |
| | | | | | | | L0764: 1, L0766: 1, | | | |
| | | | | | | | L0803: 1, L0775: 1, | | | |
| | | | | | | | L0375: 1, L0652: 1, | | | |
| | | | | | | | L0655: 1, L0384: 1, | | | |
| | | | | | | | L0382: 1, L0663: 1, | | | |
| | | | | | | | L0664: 1, L0665: 1, | | | |
| | | | | | | | S0552: 1, H0144: 1, | | | |
| | | | | | | | H0547: 1, L0741: 1, | | | |
| | | | | | | | L0743: 1, L0740: 1, | | | |
| | | | | | | | L0750: 1, H0595: 1, | | | |
| | | | | | | | L0588: 1, L0601: 1, | | | |
| | | | | | | | S0276: 1, H0423: 1, | | | |
| | | | | | | | H0422: 1 and H0352: 1. | | | |
| | | 909835 | 482 | 634-1146 | 1095 | Pro-107 to Arg-120. | | | | |
| 50 | HAAAO58 | 1091088 | 60 | 15-467 | 673 | Arg-11 to Pro-17, | AR089: 43, AR061: 8 | | | |
| | | | | | | Glu-43 to Gln-50, | H0592: 2, H0009: 1, | | | |
| | | | | | | Gln-74 to Gln-85, | H0030: 1, L0143: 1, | | | |
| | | | | | | Leu-127 to Asn-132, | H0264: 1, H0646: 1, | | | |
| | | | | | | Arg-141 to Lys-146. | L0653: 1, L0665: 1, | | | |
| | | | | | | | S0052: 1 and H0658: 1. | | | |
| | | 912622 | 483 | 15-467 | 1096 | Arg-11 to Pro-17, | | | | |
| | | | | | | Glu-43 to Gln-50, | | | | |
| | | | | | | Gln-74 to Gln-85. | | | | |
| 51 | HADFK69 | 1091937 | 61 | 201-782 | 674 | Glu-1 to Gly-6, | AR089: 4, AR061: 1 | | | |
| | | | | | | Glu-50 to Val-55, | L0794: 3, L0803: 3, | | | |
| | | | | | | Tyr-62 to Leu-67, | L0809: 3, S0222: 2, | | | |
| | | | | | | Glu-105 to Lys-113, | L0747: 2, L0756: 2, | | | |
| | | | | | | Ser-127 to Val-132, | L0752: 2, L0758: 2, | | | |
| | | | | | | Ala-141 to Val-146, | H0171: 1, L0002: 1, | | | |
| | | | | | | Thr-154 to Leu-159, | S0420: 1, S6026: 1, | | | |
| | | | | | | Leu-170 to Ser-177, | H0427: 1, L0021: 1, | | | |
| | | | | | | Pro-182 to Asn-194. | H0051: 1, T0010: 1, | | | |
| | | | | | | | H0032: 1, S0422: 1, | | | |
| | | | | | | | L0775: 1, L0659: 1, | | | |
| | | | | | | | L0367: 1, L0790: 1, | | | |
| | | | | | | | L0666: 1, L0744: 1, | | | |
| | | | | | | | L0754: 1, L0779: 1, | | | |
| | | | | | | | L0777: 1 and L0757: 1. | | | |
| | | 912850 | 484 | 1-573 | 1097 | | | | | |
| 52 | HDPNO62 | 1152329 | 62 | 1-447 | 675 | Gly-38 to Pro-48, | AR089: 1 | | | |
| | | | | | | Pro-105 to Ser-116, | S0002: 2 and H0522: 1. | | | |
| | | | | | | Arg-120 to Ser-127, | | | | |
| | | | | | | Ser-142 to Ser-149. | | | | |
| | | 912722 | 485 | 1-582 | 1098 | Ala-14 to Gly-20, | | | | |
| | | | | | | Gly-34 to Pro-44, | | | | |
| | | | | | | His-128 to Ser-134. | | | | |
| 53 | HDPMO85 | 1228282 | 63 | 138-719 | 676 | Glu-58 to Ala-72, | AR089: 8, AR061: 2 | | | |
| | | | | | | Thr-91 to Gln-98, | L0759: 15, L0766: 9, | | | |
| | | | | | | Glu-106 to Glu-115, | L0754: 8, L0769: 6, | | | |
| | | | | | | Gln-128 to Asp-134, | S0126: 6, L0439: 6, | | | |
| | | | | | | Lys-143 to Lys-148, | S0360: 5, L0776: 5, | | | |
| | | | | | | Lys-170 to Ser-178, | S0027: 5, L0731: 5, | | | |
| | | | | | | Ser-183 to Gly-190. | H0556: 4, H0341: 4, | | | |
| | | | | | | | H0641: 4, L0747: 4, | | | |
| | | | | | | | L0750: 4, L0596: 4, | | | |
| | | | | | | | L0588: 4, H0650: 3, | | | |
| | | | | | | | H0637: 3, H0013: 3, | | | |
| | | | | | | | H0644: 3, H0412: 3, | | | |
| | | | | | | | H0560: 3, L0809: 3, | | | |
| | | | | | | | S0330: 3, H0521: 3, | | | |
| | | | | | | | L0742: 3, H0543: 3, | | | |
| | | | | | | | H0624: 2, H0171: 2, | | | |
| | | | | | | | S0134: 2, H0656: 2, | | | |
| | | | | | | | S0354: 2, S0007: 2, | | | |
| | | | | | | | H0351: 2, H0333: 2, | | | |
| | | | | | | | H0492: 2, H0599: 2, | | | |
| | | | | | | | H0618: 2, H0581: 2, | | | |
| | | | | | | | H0620: 2, S0051: 2, | | | |
| | | | | | | | T0010: 2, H0594: 2, | | | |
| | | | | | | | H0628; 2, H0090: 2, | | | |
| | | | | | | | H0591: 2, H0264: 2, | | | |
| | | | | | | | T0042: 2, L0641: 2, | | | |
| | | | | | | | L0794: 2, L0774: 2, | | | |
| | | | | | | | L0527: 2, L0659: 2, | | | |
| | | | | | | | L0545: 2, L0666: 2, | | | |
| | | | | | | | L0665: 2, H0520: 2, | | | |
| | | | | | | | H0435: 2, H0522: 2, | | | |
| | | | | | | | H0576: 2, S0028: 2, | | | |
| | | | | | | | L0749: 2, L0756: 2, | | | |
| | | | | | | | L0753: 2, L0601: 2, | | | |
| | | | | | | | L0603: 2, H0265: 1, | | | |
| | | | | | | | S0114: 1, S0116: 1, | | | |
| | | | | | | | S0212: 1, H0402: 1, | | | |
| | | | | | | | S0418: 1, S0420: 1, | | | |
| | | | | | | | H0340: 1, H0489: 1, | | | |
| | | | | | | | S0045: 1, S0222: 1, | | | |
| | | | | | | | H0370: 1, H0486: 1, | | | |
| | | | | | | | T0109: 1, H0427: 1, | | | |
| | | | | | | | H0036: 1, S0010: 1, | | | |
| | | | | | | | L0563: 1, H0263: 1, | | | |
| | | | | | | | H0597: 1, H0545: 1, | | | |
| | | | | | | | H0150: 1, H0009: 1, | | | |
| | | | | | | | H0123: 1, H0050: 1, | | | |
| | | | | | | | L0471: 1, H0024: 1, | | | |
| | | | | | | | S0214: 1, H0604: 1, | | | |
| | | | | | | | H0030: 1, H0031: 1, | | | |
| | | | | | | | L0055: 1, H0124: 1, | | | |
| | | | | | | | S0366: 1, H0551: 1, | | | |
| | | | | | | | H0477: 1, H0487: 1, | | | |
| | | | | | | | H0268: 1, H0623: 1, | | | |
| | | | | | | | L0564: 1, H0022: 1, | | | |
| | | | | | | | S0150: 1, H0633: 1, | | | |
| | | | | | | | S0144: 1, L0770: 1, | | | |
| | | | | | | | L0637: 1, L0761: 1, | | | |
| | | | | | | | L0646: 1, L0764: 1, | | | |
| | | | | | | | L0773: 1, L0662: 1, | | | |
| | | | | | | | L0768: 1, L0381: 1, | | | |
| | | | | | | | L0803: 1, L0775: 1, | | | |
| | | | | | | | L0651: 1, L0653: 1, | | | |
| | | | | | | | L0783: 1, L0789: 1, | | | |
| | | | | | | | L0791: 1, L0792: 1, | | | |
| | | | | | | | L0663: 1, S0428: 1, | | | |
| | | | | | | | L0438: 1, H0547: 1, | | | |
| | | | | | | | H0659: 1, H0658: 1, | | | |
| | | | | | | | H0670: 1, H0672: 1, | | | |
| | | | | | | | H0539: 1, H0518: 1, | | | |
| | | | | | | | H0436: 1, S3014: 1, | | | |
| | | | | | | | L0740: 1, L0751: 1, | | | |
| | | | | | | | L0777: 1, L0780: 1, | | | |
| | | | | | | | L0752: 1, L0755: 1, | | | |
| | | | | | | | H0444: 1, H0445: 1, | | | |
| | | | | | | | H0343: 1, L0592: 1, | | | |
| | | | | | | | H0667: 1, H0136: 1, | | | |
| | | | | | | | S0192: 1, S0194: 1, | | | |
| | | | | | | | H0542: 1 and H0352: 1. | | | |
| | | 912837 | 486 | 138-719 | 1099 | Glu-51 to Val-56, | | | | |
| | | | | | | Tyr-63 to Ala-72, | | | | |
| | | | | | | Thr-91 to Gln-98, | | | | |
| | | | | | | Glu-106 to Glu-115, | | | | |
| | | | | | | Gln-128 to Asp-134, | | | | |
| | | | | | | Lys-143 to Lys-148, | | | | |
| | | | | | | Lys-170 to Ser-178, | | | | |
| | | | | | | Ser-183 to Gly-190. | | | | |
| 54 | HDPUY72 | 1228285 | 64 | 2-595 | 677 | Arg-1 to Pro-12, | AR089: 7, AR061: 3 | | | |
| | | | | | | Pro-18 to Lys-25, | L0747: 17, L0439: 16, | | | |
| | | | | | | Arg-28 to Cys-38, | H0556: 12, L0731: 11, | | | |
| | | | | | | Val-61 to Leu-67, | L0438: 10, L0740: 9, | | | |
| | | | | | | Pro-84 to Ser-95. | L0754: 8, L0596: 7, | | | |
| | | | | | | | H0013: 6, L0659: 6, | | | |
| | | | | | | | H0521: 6, S0278: 5, | | | |
| | | | | | | | H0575: 5, S0126: 5, | | | |
| | | | | | | | S3014: 5, L0755: 5, | | | |
| | | | | | | | S0007: 4, S0003: 4, | | | |
| | | | | | | | H0622: 4, H0673: 4, | | | |
| | | | | | | | L0766: 4, L0803: 4, | | | |
| | | | | | | | L0775: 4, L0766: 4, | | | |
| | | | | | | | S0044: 4, L0748: 4, | | | |
| | | | | | | | L0759: 4, L0599: 4, | | | |
| | | | | | | | H0543: 4, S0358: 3, | | | |
| | | | | | | | H0574: 3, H0178: 3, | | | |
| | | | | | | | H0024: 3, H0051: 3, | | | |
| | | | | | | | H0266: 3, S0214: 3, | | | |
| | | | | | | | H0551: 3, H0412: 3, | | | |
| | | | | | | | H0646: 3, L0598: 3, | | | |
| | | | | | | | L0764: 3, L0805: 3, | | | |
| | | | | | | | L0655: 3, L0517: 3, | | | |
| | | | | | | | H0547: 3, L0779: 3, | | | |
| | | | | | | | L0758: 3, H0170: 2, | | | |
| | | | | | | | S0040: 2, H0305: 2, | | | |
| | | | | | | | H0580: 2, H0299: 2, | | | |
| | | | | | | | H0600: 2, H0250: 2, | | | |
| | | | | | | | S0010: 2, H0052: 2, | | | |
| | | | | | | | H0263: 2, H0046: 2, | | | |
| | | | | | | | L0163: 2, S0051: 2, | | | |
| | | | | | | | T0010: 2, L0483: 2, | | | |
| | | | | | | | H0031: 2, H0032: 2, | | | |
| | | | | | | | S0036: 2, H0591: 2, | | | |
| | | | | | | | H0634; 2, T0067: 2, | | | |
| | | | | | | | H0264: 2, H0433: 2, | | | |
| | | | | | | | T0041: 2, S0144: 2, | | | |
| | | | | | | | S0142: 2, L0770: 2, | | | |
| | | | | | | | L0769: 2, L0771: 2, | | | |
| | | | | | | | L0774: 2, L0653: 2, | | | |
| | | | | | | | L0776: 2, L0664: 2, | | | |
| | | | | | | | L0565: 2, H0670: 2, | | | |
| | | | | | | | H0672: 2, S0152: 2, | | | |
| | | | | | | | S0404: 2, S0028: 2, | | | |
| | | | | | | | L0744: 2, L0745: 2, | | | |
| | | | | | | | L0756: 2, L0588: 2, | | | |
| | | | | | | | L0591: 2, L0595: 2, | | | |
| | | | | | | | S0011: 2, H0542: 2, | | | |
| | | | | | | | L0697: 2, H0171: 1, | | | |
| | | | | | | | H0265: 1, S6024: 1, | | | |
| | | | | | | | S0114: 1, H0657: 1, | | | |
| | | | | | | | H0656: 1, H0341: 1, | | | |
| | | | | | | | S0282: 1, H0384: 1, | | | |
| | | | | | | | H0255: 1, H0671: 1, | | | |
| | | | | | | | H0661: 1, H0589: 1, | | | |
| | | | | | | | L0005: 1, S0376: 1, | | | |
| | | | | | | | S0360: 1, S0408: 1, | | | |
| | | | | | | | H0152: 1, H0393: 1, | | | |
| | | | | | | | L0717: 1, H0437: 1, | | | |
| | | | | | | | H0462: 1, H0549: 1, | | | |
| | | | | | | | S6016: 1, S0220: 1, | | | |
| | | | | | | | H0431: 1, H0392: 1, | | | |
| | | | | | | | H0298: 1, H0587: 1, | | | |
| | | | | | | | H0333: 1, H0331: 1, | | | |
| | | | | | | | H0632: 1, S0414: 1, | | | |
| | | | | | | | T0039: 1, H0635: 1, | | | |
| | | | | | | | H0036: 1, H0590: 1, | | | |
| | | | | | | | S0346: 1, S0049: 1, | | | |
| | | | | | | | H0544: 1, H0041: 1, | | | |
| | | | | | | | H0050: 1, H0014: 1, | | | |
| | | | | | | | H0355: 1, H0510: 1, | | | |
| | | | | | | | H0375: 1, H0594: 1, | | | |
| | | | | | | | H0687: 1, H0553: 1, | | | |
| | | | | | | | H0644: 1, L0555: 1, | | | |
| | | | | | | | H0383; 1, H0169: 1, | | | |
| | | | | | | | H0064: 1, H0708: 1, | | | |
| | | | | | | | H0068: 1, H0598: 1, | | | |
| | | | | | | | H0135: 1, H0038: 1, | | | |
| | | | | | | | H0616: 1, H0413: 1, | | | |
| | | | | | | | H0056: 1, S0112: 1, | | | |
| | | | | | | | L0564: 1, H0280: 1, | | | |
| | | | | | | | H0494: 1, H0625: 1, | | | |
| | | | | | | | H0561: 1, S0344: 1, | | | |
| | | | | | | | H0538: 1, L0763: 1, | | | |
| | | | | | | | L0761: 1, L0772: 1, | | | |
| | | | | | | | L0646: 1, L0800: 1, | | | |
| | | | | | | | L0773: 1, L0662: 1, | | | |
| | | | | | | | L0794: 1, L0650: 1, | | | |
| | | | | | | | L0651: 1, L0806: 1, | | | |
| | | | | | | | L0654: 1, L0528: 1, | | | |
| | | | | | | | L0663: 1, H0144; 1, | | | |
| | | | | | | | S0374: 1, H0520: 1, | | | |
| | | | | | | | H0682: 1, H0659: 1, | | | |
| | | | | | | | H0660: 1, H0648: 1, | | | |
| | | | | | | | S0328: 1, S0330: 1, | | | |
| | | | | | | | H0539: 1, S0380: 1, | | | |
| | | | | | | | H0518: 1, S0146: 1, | | | |
| | | | | | | | S0432: 1, S0390: 1, | | | |
| | | | | | | | S0027: 1, L0750: 1, | | | |
| | | | | | | | L0752: 1, L0757: 1, | | | |
| | | | | | | | S0031: 1, H0445: 1, | | | |
| | | | | | | | L0684: 1, L0592: 1, | | | |
| | | | | | | | L0485: 1, L0608: 1, | | | |
| | | | | | | | L0594: 1, S0026: 1, | | | |
| | | | | | | | H0423; 1, H0422: 1, | | | |
| | | | | | | | S0042: 1 and L0698: 1. | | | |
| | | 966153 | 487 | 1127-207 | 1100 | Pro-1 to Pro-7, | | | | |
| | | | | | | Pro-13 to Lys-20, | | | | |
| | | | | | | Arg-23 to Cys-33, | | | | |
| | | | | | | Val-56 to Leu-62, | | | | |
| | | | | | | Pro-79 to Ser-90, | | | | |
| | | | | | | Thr-169 to Gly-175, | | | | |
| | | | | | | Thr-186 to Asn-192, | | | | |
| | | | | | | Asp-200 to Pro-207, | | | | |
| | | | | | | Lys-248 to Val-253, | | | | |
| | | | | | | Lys-285 to Gly-292, | | | | |
| | | | | | | Leu-294 to Cys-305. | | | | |
| 55 | HDTJF87 | 1154640 | 65 | 24-497 | 678 | Leu-4 to Thr-25, | AR089: 22, AR061: 3 | | | |
| | | | | | | Thr-52 to Gln-57, | H0486: 2, H0635: 1, | | | |
| | | | | | | Gly-111 to Ser-118, | H0052: 1, H0634: 1, | | | |
| | | | | | | Pro-149 to Lys-158. | L0748: 1 and H0444: 1. | | | |
| | | 907527 | 488 | 14-412 | 1101 | Leu-4 to Thr-25, | | | | |
| | | | | | | Thr-52 to Gln-57, | | | | |
| | | | | | | Ser-95 to Gly-103, | | | | |
| | | | | | | Thr-114 to Asn-120. | | | | |
| 56 | HE8TB94 | 1178794 | 66 | 470-1087 | 679 | Gln-6 to Asp-13, | AR089: 2, AR061: 1 | | | |
| | | | | | | Thr-68 to Leu-80, | L0747: 10, H0266: 6, | | | |
| | | | | | | Arg-130 to Thr-135, | H0623: 6, L0740: 5, | | | |
| | | | | | | Pro-189 to Ser-201. | S0045: 3, H0050: 3, | | | |
| | | | | | | | H0551: 3, L0777: 3, | | | |
| | | | | | | | L0757: 3, L0759: 3, | | | |
| | | | | | | | L0588: 3, H0056: 2, | | | |
| | | | | | | | S0404: 2, L0745: 2, | | | |
| | | | | | | | L0780: 2, L0589: 2, | | | |
| | | | | | | | H0624: 1, H0170: 1, | | | |
| | | | | | | | S0360: 1, H0329: 1, | | | |
| | | | | | | | H0645: 1, H0437: 1, | | | |
| | | | | | | | H0601: 1, H0486: 1, | | | |
| | | | | | | | H0013: 1, H0123: 1, | | | |
| | | | | | | | L0471: 1, H0328: 1, | | | |
| | | | | | | | H0622: 1, H0591: 1, | | | |
| | | | | | | | H0433: 1, H0413: 1, | | | |
| | | | | | | | H0100: 1, S0210: 1, | | | |
| | | | | | | | L0769: 1, L0659: 1, | | | |
| | | | | | | | L0788: 1, S0126: 1, | | | |
| | | | | | | | S0044: 1, S0146: 1, | | | |
| | | | | | | | H0555: 1, S0037: 1, | | | |
| | | | | | | | S0027: 1, L0748: 1, | | | |
| | | | | | | | L0439: 1 and L0465: 1. | | | |
| | | 935935 | 489 | 430-1104 | 1102 | Cys-14 to Lys-31, | | | | |
| | | | | | | Thr-87 to Leu-99, | | | | |
| | | | | | | Arg-149 to Thr-154, | | | | |
| | | | | | | Pro-208 to Ser-220. | | | | |
| 57 | HE8UB55 | 1228113 | 67 | 171-740 | 680 | Glu-37 to Thr-42, | AR061: 2, AR089: 2 | | | |
| | | | | | | Leu-127 to Glu-132, | L0766: 3, H0556: 2, | | | |
| | | | | | | Ser-175 to Cys-183. | H0662: 2, S0420: 2, | | | |
| | | | | | | | H0013: 2, H0457: 2, | | | |
| | | | | | | | H0622: 2, L0659: 2, | | | |
| | | | | | | | H0520: 2, L0659: 2, | | | |
| | | | | | | | S0136: 2, H0521: 2, | | | |
| | | | | | | | L0731: 2, H0624: 1, | | | |
| | | | | | | | S0376: 1, S0132: 1, | | | |
| | | | | | | | H0619: 1, L0021: 1, | | | |
| | | | | | | | H0581: 1, H0251: 1, | | | |
| | | | | | | | H0105: 1, H0373: 1, | | | |
| | | | | | | | S0003: 1, H0328: 1, | | | |
| | | | | | | | H0615: 1, H0553: 1, | | | |
| | | | | | | | H0644: 1, H0628: 1, | | | |
| | | | | | | | S0036: 1, H0551: 1, | | | |
| | | | | | | | H0264: 1, H0623: 1, | | | |
| | | | | | | | H0494: 1, S0144: 1, | | | |
| | | | | | | | H0529: 1, L0783: 1, | | | |
| | | | | | | | H0144: 1, S0126: 1, | | | |
| | | | | | | | H0435: 1, S0328: 1, | | | |
| | | | | | | | S0330: 1, H0539: 1, | | | |
| | | | | | | | H0579: 1, S0454: 1, | | | |
| | | | | | | | S0404: 1, L0745: 1, | | | |
| | | | | | | | S0260: 1, H0445: 1, | | | |
| | | | | | | | H0595: 1, S0026: 1, | | | |
| | | | | | | | H0423: 1, H0422: 1 and | | | |
| | | | | | | | H0506: 1. | | | |
| | | 912932 | 490 | 164-688 | 1103 | Glu-37 to Thr-42. | | | | |
| 58 | HEBGA65 | 1178633 | 68 | 309-977 | 681 | Lys-35 to Val-45, | AR089: 1, AR061: 0 | | | |
| | | | | | | Ser-133 to Ala-138, | L0748: 5, H0559: 3, | | | |
| | | | | | | Asp-162 to Asp-174, | H0009: 3, H0318: 2, | | | |
| | | | | | | Gln-179 to Cys-186, | H0581: 2, H0052: 2, | | | |
| | | | | | | Arg-214 to Pro-223. | H0135: 2, H0494: 2, | | | |
| | | | | | | | L0770: 2, L0766: 2, | | | |
| | | | | | | | L0809: 2, L0789: 2, | | | |
| | | | | | | | L0439: 2, L0751: 2, | | | |
| | | | | | | | L0755: 2, L0758: 2, | | | |
| | | | | | | | L0604: 2, H0352: 2, | | | |
| | | | | | | | S0040: 1, H0583: 1, | | | |
| | | | | | | | H0671: 1, H0661: 1, | | | |
| | | | | | | | H0402: 1, S0360: 1, | | | |
| | | | | | | | S0007: 1, H0645: 1, | | | |
| | | | | | | | H0351: 1, H0392: 1, | | | |
| | | | | | | | H0587: 1, S0005: 1, | | | |
| | | | | | | | H0156: 1, L0021: 1, | | | |
| | | | | | | | H0545: 1, H0012: 1, | | | |
| | | | | | | | H0024: 1, L0183: 1, | | | |
| | | | | | | | T0010: 1, H0271: 1, | | | |
| | | | | | | | H0188: 1, S0314: 1, | | | |
| | | | | | | | H0252: 1, H0644: 1, | | | |
| | | | | | | | H0316: 1, H0090: 1, | | | |
| | | | | | | | H0551: 1, T0042: 1, | | | |
| | | | | | | | H0625: 1, S0450: 1, | | | |
| | | | | | | | S0426: 1, L0769: 1, | | | |
| | | | | | | | L0637: 1, L0761: 1, | | | |
| | | | | | | | L0667: 1, L0764: 1, | | | |
| | | | | | | | L0771: 1, L0768: 1, | | | |
| | | | | | | | L0774: 1, L0775: 1, | | | |
| | | | | | | | L0806: 1, L0653: 1, | | | |
| | | | | | | | L0776: 1, L0783: 1, | | | |
| | | | | | | | L0545: 1, L0666: 1, | | | |
| | | | | | | | S0428: 1, S0053: 1, | | | |
| | | | | | | | S0216: 1, H0519: 1, | | | |
| | | | | | | | H0682: 1, H0683: 1, | | | |
| | | | | | | | H0658: 1, S0378: 1, | | | |
| | | | | | | | H0518: 1, H0696: 1, | | | |
| | | | | | | | H0478: 1, S0028: 1, | | | |
| | | | | | | | L0747: 1, L0749: 1, | | | |
| | | | | | | | L0750: 1, L0757: 1, | | | |
| | | | | | | | L0759: 1, S0031: 1 and | | | |
| | | | | | | | H0423: 1. | | | |
| | | 912815 | 491 | 412-1035 | 1104 | Ser-99 to Ala-104, | | | | |
| | | | | | | Asp-128 to Asp-140, | | | | |
| | | | | | | Thr-158 to Gly-163, | | | | |
| | | | | | | Gly-195 to Tyr-201. | | | | |
| 59 | HEGBB59 | 1197907 | 69 | 398-1078 | 682 | Tyr-1 to Asp-11, | AR061: 2, AR089: 2 | | | |
| | | | | | | Asp-64 to His-73, | L0731: 5, L0439: 4, | | | |
| | | | | | | Ala-90 to Gly-100, | H0662: 2, H0369: 2, | | | |
| | | | | | | Ile-133 to Asn-138, | L0105: 2, H0622: 2, | | | |
| | | | | | | Val-195 to His-213. | L0794: 2, L0803: 2, | | | |
| | | | | | | | L0804: 2, L0775: 2, | | | |
| | | | | | | | L0809: 2, H0547: 2, | | | |
| | | | | | | | L0754: 2, L0758: 2, | | | |
| | | | | | | | L0485: 2, H0484: 1, | | | |
| | | | | | | | S0360: 1, H0550: 1, | | | |
| | | | | | | | H0441: 1, H0392: 1, | | | |
| | | | | | | | H0031: 1, H0644: 1, | | | |
| | | | | | | | L0369: 1, L0662: 1, | | | |
| | | | | | | | L0768: 1, L0790: 1, | | | |
| | | | | | | | L0663: 1, L0664: 1, | | | |
| | | | | | | | S0126: 1, H0555: 1, | | | |
| | | | | | | | L0756: 1, L0589: 1, | | | |
| | | | | | | | L0592: 1, L0599: 1 and | | | |
| | | | | | | | H0506: 1. | | | |
| | | 912601 | 492 | 265-645 | 1105 | Tyr-1 to Asp-11, | | | | |
| | | | | | | Asp-64 to His-73, | | | | |
| | | | | | | Ala-90 to Ile-96. | | | | |
| 60 | HELHC48 | 956003 | 70 | 816-403 | 683 | Ile-3 to Thr-11, | AR061: 2, AR089: 1 | | | |
| | | | | | | Asn-31 to Lys-40, | L0439: 22, L0770: 11, | | | |
| | | | | | | Asn-44 to Val-53. | L0749: 11, S0003: 9, | | | |
| | | | | | | | L0766: 8, L0754: 8, | | | |
| | | | | | | | H0013: 7, L0665: 7, | | | |
| | | | | | | | L0752: 7, L0731: 7, | | | |
| | | | | | | | L0771: 6, L0775: 6, | | | |
| | | | | | | | H0521: 6, S0356: 5, | | | |
| | | | | | | | H0591: 5, L0438: 5, | | | |
| | | | | | | | H0641: 4, L0776: 4, | | | |
| | | | | | | | L0666: 4, L0663: 4, | | | |
| | | | | | | | H0547: 4, H0519: 4, | | | |
| | | | | | | | L0485: 4, H0556: 3, | | | |
| | | | | | | | S0360: 3, S0045: 3, | | | |
| | | | | | | | S0422: 3, L0598: 3, | | | |
| | | | | | | | H0529: 3, L0659: 3, | | | |
| | | | | | | | H0659: 3, L0755: 3, | | | |
| | | | | | | | L0759: 3, L0595: 3, | | | |
| | | | | | | | S0342: 2, S0212: 2, | | | |
| | | | | | | | L0005: 2, S0358: 2, | | | |
| | | | | | | | S0376: 2, S0222: 2, | | | |
| | | | | | | | H0574: 2, H0575: 2, | | | |
| | | | | | | | H0581: 2, H0046: 2, | | | |
| | | | | | | | H0615: 2, H0428: 2, | | | |
| | | | | | | | H0032: 2, H0316: 2, | | | |
| | | | | | | | H0038: 2, L0769: 2, | | | |
| | | | | | | | L0772: 2, L0649: 2, | | | |
| | | | | | | | L0653: 2, L0518: 2, | | | |
| | | | | | | | L0664: 2, H0144: 2, | | | |
| | | | | | | | H0520: 2, S0126: 2, | | | |
| | | | | | | | H0690: 2, S0152: 2, | | | |
| | | | | | | | L0748: 2, L0780: 2, | | | |
| | | | | | | | L0758: 2, S0260: 2, | | | |
| | | | | | | | L0604: 2, L0601: 2, | | | |
| | | | | | | | H0542: 2, H0422: 2, | | | |
| | | | | | | | S0424: 2, H0624: 1, | | | |
| | | | | | | | H0170: 1, T0049: 1, | | | |
| | | | | | | | S0134: 1, H0650: 1, | | | |
| | | | | | | | H0661: 1, H0638: 1, | | | |
| | | | | | | | S0418: 1, S0354: 1, | | | |
| | | | | | | | H0637: 1, H0580: 1, | | | |
| | | | | | | | S0132: 1, H0645: 1, | | | |
| | | | | | | | H0393: 1, L0717: 1, | | | |
| | | | | | | | H0437: 1, H0549: 1, | | | |
| | | | | | | | H0441: 1, H0431: 1, | | | |
| | | | | | | | H0497: 1, H0486: 1, | | | |
| | | | | | | | T0039: 1, H0156: 1, | | | |
| | | | | | | | T0082: 1, H0590: 1, | | | |
| | | | | | | | S0010: 1, H0505: 1, | | | |
| | | | | | | | H0596: 1, L0040: 1, | | | |
| | | | | | | | H0544: 1, H0545: 1, | | | |
| | | | | | | | L0157: 1, H0050: 1, | | | |
| | | | | | | | L0471: 1, H0024: 1, | | | |
| | | | | | | | H0375: 1, H0687: 1, | | | |
| | | | | | | | H0290: 1, H0039: 1, | | | |
| | | | | | | | H0213: 1, H0644: 1, | | | |
| | | | | | | | H0628: 1, L0055: 1, | | | |
| | | | | | | | H0674: 1, H0090: 1, | | | |
| | | | | | | | H0634: 1, H0551: 1, | | | |
| | | | | | | | H0264: 1, H0413: 1, | | | |
| | | | | | | | H0494: 1, H0560: 1, | | | |
| | | | | | | | H0625: 1, S0448: 1, | | | |
| | | | | | | | H0130: 1, H0633: 1, | | | |
| | | | | | | | S0142: 1, S0002: 1, | | | |
| | | | | | | | UNKWN: 1, L0369: 1, | | | |
| | | | | | | | L0640: 1, L0763: 1, | | | |
| | | | | | | | L0646: 1, L0764: 1, | | | |
| | | | | | | | L0773: 1, L0768: 1, | | | |
| | | | | | | | L0803: 1, L0774: 1, | | | |
| | | | | | | | L0526: 1, L0809: 1, | | | |
| | | | | | | | L0647: 1, H0701: 1, | | | |
| | | | | | | | S0374: 1, S0310: 1, | | | |
| | | | | | | | L0352: 1, H0682: 1, | | | |
| | | | | | | | H0660: 1, H0666: 1, | | | |
| | | | | | | | H0648: 1, S0328: 1, | | | |
| | | | | | | | H0539: 1, S0380: 1, | | | |
| | | | | | | | H0522: 1, S0146: 1, | | | |
| | | | | | | | S0404: 1, S3014: 1, | | | |
| | | | | | | | S0206: 1, L0740: 1, | | | |
| | | | | | | | L0751: 1, L0750: 1, | | | |
| | | | | | | | L0756: 1, L0777: 1, | | | |
| | | | | | | | L0599: 1, L0608: 1, | | | |
| | | | | | | | L0366: 1, S0011: 1, | | | |
| | | | | | | | H0653: 1, S0192: 1, | | | |
| | | | | | | | S0194: 1, H0543: 1 and | | | |
| | | | | | | | S0452: 1. | | | |
| 61 | HEOQH90 | 1212646 | 71 | 3-680 | Arg-14 to Cys-25, | AR089: 4, AR061: 2 | | | | |
| | | | | | | Ala-90 to Arg-96, | H0457: 11, H0052: 3, | | | |
| | | | | | | Ile-115 to Asp-122, | H0580: 2, H0529: 2, | | | |
| | | | | | | Lys-147 to Ser-152, | L0655: 2, L0748: 2, | | | |
| | | | | | | Ala-202 to Gln-208, | L0439: 2, L0779: 2, | | | |
| | | | | | | Asp-211 to Ser-221. | H0261: 1, H0486: 1, | | | |
| | | | | | | | L0021: 1, H0575: 1, | | | |
| | | | | | | | T0071: 1, H0194: 1, | | | |
| | | | | | | | L0579: 1, H0087: 1, | | | |
| | | | | | | | H0264: 1, T0041: 1, | | | |
| | | | | | | | H0695: 1, L0766: 1, | | | |
| | | | | | | | L0803: 1, L0775: 1, | | | |
| | | | | | | | L0758: 1 and H0422: 1. | | | |
| | | 907532 | 493 | 1-666 | 1106 | Arg-10 to Cys-21. | | | | |
| 62 | HFKHA18 | 1152242 | 72 | 1-690 | 685 | Gly-7 to Pro-13, | AR089: 4, AR061: 4 | | | |
| | | | | | | Cys-19 to Gly-25, | H0666: 12, S0358: 10, | | | |
| | | | | | | Phe-51 to Lys-61, | H0620: 10, L0750: 8, | | | |
| | | | | | | Ala-88 to Phe-93, | L0747: 7, L0731: 7, | | | |
| | | | | | | Leu-130 to Ser-136, | H0135: 5, L0659: 5, | | | |
| | | | | | | Ala-221 to Cys-228. | L0740: 5, L0757: 5, | | | |
| | | | | | | | S0360: 4, H0123: 4, | | | |
| | | | | | | | S0022: 4, L0666: 4, | | | |
| | | | | | | | L0665: 4, S0028: 4, | | | |
| | | | | | | | L0748: 4, L0777: 4, | | | |
| | | | | | | | L0588: 4, H0265: 3, | | | |
| | | | | | | | S0420: 3, H0208: 3, | | | |
| | | | | | | | H0046: 3, H0024: 3, | | | |
| | | | | | | | H0284: 3, H0100: 3, | | | |
| | | | | | | | L0650: 3, L0375: 3, | | | |
| | | | | | | | L0382: 3, H0651: 3, | | | |
| | | | | | | | L0755: 3, H0352: 3, | | | |
| | | | | | | | S0278: 2, H0592: 2, | | | |
| | | | | | | | H0333: 2, H0253: 2, | | | |
| | | | | | | | H0544: 2, H0545: 2, | | | |
| | | | | | | | H0081: 2, H0012: 2, | | | |
| | | | | | | | H0266: 2, H0286: 2, | | | |
| | | | | | | | H0252: 2, H0428: 2, | | | |
| | | | | | | | H0628: 2, H0551: 2, | | | |
| | | | | | | | S0210: 2, L0763: 2, | | | |
| | | | | | | | L0770: 2, L0774: 2, | | | |
| | | | | | | | L0518: 2, L0809: 2, | | | |
| | | | | | | | H0547: 2, H0682: 2, | | | |
| | | | | | | | H0670: 2, S0037: 2, | | | |
| | | | | | | | S0027: 2, L0751: 2, | | | |
| | | | | | | | L0752: 2, L0758: 2, | | | |
| | | | | | | | L0601: 2, H0668: 2, | | | |
| | | | | | | | S0194: 2, H0170: 1, | | | |
| | | | | | | | H0556: 1, H0686: 1, | | | |
| | | | | | | | S0040: 1, H0295: 1, | | | |
| | | | | | | | H0341: 1, H0638: 1, | | | |
| | | | | | | | S0418: 1, S0376: 1, | | | |
| | | | | | | | S0444: 1, H0580: 1, | | | |
| | | | | | | | H0329: 1, S0468: 1, | | | |
| | | | | | | | S0045: 1, S0046: 1, | | | |
| | | | | | | | S0132: 1, H0619: 1, | | | |
| | | | | | | | H0645: 1, L0717: 1, | | | |
| | | | | | | | H0549: 1, H0550: 1, | | | |
| | | | | | | | H0586: 1, H0587: 1, | | | |
| | | | | | | | L0021: 1, H0575: 1, | | | |
| | | | | | | | H0581: 1, H0052: 1, | | | |
| | | | | | | | H0309: 1, H0546: 1, | | | |
| | | | | | | | H0457: 1, H0150: 1, | | | |
| | | | | | | | H0041: 1, H0050: 1, | | | |
| | | | | | | | L0163: 1, H0051: 1, | | | |
| | | | | | | | H0615: 1, H0688: 1, | | | |
| | | | | | | | H0031: 1, H0634: 1, | | | |
| | | | | | | | H0087: 1, H0334: 1, | | | |
| | | | | | | | H0633: 1, H0646: 1, | | | |
| | | | | | | | L0772: 1, L0643: 1, | | | |
| | | | | | | | L0764: 1, L0662: 1, | | | |
| | | | | | | | L0767: 1, L0775: 1, | | | |
| | | | | | | | L0651: 1, L0806: 1, | | | |
| | | | | | | | L0776: 1, L0656: 1, | | | |
| | | | | | | | L0783: 1, L0383: 1, | | | |
| | | | | | | | L0543: 1, L0789: 1, | | | |
| | | | | | | | L0663: 1, H0593: 1, | | | |
| | | | | | | | H0684: 1, H0659: 1, | | | |
| | | | | | | | H0658: 1, H0660: 1, | | | |
| | | | | | | | H0709: 1, S0152: 1, | | | |
| | | | | | | | H0521: 1, H0627: 1, | | | |
| | | | | | | | L0611: 1, L0439: 1, | | | |
| | | | | | | | L0745: 1, L0759: 1, | | | |
| | | | | | | | L0593: 1, L0361: 1, | | | |
| | | | | | | | L0603: 1, S0026: 1, | | | |
| | | | | | | | H0667: 1 and H0506: 1. | | | |
| | | 972414 | 494 | 1-684 | 1107 | Gly-5 to Pro-11, | | | | |
| | | | | | | Cys-17 to Gly-23, | | | | |
| | | | | | | Phe-49 to Lys-59, | | | | |
| | | | | | | Ala-86 to Phe-91, | | | | |
| | | | | | | Leu-128 to Ser-134, | | | | |
| | | | | | | Asn-209 to Asn-214. | | | | |
| 63 | HFKMA10 | 964258 | 73 | 2-766 | 686 | Arg-1 to Gly-10, | AR089: 1, AR061: 0 | 17q25 | 114290, | |
| | | | | | | Asp-25 to Arg-40, | L0438: 3, H0620: 2, | | 138033, | |
| | | | | | | Gly-67 to Arg-72, | H0111: 1, H0634: 1, | | 162100, | |
| | | | | | | Ala-140 to Phe-145, | H0551: 1, H0647: 1, | | 170500, | |
| | | | | | | Ile-165 to Thr-170, | H0539: 1, S0152: 1, | | 170500, | |
| | | | | | | Lys-179 to Pro-186, | H0521: 1, H0478: 1, | | 170500, | |
| | | | | | | Arg-209 to Ala-215. | L0439: 1, L0759: 1 and | | 180860, | |
| | | | | | | S0031: 1. | | 264470 | | |
| 64 | HHBFM91 | 1092116 | 74 | 3-506 | 687 | Ala-19 to Phe-24, | AR089: 8, AR061: 1 | | | |
| | | | | | | Thr-45 to Val-53, | H0575: 2, S0031: 2, | | | |
| | | | | | | Ile-77 to Arg-83, | S0134: 1, H0156: 1, | | | |
| | | | | | | Ser-105 to Gly-111, | H0373: 1, H0328: 1, | | | |
| | | | | | | Gln-128 to Ala-144, | H0135: 1, S0428: 1, | | | |
| | | | | | | Asp-153 to Gly-161. | H0682: 1, H0435: 1, | | | |
| | | | | | | | H0518: 1, H0521: 1, | | | |
| | | | | | | | L0779: 1 and L0758: 1. | | | |
| | | 912832 | 495 | 2-343 | 1108 | | | | | |
| 65 | HIBBF63 | 912715 | 75 | 3-419 | 688 | Thr-3 to Arg-10, | L0748: 2, H0052: 1, | 16p13.3 | 141750, | |
| | | | | | | Lys-71 to Lys-80, | H0194: 1, T0010: 1, | | 141800, | |
| | | | | | | Glu-107 to Arg-120, | H0658: 1, S0380: 1 and | | 141800, | |
| | | | | | | Lys-128 to Gly-133. | L0366: 1. | | 141800, | |
| | | | | | | | | | 141800, | |
| | | | | | | | | | 141850, | |
| | | | | | | | | | 141850, | |
| | | | | | | | | | 141850, | |
| | | | | | | | | | 141850, | |
| | | | | | | | | | 141850, | |
| | | | | | | | | | 156850, | |
| | | | | | | | | | 186580, | |
| | | | | | | | | | 191092, | |
| | | | | | | | | | 600140, | |
| | | | | | | | | | 600273, | |
| | | | | | | | | | 601313, | |
| | | | | | | | | | 601785 | |
| 66 | HMCEI38 | 1134410 | 76 | 190-627 | 689 | Gln-21 to Ala-28, | AR061: 4, AR089: 2 | | | |
| | | | | | | Tyr-55 to Phe-60, | H0645: 1, H0494: 1, | | | |
| | | | | | | Tyr-78 to Ile-84. | S0142: 1, H0593: 1 and | | | |
| | | | | | | | H0435: 1. | | | |
| | | 912580 | 496 | 189-626 | 1109 | Gln-21 to Ala-28, | | | | |
| | | | | | | Tyr-55 to Phe-60, | | | | |
| | | | | | | Tyr-78 to Ile-84. | | | | |
| 67 | HMWJD68 | 1154790 | 77 | 1181-3 | 690 | Pro-7 to Ile-20, | AR061: 6, AR089: 5 | | | |
| | | | | | | Arg-26 to Trp-36, | H0641: 4, H0521: 4, | | | |
| | | | | | | Trp-68 to Thr-88, | S0418: 2, H0617: 2, | | | |
| | | | | | | Pro-96 to Gly-101, | L0794: 2, H0436: 2, | | | |
| | | | | | | Ser-109 to Arg-117, | L0748: 2, L0596: 2, | | | |
| | | | | | | Pro-163 to Ala-169, | H0556: 1, S0134: 1, | | | |
| | | | | | | Asp-260 to Asp-266. | H0650: 1, H0657: 1, | | | |
| | | | | | | | H0341: 1, S0001: 1, | | | |
| | | | | | | | H0638: 1, S0358: 1, | | | |
| | | | | | | | S0045: 1, S0278: 1, | | | |
| | | | | | | | S0474: 1, H0545: 1, | | | |
| | | | | | | | H0081: 1, H0271: 1, | | | |
| | | | | | | | H0416: 1, H0551: 1, | | | |
| | | | | | | | H0623: 1, H0059: 1, | | | |
| | | | | | | | S0344: 1, L0761: 1, | | | |
| | | | | | | | L0803: 1, L0804: 1, | | | |
| | | | | | | | L0383: 1, H0435: 1, | | | |
| | | | | | | | S0152: 1, H0522: 1, | | | |
| | | | | | | | L0749: 1, L0753: 1, | | | |
| | | | | | | | H0445: 1, H0595: 1 and | | | |
| | | | | | | | H0667: 1. | | | |
| | | 912628 | 497 | 14-685 | 1110 | Pro-2 to Cys-9, | | | | |
| | | | | | | Gly-27 to Glu-32, | | | | |
| | | | | | | Thr-87 to Asn-103, | | | | |
| | | | | | | Thr-146 to Lys-157, | | | | |
| | | | | | | Lys-189 to Val-194, | | | | |
| | | | | | | Lys-210 to Arg-218. | | | | |
| 68 | HOEOL58 | 1078090 | 78 | 66-338 | 691 | Glu-11 to Asp-26, | AR089: 6, AR061: 5 | | | |
| | | | | | | Val-71 to Lys-87. | S0126: 2, H0543: 2, | | | |
| | | | | | | | H0539: 1 and S0152: 1. | | | |
| | | 912836 | 498 | 3-407 | 1111 | | | | | |
| 69 | HRACA51 | 1162856 | 79 | 3-677 | 692 | Asn-43 to Asn-50, | AR089: 2, AR061: 1 | | | |
| | | | | | | Ala-77 to Gly-92, | L0777: 7, L0766: 5, | | | |
| | | | | | | Thr-103 to Asn-109, | L0770: 4, L0769: 4, | | | |
| | | | | | | Gly-132 to Glu-142, | L0803: 3, H0555: 3, | | | |
| | | | | | | Ile-185 to Gly-196, | H0087: 2, L0761: 2, | | | |
| | | | | | | Arg-207 to Ser-214. | L0809: 2, L0758: 2, | | | |
| | | | | | | | S6024: 1, H0650: 1, | | | |
| | | | | | | | H0580: 1, S0278: 1, | | | |
| | | | | | | | H0549: 1, S0222: 1, | | | |
| | | | | | | | H0586: 1, H0618: 1, | | | |
| | | | | | | | H0318: 1, H0597: 1, | | | |
| | | | | | | | H0546: 1, H0545: 1, | | | |
| | | | | | | | H0123: 1, H0014: 1, | | | |
| | | | | | | | H0015: 1, H0107: 1, | | | |
| | | | | | | | H0083: 1, H0510: 1, | | | |
| | | | | | | | S6028: 1, H0252: 1, | | | |
| | | | | | | | H0622: 1, H0272: 1, | | | |
| | | | | | | | H0100: 1, H0494: 1, | | | |
| | | | | | | | S0144: 1, L0800: 1, | | | |
| | | | | | | | L0768: 1, L0794: 1, | | | |
| | | | | | | | L0804: 1, L0806: 1, | | | |
| | | | | | | | H0689: 1, H0672: 1, | | | |
| | | | | | | | S0328: 1, H0631: 1, | | | |
| | | | | | | | S0028: 1, L0749: 1, | | | |
| | | | | | | | L0750: 1, L0780: 1, | | | |
| | | | | | | | L0755: 1, L0759: 1, | | | |
| | | | | | | | S0434: 1, L0592: 1, | | | |
| | | | | | | | H0668: 1 and H0423: 1. | | | |
| | | 912776 | 499 | 1-666 | 1112 | Asn-40 to Asn-47, | | | | |
| | | | | | | Ala-74 to Gly-89, | | | | |
| | | | | | | Thr-100 to Asn-106, | | | | |
| | | | | | | Gly-129 to Glu-139, | | | | |
| | | | | | | Ile-182 to Gly-193, | | | | |
| | | | | | | Arg-204 to Ser-211. | | | | |
| 70 | HSHAV32 | 1180388 | 80 | 157-627 | 693 | Phe-49 to Lys-55. | AR089: 4, AR061: 3 | | | |
| | | | | | | | L0731: 7, L0749: 6, | | | |
| | | | | | | | L0105: 5, H0046: 5, | | | |
| | | | | | | | L0748: 5, H0551: 4, | | | |
| | | | | | | | L0747: 4, L0777: 4, | | | |
| | | | | | | | S0040: 3, L0663: 3, | | | |
| | | | | | | | S0152: 3, L0659: 2, | | | |
| | | | | | | | H0547: 2, L0439: 2, | | | |
| | | | | | | | L0779: 2, L0448: 1, | | | |
| | | | | | | | H0685: 1, H0341: 1, | | | |
| | | | | | | | H0663: 1, H0580: 1, | | | |
| | | | | | | | L0021: 1, H0594: 1, | | | |
| | | | | | | | S0214: 1, H0615: 1, | | | |
| | | | | | | | H0628: 1, H0561: 1, | | | |
| | | | | | | | H0646: 1, L0640: 1, | | | |
| | | | | | | | L0662: 1, L0774: 1, | | | |
| | | | | | | | L0783: 1, L0809: 1, | | | |
| | | | | | | | L0666: 1, H0144: 1, | | | |
| | | | | | | | L0352: 1, S3012: 1, | | | |
| | | | | | | | S0037: 1, L0754: 1, | | | |
| | | | | | | | L0756: 1, L0752: 1, | | | |
| | | | | | | | L0755: 1, L0759: 1, | | | |
| | | | | | | | H0667: 1 and S0192: 1. | | | |
| | | 912812 | 500 | 117-872 | 1113 | Phe-49 to Lys-55. | | | | |
| 71 | HTPDE66 | 971281 | 81 | 245-478 | 694 | | AR061: 6, AR089: 4 | | | |
| | | | | | | | L0777: 8, L0744: 7, | | | |
| | | | | | | | H0039: 6, L0754: 6, | | | |
| | | | | | | | H0046: 4, L0751: 4, | | | |
| | | | | | | | H0617: 3, L0372: 3, | | | |
| | | | | | | | L0743: 3, L0747: 3, | | | |
| | | | | | | | L0750: 3, S0356: 2, | | | |
| | | | | | | | S0132: 2, H0549: 2, | | | |
| | | | | | | | H0587: 2, L0764: 2, | | | |
| | | | | | | | L0773: 2, L0659: 2, | | | |
| | | | | | | | L0382: 2, L0809: 2, | | | |
| | | | | | | | L0519: 2, H0593: 2, | | | |
| | | | | | | | L0752: 2, L0596: 2, | | | |
| | | | | | | | L0595: 2, H0506: 2, | | | |
| | | | | | | | H0294: 1, H0483: 1, | | | |
| | | | | | | | H0661: 1, S0358: 1, | | | |
| | | | | | | | S0444: 1, L0717: 1, | | | |
| | | | | | | | H0370: 1, H0318: 1, | | | |
| | | | | | | | H0234: 1, H0597: 1, | | | |
| | | | | | | | H0024: 1, H0622: 1, | | | |
| | | | | | | | H0553: 1, H0212: 1, | | | |
| | | | | | | | H0135: 1, H0087: 1, | | | |
| | | | | | | | H0059: 1, H0100: 1, | | | |
| | | | | | | | H0538: 1, L0763: 1, | | | |
| | | | | | | | L0772: 1, L0646: 1, | | | |
| | | | | | | | L0645: 1, L0648: 1, | | | |
| | | | | | | | L0364: 1, L0649: 1, | | | |
| | | | | | | | L0774: 1, L0806: 1, | | | |
| | | | | | | | L0766: 1, L0657: 1, | | | |
| | | | | | | | L0540: 1, L0542: 1, | | | |
| | | | | | | | L0383: 1, L0529: 1, | | | |
| | | | | | | | L0664: 1, L0665: 1, | | | |
| | | | | | | | H0682: 1, H0683: 1, | | | |
| | | | | | | | H0435: 1, H0670: 1, | | | |
| | | | | | | | S0432: 1 and H0542: 1. | | | |
| 72 | HTPDV73 | 997659 | 82 | 423-118 | 695 | | AR089: 0, AR061: 0 | | | |
| | | | | | | | H0039: 2 | | | |
| | | 912947 | 501 | 276-752 | 1114 | Asp-14 to Ile-20. | | | | |
| 73 | HTPHE33 | 1163871 | 83 | 1251-703 | 696 | Pro-10 to Gly-15, | AR061: 0, AR089: 0 | | | |
| | | | | | | Lys-80 to Ile-88, | L0749: 5, H0622: 3, | | | |
| | | | | | | Gly-161 to Tyr-169, | L0731: 3, L0803: 2, | | | |
| | | | | | | Arg-175 to Arg-183. | L0748: 2, L0777: 2, | | | |
| | | | | | | | S0134: 1, H0657: 1, | | | |
| | | | | | | | H0050: 1, S0048: 1, | | | |
| | | | | | | | S0036: 1, H0616: 1, | | | |
| | | | | | | | H0264: 1, H0488: 1, | | | |
| | | | | | | | L0663: 1 and H0659: 1. | | | |
| | | 963658 | 502 | 852-1478 | 1115 | Gln-1 to Gly-13, | | | | |
| | | | | | | Thr-57 to Phe-63, | | | | |
| | | | | | | Gln-84 to Tyr-89, | | | | |
| | | | | | | Glu-98 to Pro-104, | | | | |
| | | | | | | Tyr-161 to Phe-168, | | | | |
| | | | | | | Leu-181 to Glu-202. | | | | |
| 74 | HUFDN58 | 1224609 | 84 | 391-1071 | 697 | Tyr-1 to Asp-11, | AR089: 3, AR061: 1 | | | |
| | | | | | | Asp-64 to His-73, | L0731: 5, L0439: 4, | | | |
| | | | | | | Ala-90 to Gly-100, | H0662: 2, H0369: 2, | | | |
| | | | | | | Ile-133 to Asn-138, | L0105: 2, H0622: 2, | | | |
| | | | | | | Val-195 to His-213. | L0794: 2, L0803: 2, | | | |
| | | | | | | | L0804: 2, L0775: 2, | | | |
| | | | | | | | L0809: 2, H0547: 2, | | | |
| | | | | | | | L0754: 2, L0758: 2, | | | |
| | | | | | | | L0485: 2, H0484: 1, | | | |
| | | | | | | | S0360: 1, H0550: 1, | | | |
| | | | | | | | H0441: 1, H0392: 1, | | | |
| | | | | | | | H0031: 1, H0644: 1, | | | |
| | | | | | | | L0369: 1, L0662: 1, | | | |
| | | | | | | | L0768: 1, L0790: 1, | | | |
| | | | | | | | L0663: 1, L0664: 1, | | | |
| | | | | | | | S0126: 1, H0555: 1, | | | |
| | | | | | | | L0756: 1, L0589: 1, | | | |
| | | | | | | | L0592: 1, L0599: 1 and | | | |
| | | | | | | | H0506: 1. | | | |
| | | 912929 | 503 | 3-320 | 1116 | Ile-12 to Asn-17, | | | | |
| | | | | | | Val-74 to His-92. | | | | |
| 75 | HUVFX92 | 1225329 | 85 | 3-440 | 698 | Asp-47 to Ser-53, | AR061: 0, AR089: 0 | | | |
| | | | | | | Ala-82 to Arg-88. | H0623: 2, S0045: 1 and | | | |
| | | | | | | | H0620: 1. | | | |
| | | 912672 | 504 | 3-395 | 1117 | Asp-47 to Ser-53, | | | | |
| | | | | | | Ala-82 to Thr-89. | | | | |
| 76 | HWAEG71 | 1182321 | 86 | 1-717 | 699 | Pro-17 to His-22. | AR089: 6, AR061: 1 | | | |
| | | | | | | | L0740: 2 and H0581: | | | |
| | | | | | | | 1. | | | |
| | | 931547 | 505 | 2-553 | 1118 | Gln-60 to Ala-68, | | | | |
| | | | | | | Trp-132 to Ser-138, | | | | |
| | | | | | | Lys-156 to Val-163. | | | | |
| | | | | | | 3. | | | | |
| 77 | HWAHD49 | 1228064 | 87 | 151-1011 | 700 | Arg-12 to Leu-19, | AR089: 9, AR061: 3 | | | |
| | | | | | | Gly-56 to Pro-62, | S0358: 10, L0747: 7, | | | |
| | | | | | | Cys-68 to Gly-74, | L0750: 7, L0731: 7, | | | |
| | | | | | | Phe-100 to Lys-110, | H0620: 5, L0659: 5, | | | |
| | | | | | | Ala-137 to Phe-142, | S0360: 4, S0022: 4, | | | |
| | | | | | | Leu-179 to Ser-185, | L0666: 4, L0665: 4, | | | |
| | | | | | | Ala-278 to Cys-285. | L0748: 4, L0740: 4, | | | |
| | | | | | | | L0777: 4, L0757: 4, | | | |
| | | | | | | | L0588: 4, H0265: 3, | | | |
| | | | | | | | S0420: 3, H0046: 3, | | | |
| | | | | | | | H0135: 3, H0100: 3, | | | |
| | | | | | | | L0650: 3, L0375: 3, | | | |
| | | | | | | | L0382: 3, H0651: 3, | | | |
| | | | | | | | S0028: 3, L0755: 3, | | | |
| | | | | | | | H0352: 3, S0278: 2, | | | |
| | | | | | | | H0592: 2, H0333: 2, | | | |
| | | | | | | | H0253: 2, H0544: 2, | | | |
| | | | | | | | H0123: 2, H0081: 2, | | | |
| | | | | | | | H0012: 2, H0252: 2, | | | |
| | | | | | | | H0428: 2, L0763: 2, | | | |
| | | | | | | | L0770: 2, L0774: 2, | | | |
| | | | | | | | L0518: 2, L0809: 2, | | | |
| | | | | | | | H0682: 1, S0037: 2, | | | |
| | | | | | | | S0027: 2, L0751: 2, | | | |
| | | | | | | | L0758: 2, H0170: 1, | | | |
| | | | | | | | H0556: 1, H0686: 1, | | | |
| | | | | | | | H0295: 1, H0341: 1, | | | |
| | | | | | | | S0418: 1, S0376: 1, | | | |
| | | | | | | | S0444: 1, H0580: 1, | | | |
| | | | | | | | H0329: 1, S0468: 1, | | | |
| | | | | | | | H0208: 1, S0045: 1, | | | |
| | | | | | | | H0619: 1, L0717: 1, | | | |
| | | | | | | | H0549: 1, H0550: 1, | | | |
| | | | | | | | H0587: 1, L0021: 1, | | | |
| | | | | | | | H0581: 1, H0309: 1, | | | |
| | | | | | | | H0546: 1, H0457: 1, | | | |
| | | | | | | | H0150: 1, H0041: 1, | | | |
| | | | | | | | H0050: 1, H0024: 1, | | | |
| | | | | | | | L0163: 1, H0266: 1, | | | |
| | | | | | | | H0615: 1, H0688: 1, | | | |
| | | | | | | | H0031: 1, H0628: 1, | | | |
| | | | | | | | H0087: 1, H0334: 1, | | | |
| | | | | | | | H0633: 1, S0210: 1, | | | |
| | | | | | | | L0772: 1, L0643: 1, | | | |
| | | | | | | | L0764: 1, L0662: 1, | | | |
| | | | | | | | L0767: 1, L0775: 1, | | | |
| | | | | | | | L0651: 1, L0806: 1, | | | |
| | | | | | | | L0776: 1, L0656: 1, | | | |
| | | | | | | | L0783: 1, L0383: 1, | | | |
| | | | | | | | L0543: 1, L0789: 1, | | | |
| | | | | | | | L0663: 1, H0547: 1, | | | |
| | | | | | | | H0593: 1, H0684: 1, | | | |
| | | | | | | | H0659: 1, H0658: 1, | | | |
| | | | | | | | H0709: 1, S0152: 1, | | | |
| | | | | | | | H0521: 1, H0627: 1, | | | |
| | | | | | | | L0439: 1, L0745: 1, | | | |
| | | | | | | | L0752: 1, L0759: 1, | | | |
| | | | | | | | L0593: 1, L0361: 1, | | | |
| | | | | | | | L0601: 1, L0603: 1, | | | |
| | | | | | | | H0668: 1, S0026: 1, | | | |
| | | | | | | | S0194: 1 and H0506: 1. | | | |
| | | 972413 | 506 | 151-741 | 1119 | Arg-12 to Leu-19, | | | | |
| | | | | | | Gly-56 to Pro-62, | | | | |
| | | | | | | Cys-68 to Gly-74, | | | | |
| | | | | | | Phe-100 to Lys-110, | | | | |
| | | | | | | Ala-137 to Phe-142, | | | | |
| | | | | | | Leu-179 to Phe-185. | | | | |
| 78 | HWLGG31 | 1178825 | 88 | 3-1205 | 701 | Thr-1 to Gln-18, | AR089: 2, AR061: 2 | | | |
| | | | | | | Thr-55 to His-60, | S0007: 4, L0747: 3, | | | |
| | | | | | | Ala-91 to Gln-102, | S0222: 2, H0599: 2, | | | |
| | | | | | | Ser-117 to His-124, | H0318: 2, L0764: 2, | | | |
| | | | | | | Val-132 to Gly-139, | L0662: 2, S0354: 1, | | | |
| | | | | | | Lys-148 to Gly-158, | H0706: 1, S0010: 1, | | | |
| | | | | | | Glu-220 to Lys-234, | S0049: 1, H0052: 1, | | | |
| | | | | | | Gln-253 to Gly-260, | H0031: 1, H0040: 1, | | | |
| | | | | | | Asp-274 to Pro-281, | H0634: 1, H0100: 1, | | | |
| | | | | | | Gln-318 to Val-326, | L0761: 1, L0772: 1, | | | |
| | | | | | | Pro-334 to Glu-344, | L0646: 1, L0773: 1, | | | |
| | | | | | | Gln-382 to Pro-389. | L0803: 1, L0375: 1, | | | |
| | | | | | | | L0651: 1, L0636: 1, | | | |
| | | | | | | | L0664: 1, H0522: 1, | | | |
| | | | | | | | L0439: 1, L0779: 1, | | | |
| | | | | | | | L0777: 1, L0731: 1 and | | | |
| | | | | | | | H0136: 1. | | | |
| | | 912581 | 507 | 2-565 | 1120 | Arg-1 to Gln-15, | | | | |
| | | | | | | Thr-52 to His-57, | | | | |
| | | | | | | Ala-88 to Gln-99, | | | | |
| | | | | | | Ser-114 to His-121, | | | | |
| | | | | | | Val-129 to Gly-136. | | | | |
| 79 | HWLKF25 | 1089052 | 89 | 224-886 | 702 | Val-49 to Gln-56, | AR061: 3, AR089: 2 | | | |
| | | | | | | Ala-85 to Leu-93, | S0358: 1, H0052: 1, | | | |
| | | | | | | Pro-96 to Ala-101, | L0803: 1 and L0759: 1. | | | |
| | | | | | | Val-110 to Asn-118, | | | | |
| | | | | | | Asp-131 to Glu-136, | | | | |
| | | | | | | Lys-146 to Ala-159, | | | | |
| | | | | | | Met-164 to Tyr-169, | | | | |
| | | | | | | Thr-174 to Thr-180. | | | | |
| | | 912842 | 508 | 224-889 | 1121 | Val-49 to Gln-56, | | | | |
| | | | | | | Ala-85 to Leu-93, | | | | |
| | | | | | | Pro-96 to Ala-101, | | | | |
| | | | | | | Val-110 to Asn-118, | | | | |
| | | | | | | Asp-131 to Glu-136, | | | | |
| | | | | | | Lys-146 to Ala-159, | | | | |
| | | | | | | Met-164 to Tyr-169, | | | | |
| | | | | | | Thr-174 to Thr-180, | | | | |
| | | | | | | Ser-213 to Gly-218. | | | | |
| 80 | H2CBH45 | 963811 | 90 | 2-421 | 703 | Ala-1 to Met-18, | AR061: 3, AR089: 3, | | | |
| | | | | | | Leu-20 to Asn-26, | H0437: 1, S0280: 1, | | | |
| | | | | | | Val-38 to Leu-46, | T0110: 1, H0622: 1, | | | |
| | | | | | | Pro-48 to Gly-53, | L0745: 1, L0746: 1, | | | |
| | | | | | | Leu-81 to Gly-86, | L0731: 1 and L0596: 1. | | | |
| | | | | | | Gln-94 to Tyr-99, | | | | |
| | | | | | | Glu-101 to Gly-109. | | | | |
| 81 | HAGDN53 | 1092161 | 91 | 2-430 | 704 | | AR050: 17, AR051: | | | |
| | | | | | | | 11, AR054: 2, AR089: | | | |
| | | | | | | | 1, AR061: 0 | | | |
| | | | | | | | S0010: 1 and S0027: 1. | | | |
| | | 895963 | 509 | 129-428 | 1122 | Pro-9 to Gln-16, | | | | |
| | | | | | | Phe-31 to Tyr-40, | | | | |
| | | | | | | Gln-61 to Trp-66, | | | | |
| | | | | | | Arg-71 to Gln-78, | | | | |
| | | | | | | Gly-86 to Arg-92. | | | | |
| 82 | HAMFM39 | 971347 | 92 | 1121-2929 | 705 | Gln-1 to Ala-7, | AR050: 193, AR054: | | | |
| | | | | | | Thr-36 to Trp-42, | 122, AR051: 84, | | | |
| | | | | | | Gly-45 to Gly-52, | AR089: 0, AR061: 0 | | | |
| | | | | | | Glu-77 to Pro-89, | H0255: 59, H0254: 10, | | | |
| | | | | | | Gly-105 to Gly-132, | H0617: 9, L0747: 8, | | | |
| | | | | | | Ser-135 to Glu-162. | S0358: 7, H0486: 6, | | | |
| | | | | | | | L0655: 6, H0208: 4, | | | |
| | | | | | | | H0545: 4, H0024: 4, | | | |
| | | | | | | | S0354: 3, H0250: 3, | | | |
| | | | | | | | H0123: 3, H0031: 3, | | | |
| | | | | | | | L0659: 3, S0328: 3, | | | |
| | | | | | | | L0731: 3, H0583: 2, | | | |
| | | | | | | | L0808: 2, L0785: 2, | | | |
| | | | | | | | H0662: 2, H0586: 2, | | | |
| | | | | | | | H0618: 2, H0253: 2, | | | |
| | | | | | | | H0424: 2, H0264: 2, | | | |
| | | | | | | | H0488: 2, H0100: 2, | | | |
| | | | | | | | L0771: 2, L0806: 2, | | | |
| | | | | | | | L0809: 2, H0144: 2, | | | |
| | | | | | | | H0689: 2, L0749: 2, | | | |
| | | | | | | | L0750: 2, L0779: 2, | | | |
| | | | | | | | L0777: 2, H0707: 2, | | | |
| | | | | | | | L0595: 2, H0624: 1, | | | |
| | | | | | | | H0341: 1, S0356: 1, | | | |
| | | | | | | | S0360: 1, H0619: 1, | | | |
| | | | | | | | H0411: 1, H0370: 1, | | | |
| | | | | | | | H0485: 1, H0635: 1, | | | |
| | | | | | | | H0025: 1, H0108: 1, | | | |
| | | | | | | | H0318: 1, H0581: 1, | | | |
| | | | | | | | T0110: 1, H0231: 1, | | | |
| | | | | | | | L0738: 1, H0086: 1, | | | |
| | | | | | | | H0271: 1, T0006: 1, | | | |
| | | | | | | | H0644: 1, H0181: 1, | | | |
| | | | | | | | H0124: 1, H0087: 1, | | | |
| | | | | | | | T0067: 1, H0560: 1, | | | |
| | | | | | | | H0646: 1, L0371: 1, | | | |
| | | | | | | | L0800: 1, L0764: 1, | | | |
| | | | | | | | L0768: 1, L0803: 1, | | | |
| | | | | | | | L0774: 1, L0657: 1, | | | |
| | | | | | | | L0368: 1, L0787: 1, | | | |
| | | | | | | | L0666: 1, L0663: 1, | | | |
| | | | | | | | L0665: 1, H0519: 1, | | | |
| | | | | | | | H0414: 1, S0378: 1, | | | |
| | | | | | | | S0380: 1, H0696: 1, | | | |
| | | | | | | | S0044: 1, S0432: 1, | | | |
| | | | | | | | L0439: 1, L0780: 1, | | | |
| | | | | | | | L0755: 1, H0445: 1 and | | | |
| | | | | | | | L0596: 1. | | | |
| 83 | HBGQT03 | 908173 | 93 | 3-791 | 706 | Lys-1 to Ala-15, | AR061: 6, AR089: 3 | | | |
| | | | | | | Glu-22 to Val-31, | H0617: 10, L0665: 4, | | | |
| | | | | | | Glu-37 to Thr-48, | H0333: 3, S0366: 3, | | | |
| | | | | | | Leu-143 to Asp-160, | L0759: 3, H0599: 2, | | | |
| | | | | | | Thr-170 to Ala-201, | L0648: 2, L0653: 2, | | | |
| | | | | | | Ala-214 to Asp-219. | L0664: 2, H0519: 2, | | | |
| | | | | | | | H0686: 1, H0484: 1, | | | |
| | | | | | | | H0664: 1, H0392: 1, | | | |
| | | | | | | | L0622: 1, S0280: 1, | | | |
| | | | | | | | H0545: 1, T0010: 1, | | | |
| | | | | | | | H0424: 1, H0031: 1, | | | |
| | | | | | | | H0181: 1, H0708: 1, | | | |
| | | | | | | | H0494: 1, H0633: 1, | | | |
| | | | | | | | L0371: 1, L0764: 1, | | | |
| | | | | | | | L0773: 1, L0768: 1, | | | |
| | | | | | | | L0375: 1, L0651: 1, | | | |
| | | | | | | | L0659: 1, L0783: 1, | | | |
| | | | | | | | L0789: 1, L0438: 1, | | | |
| | | | | | | | H0684: 1, H0670: 1, | | | |
| | | | | | | | L0744: 1, L0780: 1, | | | |
| | | | | | | | L0755: 1 and L0595: 1. | | | |
| 84 | HBGSJ13 | 1150790 | 94 | 822-1 | 707 | | AR089: 1, AR061: 0 | | | |
| | | | | | | | H0617: 2, H0013: 1, | | | |
| | | | | | | | H0271: 1, L0455: 1 and | | | |
| | | | | | | | H0539: 1. | | | |
| | | 878322 | 510 | 1-684 | 1123 | | | | | |
| 85 | HBIBQ89 | 909782 | 95 | 2-577 | 708 | | AR089: 1, AR061: 0 | | | |
| | | | | | | | L0438: 6, L0751: 6, | | | |
| | | | | | | | L0439: 5, L0770: 4, | | | |
| | | | | | | | H0052: 2, H0620: 2, | | | |
| | | | | | | | H0521: 2, L0756: 2, | | | |
| | | | | | | | L0731: 2, L0758: 2, | | | |
| | | | | | | | L0588: 2, H0556: 1, | | | |
| | | | | | | | S0282: 1, H0662: 1, | | | |
| | | | | | | | H0402: 1, S0418: 1, | | | |
| | | | | | | | T0008: 1, S0222: 1, | | | |
| | | | | | | | H0392: 1, H0333: 1, | | | |
| | | | | | | | L0021: 1, H0581: 1, | | | |
| | | | | | | | S0049: 1, L0471: 1, | | | |
| | | | | | | | H0266: 1, L0351: 1, | | | |
| | | | | | | | L0772: 1, L0766: 1, | | | |
| | | | | | | | L0776: 1, L0659: 1, | | | |
| | | | | | | | L0792: 1, H0522: 1, | | | |
| | | | | | | | S0027: 1, L0779: 1 and | | | |
| | | | | | | | S0011: 1. | | | |
| 86 | HCECM90 | 945088 | 96 | 2-577 | 709 | Gly-12 to Gly-31, | AR061: 2, AR089: 1 | | | |
| | | | | | | Asn-38 to Gly-62, | H0013: 3, L0439: 2, | | | |
| | | | | | | Asp-70 to Phe-84, | H0624: 1, H0171: 1, | | | |
| | | | | | | Val-94 to Ser-101, | S0040: 1, S0420: 1, | | | |
| | | | | | | Ala-112 to Ser-125, | H0619: 1, H0156: 1, | | | |
| | | | | | | Lys-140 to Asn-145, | H0575: 1, H0590: 1, | | | |
| | | | | | | Asn-175 to Tyr-180, | H0052: 1, H0011: 1, | | | |
| | | | | | | Arg-187 to Thr-192. | H0266: 1, H0494: 1, | | | |
| | | | | | | | L0519: 1, H0519: 1, | | | |
| | | | | | | | H0555: 1, L0777: 1, | | | |
| | | | | | | | L0758: 1, S0436: 1 and | | | |
| | | | | | | | H0506: 1. | | | |
| 87 | HCEPH71 | 522739 | 97 | 3-410 | 710 | Val-1 to Lys-8, | AR089: 1, AR061: 1 | | | |
| | | | | | | Pro-36 to Lys-41, | H0052: 1 and T0067: | | | |
| | | | | | | Gln-49 to Lys-57, | 1. | | | |
| | | | | | | Ser-63 to Ser-70, | | | | |
| | | | | | | Asp-79 to Gln-92, | | | | |
| | | | | | | Asn-103 to Thr-122. | | | | |
| 88 | HCFMT57 | 1175204 | 98 | 3-1220 | 711 | Arg-4 to Val-12, | AR061: 0, AR089: 0 | | | |
| | | | | | | Glu-19 to Arg-29, | L0157: 2, H0620: 2, | | | |
| | | | | | | Glu-34 to Arg-76. | L0666: 2, S0001: 1, | | | |
| | | | | | | | L0717: 1, H0549: 1, | | | |
| | | | | | | | S0222: 1, H0581: 1, | | | |
| | | | | | | | H0194: 1, H0015: 1, | | | |
| | | | | | | | H0399: 1, H0271: 1, | | | |
| | | | | | | | H0688: 1, H0428: 1, | | | |
| | | | | | | | H0124: 1, L0637: 1, | | | |
| | | | | | | | H0672: 1, L0439: 1, | | | |
| | | | | | | | L0750: 1 and H0423: 1. | | | |
| | | 765375 | 511 | 380-3 | 1124 | Glu-5 to Arg-15, | | | | |
| | | | | | | Glu-20 to Arg-62. | | | | |
| 89 | HCOMM05 | 1173146 | 99 | 3-851 | 712 | Gln-22 to Asp-41, | AR089: 1, AR061: 1 | | | |
| | | | | | | Pro-49 to Thr-58, | H0670: 1 | | | |
| | | | | | | Leu-99 to Gly-107, | | | | |
| | | | | | | Ala-117 to Ala-122, | | | | |
| | | | | | | Gln-128 to Trp-134, | | | | |
| | | | | | | Pro-136 to Pro-144, | | | | |
| | | | | | | Phe-147 to Glu-153, | | | | |
| | | | | | | Glu-183 to Val-188, | | | | |
| | | | | | | Glu-195 to Glu-200, | | | | |
| | | | | | | Glu-257 to Leu-265, | | | | |
| | | | | | | Met-275 to Ser-283. | | | | |
| | | 925952 | 512 | 1-840 | 1125 | Gln-19 to Asp-38, | | | | |
| | | | | | | Pro-46 to Thr-55, | | | | |
| | | | | | | Leu-96 to Gly-104, | | | | |
| | | | | | | Ala-114 to Ala-119, | | | | |
| | | | | | | Gln-125 to Trp-131, | | | | |
| | | | | | | Pro-133 to Pro-141, | | | | |
| | | | | | | Phe-144 to Glu-150, | | | | |
| | | | | | | Glu-180 to Val-185, | | | | |
| | | | | | | Glu-192 to Glu-197, | | | | |
| | | | | | | Glu-254 to Leu-262, | | | | |
| | | | | | | Met-272 to Ser-280. | | | | |
| 90 | HCOOZ11 | 965306 | 100 | 89-592 | 713 | Asp-43 to Glu-48. | AR089: 15, AR061: 5 | 22q13.1-q13.2 | 103050, | |
| | | | | | | | H0662: 2, H0670: 1, | | 103050, | |
| | | | | | | | L0756: 1 and L0759: 1. | | 124030, | |
| | | | | | | | | | 124030, | |
| | | | | | | | | | 138981, | |
| | | | | | | | | | 182380, | |
| | | | | | | | | | 188826, | |
| | | | | | | | | | 190040, | |
| | | | | | | | | | 190040, | |
| | | | | | | | | | 190040 | |
| 91 | HCWFF88 | 506577 | 101 | 41-187 | 714 | Pro-1 to Gly-6, | AR089: 15, AR061: 6 | | | |
| | | | | | | Ala-41 to Leu-47. | H0305: 2 | | | |
| 92 | HDMAV01 | 1194696 | 102 | 1-657 | 715 | Pro-1 to Glu-15, | AR089: 2, AR061: 2 | | | |
| | | | | | | Ala-26 to Lys-32, | L0766: 5, L0776: 5, | | | |
| | | | | | | Glu-46 to Leu-65, | L0754: 4, H0013: 3, | | | |
| | | | | | | Arg-82 to Cys-94, | S0126: 3, L0742: 3, | | | |
| | | | | | | Leu-101 to Glu-107, | L0750: 3, H0624: 2, | | | |
| | | | | | | Leu-146 to Asp-151, | S0360: 2, H0560: 2, | | | |
| | | | | | | Gln-157 to Ser-162, | L0769: 2, L0641: 2, | | | |
| | | | | | | Ser-165 to Ala-187, | L0665: 2, S0330: 2, | | | |
| | | | | | | Phe-210 to Leu-217. | L0756: 2, L0731: 2, | | | |
| | | | | | | | L0759: 2, L0588: 2, | | | |
| | | | | | | | H0171: 1, H0650: 1, | | | |
| | | | | | | | H0402: 1, H0638: 1, | | | |
| | | | | | | | H0340: 1, H0637: 1, | | | |
| | | | | | | | H0351: 1, S0222: 1, | | | |
| | | | | | | | H0581: 1, H0263: 1, | | | |
| | | | | | | | H0545: 1, H0050: 1, | | | |
| | | | | | | | S0051: 1, S0214: 1, | | | |
| | | | | | | | H0039: 1, L0055: 1, | | | |
| | | | | | | | H0090: 1, H0412: 1, | | | |
| | | | | | | | H0022: 1, H0359: 1, | | | |
| | | | | | | | H0561: 1, H0641: 1, | | | |
| | | | | | | | L0770: 1, L0637: 1, | | | |
| | | | | | | | L0646: 1, L0764: 1, | | | |
| | | | | | | | L0773: 1, L0662: 1, | | | |
| | | | | | | | L0768: 1, L0651: 1, | | | |
| | | | | | | | L0653: 1, L0659: 1, | | | |
| | | | | | | | L0792: 1, H0519: 1, | | | |
| | | | | | | | H0522: 1, H0576: 1, | | | |
| | | | | | | | S0028: 1, L0439: 1, | | | |
| | | | | | | | L0740: 1, L0749: 1, | | | |
| | | | | | | | L0777: 1, H0444: 1, | | | |
| | | | | | | | L0596: 1, L0601: 1, | | | |
| | | | | | | | H0542: 1 and H0543: 1. | | | |
| | | 911386 | 513 | 3-428 | 1126 | Asp-1 to Glu-11, | | | | |
| | | | | | | Ala-22 to Lys-28, | | | | |
| | | | | | | Glu-42 to Leu-61, | | | | |
| | | | | | | Arg-78 to Cys-90, | | | | |
| | | | | | | Leu-97 to Glu-103. | | | | |
| 93 | HDPDA47 | 929193 | 103 | 103-906 | 716 | Arg-17 to Leu-34, | AR089: 11, AR061: 3 | | | |
| | | | | | | Asp-44 to Ser-51, | H0521: 7, H0581: 3, | | | |
| | | | | | | Asp-63 to Gly-72, | H0422: 3, H0650: 2, | | | |
| | | | | | | Pro-74 to Gly-83, | H0486: 2, S0002: 2, | | | |
| | | | | | | Thr-97 to Met-102. | L0770: 2, L0769: 2, | | | |
| | | | | | | | L0766: 2, L0518: 2, | | | |
| | | | | | | | L0783: 2, L0777: 2, | | | |
| | | | | | | | L0731: 2, H0445: 2, | | | |
| | | | | | | | H0556: 1, H0583: 1, | | | |
| | | | | | | | H0657: 1, H0656: 1, | | | |
| | | | | | | | H0341: 1, H0575: 1, | | | |
| | | | | | | | H0457: 1, H0179: 1, | | | |
| | | | | | | | H0271: 1, L0055: 1, | | | |
| | | | | | | | H0264: 1, H0488: 1, | | | |
| | | | | | | | S0426: 1, L0662: 1, | | | |
| | | | | | | | L0775: 1, L0655: 1, | | | |
| | | | | | | | L0665: 1, S0053: 1, | | | |
| | | | | | | | H0702: 1, H0701: 1, | | | |
| | | | | | | | H0659: 1, L0754: 1, | | | |
| | | | | | | | L0779: 1, L0759: 1 and | | | |
| | | | | | | | H0543: 1. | | | |
| 94 | HDPFF24 | 909232 | 104 | 104-460 | 717 | | AR089: 4, AR061: 1 | | | |
| | | | | | | | H0171: 5, S0026: 3, | | | |
| | | | | | | | S0400: 2, L0471: 2, | | | |
| | | | | | | | H0031: 2, H0553: 2, | | | |
| | | | | | | | H0547: 2, H0521: 2, | | | |
| | | | | | | | L0759: 2, H0423: 2, | | | |
| | | | | | | | H0170: 1, H0583: 1, | | | |
| | | | | | | | H0656: 1, S0001: 1, | | | |
| | | | | | | | S0358: 1, S0360: 1, | | | |
| | | | | | | | H0244: 1, H0349: 1, | | | |
| | | | | | | | H0590: 1, H0310: 1, | | | |
| | | | | | | | H0014: 1, H0039: 1, | | | |
| | | | | | | | S0366: 1, H0551: 1, | | | |
| | | | | | | | L0351: 1, H0509: 1, | | | |
| | | | | | | | S0150: 1, L0369: 1, | | | |
| | | | | | | | L0796: 1, L0773: 1, | | | |
| | | | | | | | L0662: 1, L0766: 1, | | | |
| | | | | | | | L0803: 1, L0635: 1, | | | |
| | | | | | | | L0540: 1, H0519: 1, | | | |
| | | | | | | | H0684: 1, H0660: 1, | | | |
| | | | | | | | H0666: 1, S0044: 1, | | | |
| | | | | | | | H0478: 1, H0479: 1, | | | |
| | | | | | | | H0626: 1, L0748: 1, | | | |
| | | | | | | | L0740: 1, L0777: 1, | | | |
| | | | | | | | L0752: 1, L0755: 1 and | | | |
| | | | | | | | H0543:1. | | | |
| 95 | HDPPO35 | 966248 | 105 | 72-1202 | 718 | Lys-7 to Gly-69, | AR089: 1, AR061: 0 | | | |
| | | | | | | Lys-82 to Lys-88, | H0521: 15, H0638: 5, | | | |
| | | | | | | Ser-94 to Asp-112, | H0580: 5, H0271: 5, | | | |
| | | | | | | Ala-126 to Asp-131, | H0641: 5, H0560: 4, | | | |
| | | | | | | Tyr-134 to Ser-140, | H0090: 3, H0591: 3, | | | |
| | | | | | | Ser-147 to Phe-156, | L0766: 3, H0542: 3, | | | |
| | | | | | | Asp-159 to Ser-165, | H0543: 3, H0586: 2, | | | |
| | | | | | | Thr-176 to Asp-186, | H0497: 2, H0581: 2, | | | |
| | | | | | | Glu-230 to Leu-250, | L0655: 2, H0518: 2, | | | |
| | | | | | | Glu-291 to Arg-298, | H0522: 2, L0754: 2, | | | |
| | | | | | | Gln-313 to Glu-320, | L0747: 2, H0657: 1, | | | |
| | | | | | | Asn-331 to Gly-343, | H0393: 1, H0431: 1, | | | |
| | | | | | | Ser-348 to Leu-363. | H0250: 1, H0635: 1, | | | |
| | | | | | | | L0021: 1, H0014: 1, | | | |
| | | | | | | | H0179: 1, H0416: 1, | | | |
| | | | | | | | H0488: 1, L0475: 1, | | | |
| | | | | | | | H0359: 1, H0625: 1, | | | |
| | | | | | | | S0426: 1, L0598: 1, | | | |
| | | | | | | | L0667: 1, L0803: 1, | | | |
| | | | | | | | L0804: 1, L0775: 1, | | | |
| | | | | | | | L0651: 1, L0659: 1, | | | |
| | | | | | | | L0792: 1, L0663: 1, | | | |
| | | | | | | | S0428: 1, H0672: 1, | | | |
| | | | | | | | H0555: 1, H0436: 1, | | | |
| | | | | | | | L0779: 1, H0445: 1 and | | | |
| | | | | | | | S0424: 1. | | | |
| 96 | HDPSR74 | 911396 | 106 | 212-583 | 719 | Leu-31 to Ser-39, | AR050: 48, AR054: | | | |
| | | | | | | Val-57 to Trp-63, | 42, AR051: 35, AR089: | | | |
| | | | | | | Pro-103 to Gln-111, | 3, AR061: 1 | | | |
| | | | | | | Leu-118 to Leu-124. | H0575: 2, H0580: 1, | | | |
| | | | | | | | S0002: 1, S0426: 1, | | | |
| | | | | | | | H0521: 1, H0436: 1 and | | | |
| | | | | | | | L0748: 1. | | | |
| 97 | HDTKQ14 | 886936 | 107 | 1-555 | 720 | Ser-60 to Thr-71, | AR054: 60, AR051: | | | |
| | | | | | | Thr-82 to Leu-94, | 0, AR050: 36, AR089: | | | |
| | | | | | | Gln-113 to Asp-123, | 5, AR061: 2 | | | |
| | | | | | | Val-125 to Tyr-133, | H0521: 4, H0486: 2, | | | |
| | | | | | | Leu-144 to Gly-149. | S0002: 2, L0770: 2, | | | |
| | | | | | | | L0769: 2, L0766: 2, | | | |
| | | | | | | | L0518: 2, L0783: 2, | | | |
| | | | | | | | L0777: 2, L0731: 2, | | | |
| | | | | | | | H0422: 2, H0556: 1, | | | |
| | | | | | | | H0583: 1, H0650: 1, | | | |
| | | | | | | | H0657: 1, H0179: 1, | | | |
| | | | | | | | L0055: 1, H0488: 1, | | | |
| | | | | | | | S0426: 1, L0662: 1, | | | |
| | | | | | | | L0775: 1, L0655: 1, | | | |
| | | | | | | | L0665: 1, S0053: 1, | | | |
| | | | | | | | H0659: 1, L0754: 1, | | | |
| | | | | | | | L0779: 1, L0759: 1 and | | | |
| | | | | | | | H0543: 1. | | | |
| 98 | HE6GF02 | 1150897 | 108 | 804-1 | 721 | Gln-13 to Ser-18, | AR061: 7, AR089: 4 | | | |
| | | | | | | Glu-32 to Gly-37, | H0100: 1 and H0521: | | | |
| | | | | | | Ala-44 to Trp-49, | 1. | | | |
| | | | | | | Glu-56 to Val-61, | | | | |
| | | | | | | Gln-68 to Lys-74, | | | | |
| | | | | | | Ala-83 to Glu-88, | | | | |
| | | | | | | Arg-111 to Gly-117, | | | | |
| | | | | | | Tyr-123 to His-143, | | | | |
| | | | | | | Ser-167 to Thr-202. | | | | |
| | | 911263 | 514 | 1-264 | 1127 | Gln-13 to Ser-18, | | | | |
| | | | | | | Glu-32 to Gly-37, | | | | |
| | | | | | | Ala-44 to Trp-49. | | | | |
| 99 | HE8PK12 | 909884 | 109 | 2-367 | 722 | Val-30 to Ser-37, | AR089: 6, AR061: 4 | | | |
| | | | | | | Gln-43 to Asp-62, | L0754: 6, L0777: 6, | | | |
| | | | | | | Pro-74 to Glu-79, | L0740: 5, L0731: 4, | | | |
| | | | | | | Thr-102 to Phe-109. | L0758: 4, L0759: 4, | | | |
| | | | | | | | S0001: 3, S0280: 3, | | | |
| | | | | | | | L0770: 3, L0764: 3, | | | |
| | | | | | | | L0747: 3, L0749: 3, | | | |
| | | | | | | | L0366: 3, S0412: 3, | | | |
| | | | | | | | S0007: 2, H0411: 2, | | | |
| | | | | | | | H0013: 2, L0471: 2, | | | |
| | | | | | | | T0004: 2, L0598: 2, | | | |
| | | | | | | | L0638: 2, L0662: 2, | | | |
| | | | | | | | L0783: 2, L0438: 2, | | | |
| | | | | | | | H0696: 2, L0744: 2, | | | |
| | | | | | | | L0748: 2, L0751: 2, | | | |
| | | | | | | | L0745: 2, L0779: 2, | | | |
| | | | | | | | L0752: 2, H0170: 1, | | | |
| | | | | | | | S0282: 1, H0662: 1, | | | |
| | | | | | | | H0574: 1, T0060: 1, | | | |
| | | | | | | | H0427: 1, H0590: 1, | | | |
| | | | | | | | S0010: 1, L0105: 1, | | | |
| | | | | | | | S0049: 1, H0194: 1, | | | |
| | | | | | | | H0373: 1, L0163: 1, | | | |
| | | | | | | | H0201: 1, H0031: 1, | | | |
| | | | | | | | H0553: 1, S0306: 1, | | | |
| | | | | | | | L0776: 1, L0659: 1, | | | |
| | | | | | | | L0526: 1, L0809: 1, | | | |
| | | | | | | | L0663: 1, H0144: 1, | | | |
| | | | | | | | H0547: 1, H0648: 1, | | | |
| | | | | | | | H0672: 1, L0743: 1, | | | |
| | | | | | | | L0780: 1, S0031: 1, | | | |
| | | | | | | | H0343: 1, L0604: 1 and | | | |
| | | | | | | | H0653: 1. | | | |
| 100 | HE9SE62 | 911476 | 110 | 1-564 | 723 | | AR061: 16, AR089: 6 | | | |
| | | | | | | | L0804: 1, S0052: 1, | | | |
| | | | | | | | H0144: 1 and H0659: 1. | | | |
| 101 | HEOPL36 | 1195682 | 111 | 86-487 | 724 | Gly-11 to Thr-16, | AR089: 18, AR061: 5 | | | |
| | | | | | | Ser-35 to Ser-56, | L0740: 11, L0439: 9, | | | |
| | | | | | | Thr-58 to Ser-73, | L0748: 8, H0616: 5, | | | |
| | | | | | | Tyr-85 to Asp-91, | L0666: 5, L0601: 5, | | | |
| | | | | | | Glu-100 to Glu-109. | S0444: 4, L0776: 4, | | | |
| | | | | | | | L0659: 4, L0744: 4, | | | |
| | | | | | | | L0747: 4, L0749: 4, | | | |
| | | | | | | | L0755: 4, H0457: 3, | | | |
| | | | | | | | L0774: 3, L0750: 3, | | | |
| | | | | | | | H0624: 2, T0002: 2, | | | |
| | | | | | | | S0116: 2, S0358: 2, | | | |
| | | | | | | | H0550: 2, T0040: 2, | | | |
| | | | | | | | H0013: 2, H0599: 2, | | | |
| | | | | | | | H0050: 2, H0673: 2, | | | |
| | | | | | | | H0038: 2, H0040: 2, | | | |
| | | | | | | | H0494: 2, L0770: 2, | | | |
| | | | | | | | L0662: 2, L0364: 2, | | | |
| | | | | | | | L0375: 2, L0809: 2, | | | |
| | | | | | | | L0438: 2, H0547: 2, | | | |
| | | | | | | | L0754: 2, L0756: 2, | | | |
| | | | | | | | L0752: 2, L0731: 2, | | | |
| | | | | | | | L0758: 2, L0485: 2, | | | |
| | | | | | | | S0040: 1, H0583: 1, | | | |
| | | | | | | | H0650: 1, H0657: 1, | | | |
| | | | | | | | H0341: 1, H0663: 1, | | | |
| | | | | | | | H0580: 1, H0619: 1, | | | |
| | | | | | | | L0717: 1, H0574: 1, | | | |
| | | | | | | | H0052: 1, H0263: 1, | | | |
| | | | | | | | H0009: 1, H0172: 1, | | | |
| | | | | | | | H0024: 1, T0010: 1, | | | |
| | | | | | | | H0510: 1, H0644: 1, | | | |
| | | | | | | | S0036: 1, H0551: 1, | | | |
| | | | | | | | H0264: 1, H0488: 1, | | | |
| | | | | | | | H0056: 1, H0100: 1, | | | |
| | | | | | | | L0564: 1, T0041: 1, | | | |
| | | | | | | | H0652: 1, S0344: 1, | | | |
| | | | | | | | S0002: 1, L0763: 1, | | | |
| | | | | | | | L0638: 1, L0761: 1, | | | |
| | | | | | | | L0372: 1, L0643: 1, | | | |
| | | | | | | | L0764: 1, L0768: 1, | | | |
| | | | | | | | L0381: 1, L0775: 1, | | | |
| | | | | | | | L0526: 1, L0782: 1, | | | |
| | | | | | | | L0663: 1, L0665: 1, | | | |
| | | | | | | | H0703: 1, H0520: 1, | | | |
| | | | | | | | H0435: 1, H0521: 1, | | | |
| | | | | | | | S0044: 1, L0751: 1, | | | |
| | | | | | | | L0757: 1, L0759: 1, | | | |
| | | | | | | | H0445: 1, L0584: 1, | | | |
| | | | | | | | L0608: 1 and H0506: 1. | | | |
| | | 968826 | 515 | 85-486 | 1128 | Gly-11 to Thr-16, | | | | |
| | | | | | | Ser-35 to Ser-56, | | | | |
| | | | | | | Thr-58 to Ser-73, | | | | |
| | | | | | | Tyr-85 to Asp-91, | | | | |
| | | | | | | Glu-100 to Glu-109. | | | | |
| 102 | HFBDJ13 | 911264 | 112 | 3-410 | 725 | Ser-6 to Trp-24. | S0007: 2, L0794: 2, | | | |
| | | | | | | | S0434: 2, S0354: 1, | | | |
| | | | | | | | N0006: 1, H0622: 1 | | | |
| | | | | | | | and | | | |
| H0478: 1. | | | | | | | | | | |
| 103 | HFTDF15 | 657020 | 113 | 129-254 | 726 | | AR089: 3, AR061: 2 | | | |
| | | | | | | | H0563: 1 and H0123: | | | |
| | | | | | | | 1. | | | |
| 104 | HHEQV39 | 932851 | 114 | 1-711 | 727 | Leu-7 to Phe-27, | AR089: 3, AR061: 1 | | | |
| | | | | | | Gln-50 to Gln-57. | T0042: 1, H0543: 1 | | | |
| | | | | | | | and H0422: 1. | | | |
| 105 | HHFCK09 | 965304 | 115 | 2692-389 | 728 | Tyr-47 to Glu-58, | AR089: 3, AR061: 2 | | | |
| | | | | | | Lys-70 to Gly-77, | L0666: 8, L0439: 6, | | | |
| | | | | | | Pro-121 to Leu-126, | H0253: 5, H0046: 4, | | | |
| | | | | | | Leu-150 to Leu-158, | L0769: 4, H0295: 3, | | | |
| | | | | | | Asn-166 to Glu-171, | H0255: 3, L0747: 3, | | | |
| | | | | | | Arg-417 to Ser-425, | L0756: 3, L0779: 3, | | | |
| | | | | | | Phe-465 to Cys-473, | H0657: 2, H0618: 2, | | | |
| | | | | | | Ser-485 to Asn-492, | H0318: 2, H0622: 2, | | | |
| | | | | | | Ser-497 to Ala-504, | H0068: 2, L0667: 2, | | | |
| | | | | | | Gln-531 to Trp-537, | L0772: 2, L0776: 2, | | | |
| | | | | | | Asp-557 to Glu-562. | L0663: 2, H0520: 2, | | | |
| | | | | | | | H0593: 2, H0670: 2, | | | |
| | | | | | | | H0521: 2, L0750: 2, | | | |
| | | | | | | | L0759: 2, L0593: 2, | | | |
| | | | | | | | L0601: 2, S0116: 1, | | | |
| | | | | | | | H0341: 1, S0212: 1, | | | |
| | | | | | | | H0306: 1, H0402: 1, | | | |
| | | | | | | | L0617: 1, S0358: 1, | | | |
| | | | | | | | H0609: 1, H0592: 1, | | | |
| | | | | | | | H0333: 1, T0040: 1, | | | |
| | | | | | | | H0013: 1, H0635: 1, | | | |
| | | | | | | | H0575: 1, H0036: 1, | | | |
| | | | | | | | H0581: 1, H0123: 1, | | | |
| | | | | | | | H0050: 1, H0012: 1, | | | |
| | | | | | | | H0071: 1, T0010: 1, | | | |
| | | | | | | | H0687: 1, H0290: 1, | | | |
| | | | | | | | H0617: 1, H0606: 1, | | | |
| | | | | | | | H0038: 1, H0487: 1, | | | |
| | | | | | | | H0494: 1, H0334: 1, | | | |
| | | | | | | | S0150: 1, H0647: 1, | | | |
| | | | | | | | S0142: 1, L0640: 1, | | | |
| | | | | | | | L0639: 1, L0637: 1, | | | |
| | | | | | | | L0641: 1, L0768: 1, | | | |
| | | | | | | | L0649: 1, L0514: 1, | | | |
| | | | | | | | L0659: 1, L0783: 1, | | | |
| | | | | | | | L0788: 1, L0664: 1, | | | |
| | | | | | | | L0665: 1, L0438: 1, | | | |
| | | | | | | | H0547: 1, H0435: 1, | | | |
| | | | | | | | H0522: 1, H0696: 1, | | | |
| | | | | | | | S0404: 1, H0478: 1, | | | |
| | | | | | | | L0742: 1, L0740: 1, | | | |
| | | | | | | | L0749: 1, L0758: 1, | | | |
| | | | | | | | S0434: 1, S0194: 1, | | | |
| | | | | | | | H0422: 1 and H0506: 1. | | | |
| 106 | HISDS62 | 935932 | 116 | 1-519 | 729 | Ser-11 to Trp-16, | AR089: 2, AR061: 1 | | | |
| | | | | | | Ile-20 to Trp-26, | T0049: 1, S0278: 1, | | | |
| | | | | | | Asn-37 to Ser-58, | H0031: 1 and H0539: 1. | | | |
| | | | | | | Leu-67 to Gln-72, | | | | |
| | | | | | | Lys-101 to Asp-108, | | | | |
| | | | | | | Asp-135 to Tyr-140. | | | | |
| 107 | HLQDT35 | 839777 | 117 | 222-494 | 730 | | AR089: 3, AR061: 3 | | | |
| | | | | | | | S0358: 8, L0766: 7, | | | |
| | | | | | | | L0777: 7, L0731: 7, | | | |
| | | | | | | | L0659: 4, L0748: 4, | | | |
| | | | | | | | L0751: 4, L0783: 3, | | | |
| | | | | | | | L0663: 3, S0418: 2, | | | |
| | | | | | | | S0360: 2, H0486: 2, | | | |
| | | | | | | | S0010: 2, S0250: 2, | | | |
| | | | | | | | S0422: 2, L0763: 2, | | | |
| | | | | | | | L0803: 2, L0775: 2, | | | |
| | | | | | | | L0789: 2, H0520: 2, | | | |
| | | | | | | | L0756: 2, L0752: 2, | | | |
| | | | | | | | L0656: 1, S0376: 1, | | | |
| | | | | | | | L0208: 1, H0574: 1, | | | |
| | | | | | | | H0632: 1, S0414: 1, | | | |
| | | | | | | | H0581: 1, H0052: 1, | | | |
| | | | | | | | H0024: 1, H0014: 1, | | | |
| | | | | | | | H0355: 1, H0688: 1, | | | |
| | | | | | | | H0090: 1, H0623: 1, | | | |
| | | | | | | | H0509: 1, H0529: 1, | | | |
| | | | | | | | L0520: 1, L0761: 1, | | | |
| | | | | | | | L0650: 1, L0809: 1, | | | |
| | | | | | | | L0666: 1, L0665: 1, | | | |
| | | | | | | | S0126: 1, H0684: 1, | | | |
| | | | | | | | H0648: 1, S0390: 1, | | | |
| | | | | | | | L0740: 1, L0745: 1, | | | |
| | | | | | | | L0749: 1, L0750: 1, | | | |
| | | | | | | | L0755: 1, L0591: 1, | | | |
| | | | | | | | L0362: 1 and S0242: 1. | | | |
| 108 | HLWFN63 | 908437 | 118 | 404-2566 | 731 | Thr-7 to Phe-29, | AR051: 11, AR050: 9, | | | |
| | | | | | | Thr-37 to Lys-52, | AR054: 5, AR089: 0, | | | |
| | | | | | | Glu-89 to Val-112. | AR061: 0 | | | |
| | | | | | | | H0031: 5, S0222: 4, | | | |
| | | | | | | | S0028: 4, H0662: 3, | | | |
| | | | | | | | L0748: 3, S0260: 3, | | | |
| | | | | | | | S0276: 3, S0282: 2, | | | |
| | | | | | | | S0360: 2, S0046: 2, | | | |
| | | | | | | | H0575: 2, H0196: 2, | | | |
| | | | | | | | S0036: 2, H0268: 2, | | | |
| | | | | | | | L0662: 2, S0027: 2, | | | |
| | | | | | | | L0754: 2, L0747: 2, | | | |
| | | | | | | | L0749: 2, L0756: 2, | | | |
| | | | | | | | L0777: 2, L0604: 2, | | | |
| | | | | | | | L0595: 2, H0171: 1, | | | |
| | | | | | | | S0030: 1, S0029: 1, | | | |
| | | | | | | | S0358: 1, H0619: 1, | | | |
| | | | | | | | S0300: 1, L0717: 1, | | | |
| | | | | | | | H0550: 1, H0441: 1, | | | |
| | | | | | | | H0431: 1, H0392: 1, | | | |
| | | | | | | | T0060: 1, S0010: 1, | | | |
| | | | | | | | H0052: 1, H0309: 1, | | | |
| | | | | | | | S6028: 1, S0250: 1, | | | |
| | | | | | | | H0252: 1, H0553: 1, | | | |
| | | | | | | | S0364: 1, S0366: 1, | | | |
| | | | | | | | H0433: 1, H0269: 1, | | | |
| | | | | | | | H0412: 1, L0372: 1, | | | |
| | | | | | | | L0804: 1, L0789: 1, | | | |
| | | | | | | | L0666: 1, L0663: 1, | | | |
| | | | | | | | S0126: 1, S0044: 1, | | | |
| | | | | | | | H0345: 1, S0390: 1, | | | |
| | | | | | | | S0037: 1, S3014: 1, | | | |
| | | | | | | | L0743: 1, L0439: 1, | | | |
| | | | | | | | L0750: 1, L0779: 1, | | | |
| | | | | | | | L0599: 1, L0593: 1, | | | |
| | | | | | | | L0366: 1 and H0653: 1. | | | |
| 109 | HMEFT66 | 856149 | 119 | 2-349 | 732 | | AR061: 1, AR089: 1 | | | |
| | | | | | | | H0175: 1, H0266: 1, | | | |
| | | | | | | | H0292: 1, H0628: 1 and | | | |
| | | | | | | | L0779: 1. | | | |
| 110 | HMSCD15 | 918133 | 120 | 237-635 | 733 | | AR089: 1, AR061: 1 | | | |
| | | | | | | | S0002: 2 and L0766: 1. | | | |
| 111 | HMSHO64 | 746582 | 121 | 1-411 | 734 | Ser-11 to Ser-21, | AR089: 2, AR061: 2 | | | |
| | | | | | | Ser-84 to Ala-89, | S0002: 2 | | | |
| | | | | | | Pro-98 to Arg-107. | | | | |
| 112 | HMTAW83 | 911385 | 122 | 1-363 | 735 | Ile-26 to Trp-33, | AR089: 0, AR061: 0 | | | |
| | | | | | | Glu-52 to Leu-71. | H0583: 1, H0644: 1, | | | |
| | | | | | | | L0766:1 and H0518: 1. | | | |
| 113 | HMVAM09 | 963814 | 123 | 2-802 | 736 | | AR089: 4, AR061: 1 | | | |
| | | | | | | | L0731: 7, L0517: 5, | | | |
| | | | | | | | S0212: 3, L0775: 3, | | | |
| | | | | | | | L0740: 3, H0266: 2, | | | |
| | | | | | | | L0809: 2, H0696: 2, | | | |
| | | | | | | | L0748: 2, S0132: 1, | | | |
| | | | | | | | H0574: 1, H0013: 1, | | | |
| | | | | | | | H0544: 1, H0023: 1, | | | |
| | | | | | | | H0071: 1, H0286: 1, | | | |
| | | | | | | | H0100: 1, H0494: 1, | | | |
| | | | | | | | S0370: 1, L0770: 1, | | | |
| | | | | | | | L0646: 1, L0764: 1, | | | |
| | | | | | | | L0771: 1, L0363: 1, | | | |
| | | | | | | | L0774: 1, L0659: 1, | | | |
| | | | | | | | L0789: 1, L0666: 1, | | | |
| | | | | | | | S0126: 1, H0522: 1, | | | |
| | | | | | | | L0754: 1, L0747: 1 and | | | |
| | | | | | | | L0755: 1. | | | |
| 114 | HNSAA28 | 946988 | 124 | 85-1557 | 737 | Glu-9 to Ser-20, | AR050: 8, AR054: 6, | | | |
| | | | | | | IIe-23 to Gly-29, | AR051: 3, AR089: 1, | | | |
| | | | | | | Pro-50 to Cys-66, | AR061: 1 | | | |
| | | | | | | Pro-74 to Glu-79, | H0036: 2, L0766: 2, | | | |
| | | | | | | Glu-93 to Trp-98, | H0686: 1, H0622: 1, | | | |
| | | | | | | Thr-121 to Ser-133, | H0625: 1, L0791: 1, | | | |
| | | | | | | Leu-180 to Lys-196, | L0779: 1 and S0434: 1. | | | |
| | | | | | | Thr-213 to Glu-225, | | | | |
| | | | | | | Glu-234 to Glu-240, | | | | |
| | | | | | | Arg-263 to Glu-270, | | | | |
| | | | | | | Glu-283 to Ala-298, | | | | |
| | | | | | | Lys-318 to Ala-336, | | | | |
| | | | | | | Val-340 to Ala-351, | | | | |
| | | | | | | Val-361 to Pro-372, | | | | |
| | | | | | | Asn-445 to Pro-468, | | | | |
| | | | | | | Pro-475 to Lys-491. | | | | |
| | | 972348 | 516 | 3-452 | 1129 | Thr-1 to Ala-10, | | | | |
| | | | | | | Val-20 to Pro-31, | | | | |
| | | | | | | Asn-104 to Thr-124. | | | | |
| 115 | HOGEQ43 | 1226207 | 125 | 494-2083 | 738 | Lys-1 to Thr-34, | AR089: 1, AR061: 0 | | | |
| | | | | | | Phe-80 to Gly-85, | H0457: 8, L0766: 7, | | | |
| | | | | | | Tyr-91 to Ser-105, | L0599: 6, H0677: 6, | | | |
| | | | | | | Thr-122 to Ala-133, | L0438: 5, L0779: 5, | | | |
| | | | | | | Ser-151 to Ala-157, | H0012: 3, L0809: 3, | | | |
| | | | | | | Glu-208 to Trp-213, | H0656: 2, H0620: 2, | | | |
| | | | | | | His-219 to Trp-224, | L0771: 2, H0435: 2, | | | |
| | | | | | | Glu-237 to Glu-244, | H0436: 2, L0748: 2, | | | |
| | | | | | | Asn-251 to Ser-256, | L0439: 2, L0751: 2, | | | |
| | | | | | | Gln-291 to Trp-296, | L0749: 2, S0134: 1, | | | |
| | | | | | | Asn-311 to Phe-321, | H0645: 1, H0587: 1, | | | |
| | | | | | | Ser-327 to Glu-335, | H0635: 1, H0581: 1, | | | |
| | | | | | | Lys-364 to Trp-369, | H0546: 1, H0477: 1, | | | |
| | | | | | | Ala-376 to Gly-384, | H0560: 1, H0641: 1, | | | |
| | | | | | | Asn-437 to Trp-444, | S0422: 1, H0529: 1, | | | |
| | | | | | | Met-462 to Trp-472, | L0521: 1, L0662: 1, | | | |
| | | | | | | Gln-483 to Gly-491, | L0794: 1, L0774: 1, | | | |
| | | | | | | Thr-499 to Trp-504, | L0775: 1, L0606: 1, | | | |
| | | | | | | Arg-512 to Ala-517. | L0659: 1, L0647: 1, | | | |
| | | | | | | | L0789: 1, L0791: 1, | | | |
| | | | | | | | L0792: 1, L0666: 1, | | | |
| | | | | | | | L0663: 1, L0665: 1, | | | |
| | | | | | | | H0702: 1, H0547: 1, | | | |
| | | | | | | | H0576: 1, S0028: 1, | | | |
| | | | | | | | L0756: 1, L0777: 1, | | | |
| | | | | | | | L0755: 1, L0758: 1, | | | |
| | | | | | | | H0543: 1 and H0506: 1. | | | |
| | | 935465 | 517 | 1-150 | 1130 | Glu-1 to Thr-13. | | | | |
| 116 | HOUDHI9 | 1150918 | 126 | 506-3 | 739 | Pro-8 to Ser-13. | AR089: 1, AR061: 0 | | | |
| | | | | | | | S0040: 1, H0250: 1, | | | |
| | | | | | | | T0048: 1, L0761: 1, | | | |
| | | | | | | | L0764: 1, L0783: 1, | | | |
| | | | | | | | L0809: 1, L0789: 1 and | | | |
| | | | | | | | L0757: 1. | | | |
| | | 908588 | 518 | 52-573 | 1131 | Thr-8 to Gln-19, | | | | |
| | | | | | | Lys-26 to Glu-33, | | | | |
| | | | | | | Lys-41 to Ile-50. | | | | |
| 117 | HOUFT36 | 911293 | 127 | 160-846 | 740 | Lys-27 to Ile-43. | AR089: 2, AR061: 1 | | | |
| | | | | | | | L0794: 6, L0598: 2, | | | |
| | | | | | | | L0803: 2, L0748: 2, | | | |
| | | | | | | | S0040: 1, S0046: 1, | | | |
| | | | | | | | H0431: 1, H0318: 1, | | | |
| | | | | | | | L0766: 1, L0606: 1, | | | |
| | | | | | | | L0749: 1, L0758: 1 and | | | |
| | | | | | | | S0192: 1. | | | |
| 118 | HPMFL08 | 959569 | 128 | 191-346 | 741 | Met-43 to Trp-52. | AR089: 1, AR061: 1 | | | |
| | | | | | | | H0031: 2 | | | |
| 119 | HRSMD49 | 723025 | 129 | 190-456 | 742 | Gln-36 to IIe-46, | AR089: 3, AR061: 2 | | | |
| | | | | | | Ser-55 to Phe-65, | H0394: 1 and L0589: | | | |
| | | | | | | Ser-67 to Lys-78. | 1. | | | |
| 120 | HSDII69 | 917180 | 130 | 202-540 | 743 | His-13 to Gly-21, | AR061: 6, AR089: 5 | | | |
| | | | | | | Tyr-61 to Asp-66, | H0328: 4, H0031: 3, | | | |
| | | | | | | Ala-105 to Thr-110. | L0519: 3, L0748: 2, | | | |
| | | | | | | | L0777: 2, L0731: 2, | | | |
| | | | | | | | S0260: 2, H0624: 1, | | | |
| | | | | | | | S6024: 1, H0650: 1, | | | |
| | | | | | | | S0116: 1, H0254: 1, | | | |
| | | | | | | | S0007: 1, H0393: 1, | | | |
| | | | | | | | H0441: 1, H0438: 1, | | | |
| | | | | | | | H0574: 1, H0156: 1, | | | |
| | | | | | | | H0599: 1, S0051: 1, | | | |
| | | | | | | | H0615: 1, H0039: 1, | | | |
| | | | | | | | L0564: 1, L0763: 1, | | | |
| | | | | | | | L0766: 1, L0774: 1, | | | |
| | | | | | | | L0776: 1, L0659: 1, | | | |
| | | | | | | | L0518: 1, L0792: 1, | | | |
| | | | | | | | L0666: 1, L0663: 1, | | | |
| | | | | | | | S0242: 1 and H0423: 1. | | | |
| 121 | HSDSB06 | 949151 | 131 | 3-863 | 744 | Ile-25 to Asn-36, | AR061: 4, AR089: 3 | | | |
| | | | | | | Glu-54 to Val-63, | H0590: 7, L0754: 5, | | | |
| | | | | | | Gly-81 to Glu-86, | H0156: 3, L0731: 3, | | | |
| | | | | | | Gly-108 to Thr-114, | L0600: 3, S0360: 2, | | | |
| | | | | | | Val-125 to Ser-131. | H0339: 2, S0472: 2, | | | |
| | | | | | | | L0803: 2, L0751: 2, | | | |
| | | | | | | | L0779: 2, L0759: 2, | | | |
| | | | | | | | S0031: 2, L0596: 2, | | | |
| | | | | | | | S0212: 1, H0411: 1, | | | |
| | | | | | | | S0222: 1, H0409: 1, | | | |
| | | | | | | | H0601: 1, H0333: 1, | | | |
| | | | | | | | H0632: 1, H0427: 1, | | | |
| | | | | | | | L0021: 1, H0037: 1, | | | |
| | | | | | | | H0596: 1, H0024: 1, | | | |
| | | | | | | | H0239: 1, S6028: 1, | | | |
| | | | | | | | H0266: 1, H0687: 1, | | | |
| | | | | | | | H0328: 1, H0644: 1, | | | |
| | | | | | | | H0674: 1, H0598: 1, | | | |
| | | | | | | | T0067: 1, H0509: 1, | | | |
| | | | | | | | L0763: 1, L0772: 1, | | | |
| | | | | | | | L0764: 1, L0771: 1, | | | |
| | | | | | | | L0773: 1, L0650: 1, | | | |
| | | | | | | | L0806: 1, L0659: 1, | | | |
| | | | | | | | L0547: 1, L0809: 1, | | | |
| | | | | | | | L0666: 1, L0663: 1, | | | |
| | | | | | | | L0665: 1, S0328: 1, | | | |
| | | | | | | | S0380: 1, S0390: 1, | | | |
| | | | | | | | S0032: 1, L0744: 1, | | | |
| | | | | | | | L0745: 1, L0746: 1, | | | |
| | | | | | | | L0747: 1, L0756: 1, | | | |
| | | | | | | | L0777: 1, L0758: 1, | | | |
| | | | | | | | L0588: 1, S0276: 1, | | | |
| | | | | | | | S0196: 1, S0412: 1 and | | | |
| | | | | | | | H0506: 1. | | | |
| 122 | HSFAM09 | 1150965 | 132 | 2-325 | 745 | Leu-2 to Gly-8. | AR061: 5, AR089: 2 | | | |
| | | | | | | | H0154: 2 | | | |
| | | 573345 | 519 | 147-332 | 1132 | Arg-1 to Ser-8, | | | | |
| | | | | | | Lys-42 to Lys-48. | | | | |
| 123 | HSSAX53 | 507509 | 133 | 209-361 | 746 | | H0135: 1 and H0063: | | | |
| | | | | | | | 1. | | | |
| 124 | HSVAW49 | 1150960 | 134 | 220-486 | 747 | Pro-19 to Thr-24, | AR061: 9, AR089: 7 | | | |
| | | | | | | Thr-78 to Lys-89. | H0309: 1 | | | |
| | | 689674 | 520 | 44-208 | 1133 | Glu-21 to Glu-27. | | | | |
| 125 | HTEAG49 | 954614 | 135 | 510-208 | 748 | | AR089: 1, AR061: 0 | | | |
| | | | | | | | L0759: 4, L0770: 2, | | | |
| | | | | | | | S0040: 1, S0318: 1, | | | |
| | | | | | | | S0334: 1, S0316: 1, | | | |
| | | | | | | | S0340: 1, H0038: 1, | | | |
| | | | | | | | L0598: 1, L0800: 1 and | | | |
| | | | | | | | S0276: 1. | | | |
| 126 | HTLBH67 | 751985 | 136 | 1-282 | 749 | | AR061: 2, AR089: 1 | | | |
| | | | | | | | L0752: 3, L0747: 2, | | | |
| | | | | | | | H0294: 1, H0253: 1, | | | |
| | | | | | | | H0046: 1, H0040: 1, | | | |
| | | | | | | | H0063: 1, H0494: 1, | | | |
| | | | | | | | S0352: 1, L0769: 1, | | | |
| | | | | | | | L0766: 1, L0804: 1, | | | |
| | | | | | | | L0805: 1, L0791: 1, | | | |
| | | | | | | | H0521: 1, L0779: 1, | | | |
| | | | | | | | L0780: 1, L0731: 1 and | | | |
| | | | | | | | L0758: 1. | | | |
| 127 | HTLJC71 | 922923 | 137 | 3-1355 | 750 | His-1 to Phe-9, | AR061: 7, AR089: 5 | | | |
| | | | | | | Cys-13 to Thr-18, | H0618: 12, H0253: 8, | | | |
| | | | | | | Pro-35 to Gly-48, | H0038: 6, L0758: 6, | | | |
| | | | | | | Glu-61 to Pro-68, | L0779: 5, H0616: 3, | | | |
| | | | | | | Lys-105 to Ala-136, | T0041: 1, L0776: 1, | | | |
| | | | | | | Thr-144 to Gln-154, | S0274: 1 and H0543: 1. | | | |
| | | | | | | Leu-163 to Gly-171, | | | | |
| | | | | | | Thr-205 to Gln-222, | | | | |
| | | | | | | Pro-251 to Gln-257. | | | | |
| 128 | HTPAD46 | 503313 | 138 | 103-309 | 751 | His-50 to Leu-69. | AR061: 0, AR089: 0 | | | |
| | | | | | | | L0794: 4, H0039: 2, | | | |
| | | | | | | | S0358: 1, H0013: 1, | | | |
| | | | | | | | H0575: 1, L0770: 1, | | | |
| | | | | | | | L0769: 1 and L0749: 1. | | | |
| 129 | HTTKP07 | 911390 | 139 | 2-337 | 752 | Thr-15 to Asp-25, | AR089: 1, AR061: 1 | | | |
| | | | | | | Glu-69 to Leu-89. | H0634: 2 | | | |
| 130 | HUCOW17 | 933357 | 140 | 155-856 | 753 | Gln-27 to Trp-45. | AR089: 4, AR061: 2 | | | |
| | | | | | | | L0439: 5, S0002: 3, | | | |
| | | | | | | | L0604: 3, H0619: 2, | | | |
| | | | | | | | H0024: 2, H0625: 2, | | | |
| | | | | | | | L0768: 2, L0757: 2, | | | |
| | | | | | | | H0638: 1, S0420: 1, | | | |
| | | | | | | | S0360: 1, H0586: 1, | | | |
| | | | | | | | L0163: 1, S0214: 1, | | | |
| | | | | | | | L0143: 1, H0264: 1, | | | |
| | | | | | | | L0769: 1, L0764: 1, | | | |
| | | | | | | | L0774: 1, L0651: 1, | | | |
| | | | | | | | L0659: 1, L0542: 1, | | | |
| | | | | | | | L0789: 1, H0539: 1, | | | |
| | | | | | | | H0521: 1, S0044: 1, | | | |
| | | | | | | | L0777: 1, L0758: 1, | | | |
| | | | | | | | L0599: 1 and H0422: 1. | | | |
| 131 | HWHGF52 | 726102 | 141 | 1-453 | 754 | Gln-1 to Lys-8, | AR089: 1,AR061: 0 | | | |
| | | | | | | | Gly-10 to Trp-17, | L0776: 5,L0764: 4, | | |
| | | | | | | | Val-28 to Gly-43, | L0743: 4,L0740: 3, | | |
| | | | | | | | Thr-54 to Glu-63. | L0750: 3,L0777: 3, | | |
| | | | | | | | L0731: 3, S0001: 2, | | | |
| | | | | | | | H0438: 2, H0052: 2, | | | |
| | | | | | | | H0194: 2, H0201: 2, | | | |
| | | | | | | | L0526: 2, H0144: 2, | | | |
| | | | | | | | L0742: 2, H0662: 1, | | | |
| | | | | | | | H0619: 1, H0261: 1, | | | |
| | | | | | | | H0392: 1, H0455: 1, | | | |
| | | | | | | | H0586: 1, H0587: 1, | | | |
| | | | | | | | H0574: 1, H0486: 1, | | | |
| | | | | | | | H0013: 1, H0427: 1, | | | |
| | | | | | | | S0010: 1, S0346: 1, | | | |
| | | | | | | | T0110: 1, H0009: 1, | | | |
| | | | | | | | L0157: 1, H0320: 1, | | | |
| | | | | | | | H0051: 1, T0006: 1, | | | |
| | | | | | | | H0604: 1, H0163: 1, | | | |
| | | | | | | | H0646: 1, L0763: 1, | | | |
| | | | | | | | L0638: 1, L0630: 1, | | | |
| | | | | | | | L0646: 1, L0773: 1, | | | |
| | | | | | | | L0651: 1, L0523: 1, | | | |
| | | | | | | | L0805: 1, L0666: 1, | | | |
| | | | | | | | L0663: 1, L0664: 1, | | | |
| | | | | | | | H0547: 1, H0660: 1, | | | |
| | | | | | | | S0404: 1, L0744: 1, | | | |
| | | | | | | | L0439: 1, L0752: 1, | | | |
| | | | | | | | S0434: 1 and L0595: 1. | | | |
| 132 | HWHHB69 | 1212612 | 142 | 2-2176 | 755 | Gly-1 to Ser-7, | AR089: 1, AR061: 1 | | | |
| | | | | | | Ala-70 to Tyr-77, | L0803: 3, S0354: 2, | | | |
| | | | | | | Arg-130 to Ser-140. | H0052: 2, H0617: 2, | | | |
| | | | | | | | L0770: 2, L0646: 2, | | | |
| | | | | | | | S0028: 2, L0753: 2, | | | |
| | | | | | | | H0445: 2, H0556: 1, | | | |
| | | | | | | | S6024: 1, H0657: 1, | | | |
| | | | | | | | S0418: 1, S0420: 1, | | | |
| | | | | | | | H0351: 1, H0441: 1, | | | |
| | | | | | | | H0586: 1, H0013: 1, | | | |
| | | | | | | | S0280: 1, H0156: 1, | | | |
| | | | | | | | L0021: 1, H0122: 1, | | | |
| | | | | | | | S0010: 1, H0571: 1, | | | |
| | | | | | | | L0163: 1, H0135: 1, | | | |
| | | | | | | | H0412: 1, H0100: 1, | | | |
| | | | | | | | L0351: 1, L0769: 1, | | | |
| | | | | | | | L0639: 1, L0764: 1, | | | |
| | | | | | | | L0649: 1, L0659: 1, | | | |
| | | | | | | | L0809: 1, L0530: 1, | | | |
| | | | | | | | H0520: 1, H0547: 1, | | | |
| | | | | | | | H0519: 1, H0690: 1, | | | |
| | | | | | | | H0539: 1, S0136: 1, | | | |
| | | | | | | | H0696: 1, L0748: 1, | | | |
| | | | | | | | L0747: 1, L0756: 1, | | | |
| | | | | | | | L0779: 1, L0757: 1, | | | |
| | | | | | | | S0434: 1, S0436: 1, | | | |
| | | | | | | | S0011: 1 and H0136: 1. | | | |
| | | 690442 | 521 | 1-261 | 1134 | Gly-1 to Ser-7. | | | | |
| 133 | HWLFH94 | 1151387 | 143 | 695-333 | 756 | | AR089: 5, AR061: 2 | | | |
| | | | | | | | S0358: 5, L0596: 3, | | | |
| | | | | | | | L0771: 2, L0758: 2, | | | |
| | | | | | | | S0354: 1, S0376: 1, | | | |
| | | | | | | | T0109: 1, H0036: 1, | | | |
| | | | | | | | H0590: 1, L0040: 1, | | | |
| | | | | | | | H0038: 1, H0616: 1, | | | |
| | | | | | | | L0646: 1, L0764: 1, | | | |
| | | | | | | | L0768: 1, L0775: 1, | | | |
| | | | | | | | L0659: 1, and S0404: 1. | | | |
| | | 909682 | 522 | 134-535 | 1135 | Ser-25 to Ala-52, | | | | |
| | | | | | | Phe-64 to Glu-71. | | | | |
| 134 | HWMBM13 | 909683 | 144 | 3-539 | 757 | Pro-11 to Ala-35, | AR089: 2, AR061: 2 | | | |
| | | | | | | Phe-47 to Glu-54, | S0358: 6, L0794: 4, | | | |
| | | | | | | Glu-78 to Gly-83, | L0758: 4, S0354: 3, | | | |
| | | | | | | Gln-94 to Ser-106, | L0779: 3, L0596: 3, | | | |
| | | | | | | Ser-114 to Val-120. | S0376: 2, H0036: 2, | | | |
| | | | | | | | H0620: 2, H0063: 2, | | | |
| | | | | | | | L0771: 2, L0803: 2, | | | |
| | | | | | | | L0654: 2, L0659: 2, | | | |
| | | | | | | | L0109: 1, H0013: 1, | | | |
| | | | | | | | H0590: 1, H0052: 1, | | | |
| | | | | | | | H0596: 1, T0110: 1, | | | |
| | | | | | | | L0040: 1, H0090: 1, | | | |
| | | | | | | | H0038: 1, H0040: 1, | | | |
| | | | | | | | H0616: 1, H0429: 1, | | | |
| | | | | | | | H0561: 1, L0646: 1, | | | |
| | | | | | | | L0764: 1, L0768: 1, | | | |
| | | | | | | | L0766: 1, L0775: 1, | | | |
| | | | | | | | L0790: 1, L0792: 1, | | | |
| | | | | | | | S0404: 1, S0390: 1, | | | |
| | | | | | | | L0777: 1, L0755: 1, | | | |
| | | | | | | | L0592: 1 and S0458: 1. | | | |
| 135 | HWWDN34 | 911357 | 145 | 2-1000 | 758 | Ser-11 to Leu-17, | AR089: 1, AR061: 1 | | | |
| | | | | | | Pro-20 to Val-26, | S0354: 16, H0457: 7, | | | |
| | | | | | | Ser-87 to Lys-95, | L0758: 3, H0555: 2, | | | |
| | | | | | | Thr-109 to Lys-116, | H0170: 1, H0657: 1, | | | |
| | | | | | | Pro-164 to Gln-170, | H0255: 1, H0662: 1, | | | |
| | | | | | | Glu-222 to Ser-227, | S0360: 1, H0036: 1, | | | |
| | | | | | | Ser-292 to Gln-303, | H0150: 1, H0051: 1, | | | |
| | | | | | | Asp-315 to Gly-324, | H0553: 1, L0800: 1, | | | |
| | | | | | | Gly-326 to Ala-333. | L0644: 1, L0771: 1, | | | |
| | | | | | | | L0803: 1, L0787: 1, | | | |
| | | | | | | | L0663: 1, H0144: 1, | | | |
| | | | | | | | S0374: 1, H0670: 1, | | | |
| | | | | | | | H0522: 1, L0749: 1, | | | |
| | | | | | | | S0452: 1 and H0506: 1. | | | |
| 136 | HCEML27 | 997051 | 146 | 750-61 | 759 | Pro-93 to Asp-102, | AR061: 1, AR089: 1 | | | |
| | | | | | | Pro-112 to Ala-119, | L0761: 4, L0439: 4, | | | |
| | | | | | | Ser-131 to Pro-150, | L0758: 4, L0769: 3, | | | |
| | | | | | | Glu-188 to Gly-196. | L0771: 3, L0662: 3, | | | |
| | | | | | | | L0666: 3, L0665: 3, | | | |
| | | | | | | | L0741: 3, L0743: 3, | | | |
| | | | | | | | H0559: 2, H0318: 2, | | | |
| | | | | | | | H0266: 2, L0776: 2, | | | |
| | | | | | | | L0809: 2, L0664: 2, | | | |
| | | | | | | | L0740: 2, L0747: 2, | | | |
| | | | | | | | L0750: 2, L0757: 2, | | | |
| | | | | | | | S0356: 1, H0587: 1, | | | |
| | | | | | | | H0581: 1, H0052: 1, | | | |
| | | | | | | | H0545: 1, H0086: 1, | | | |
| | | | | | | | H0620: 1, L0119: 1, | | | |
| | | | | | | | H0039: 1, L0637: 1, | | | |
| | | | | | | | L0800: 1, L0764: 1, | | | |
| | | | | | | | L0803: 1, L0655: 1, | | | |
| | | | | | | | L0657: 1, L0659: 1, | | | |
| | | | | | | | L0636: 1, L0782: 1, | | | |
| | | | | | | | L0663: 1, H0520: 1, | | | |
| | | | | | | | S0044: 1, L0748: 1, | | | |
| | | | | | | | L0754: 1, L0779: 1, | | | |
| | | | | | | | L0755: 1, L0731: 1, | | | |
| | | | | | | | L0592: 1, S0276: 1, | | | |
| | | | | | | | H0677: 1 and S0456: 1. | | | |
| | | 771667 | 523 | 2-355 | 1136 | Gln-19 to Glu-26, | | | | |
| | | | | | | Phe-33 to Lys-38, | | | | |
| | | | | | | Asn-45 to Val-52. | | | | |
| 137 | HELHJ69 | 1128924 | 147 | 18-596 | 760 | Ala-7 to Lys-19, | AR061: 3, AR089: 1 | | | |
| | | | | | | Gly-30 to Gly-35, | H0254: 2, H0255: 2, | | | |
| | | | | | | Ser-50 to Glu-61, | S0045: 2, H0266: 2, | | | |
| | | | | | | Ala-74 to Pro-81. | H0052: 1, H0050: 1, | | | |
| | | | | | | | H0063: 1, H0488: 1 and | | | |
| | | | | | | | H0423: 1. | | | |
| | | 911262 | 524 | 1-597 | 1137 | Pro-9 to Lys-25, | | | | |
| | | | | | | Gly-36 to Gly-41, | | | | |
| | | | | | | Ser-56 to Glu-67, | | | | |
| | | | | | | Ala-80 to Pro-87. | | | | |
| 138 | HFKLA09 | 1178800 | 148 | 3-1574 | 761 | His-1 to Asp-11, | AR061: 4, AR089: 2 | | | |
| | | | | | | Val-33 to Pro-57, | L0777: 11, L0748: 10, | | | |
| | | | | | | Gly-68 to Glu-74, | L0803: 8, L0794: 7, | | | |
| | | | | | | Pro-76 to Pro-81, | L0750: 6, H0620: 5, | | | |
| | | | | | | Phe-93 to Val-120, | L0749: 5, H0622: 4, | | | |
| | | | | | | Pro-131 to Pro-146, | L0805: 4, L0809: 4, | | | |
| | | | | | | Pro-161 to Pro-168, | L0665: 4, H0550: 3, | | | |
| | | | | | | Tyr-178 to Ser-184, | H0575: 3, H0023: 3, | | | |
| | | | | | | Pro-187 to Gly-215, | L0659: 3, L0790: 3, | | | |
| | | | | | | Asn-229 to Asn-244, | S0356: 2, H0549: 2, | | | |
| | | | | | | Asp-250 to Trp-255, | S0222: 2, H0592: 2, | | | |
| | | | | | | Pro-258 to Asp-263, | H0427: 2, L0157: 2, | | | |
| | | | | | | Pro-300 to Val-310, | H0213: 2, L0763: 2, | | | |
| | | | | | | Asp-364 to Glu-371, | L0662: 2, L0774: 2, | | | |
| | | | | | | Thr-441 to Lys-446, | L0789: 2, L0666: 2, | | | |
| | | | | | | Ser-462 to Thr-477, | H0539: 2, L0743: 2, | | | |
| | | | | | | Lys-487 to Trp-492. | L0744: 2, L0600: 2, | | | |
| | | | | | | | S0282: 1, H0664: 1, | | | |
| | | | | | | | L0005: 1, S0358: 1, | | | |
| | | | | | | | S0360: 1, H0411: 1, | | | |
| | | | | | | | H0441: 1, H0587: 1, | | | |
| | | | | | | | S0280: 1, H0156: 1, | | | |
| | | | | | | | H0618: 1, H0309: 1, | | | |
| | | | | | | | H0327: 1, H0545: 1, | | | |
| | | | | | | | H0050: 1, H0012: 1, | | | |
| | | | | | | | H0051: 1, S0051: 1, | | | |
| | | | | | | | H0375: 1, H0687: 1, | | | |
| | | | | | | | H0292: 1, H0424: 1, | | | |
| | | | | | | | H0553: 1, H0617: 1, | | | |
| | | | | | | | H0124: 1, S0366: 1, | | | |
| | | | | | | | H0616: 1, H0100: 1, | | | |
| | | | | | | | S0210: 1, L0536: 1, | | | |
| | | | | | | | L0769: 1, L0637: 1, | | | |
| | | | | | | | L0644: 1, L0764: 1, | | | |
| | | | | | | | L0804: 1, L0650: 1, | | | |
| | | | | | | | L0784: 1, L0655: 1, | | | |
| | | | | | | | L0367: 1, L0368: 1, | | | |
| | | | | | | | L0663: 1, S0126: 1, | | | |
| | | | | | | | S0330: 1, S0044: 1, | | | |
| | | | | | | | L0740: 1, L0747: 1, | | | |
| | | | | | | | L0752: 1, L0758: 1, | | | |
| | | | | | | | L0759: 1, S0194: 1 and | | | |
| | | | | | | | H0352: 1. | | | |
| | | 952634 | 525 | 2-1567 | 1138 | Thr-2 to Asp-9, | | | | |
| | | | | | | Val-31 to Pro-55, | | | | |
| | | | | | | Gly-66 to Glu-72, | | | | |
| | | | | | | Pro-74 to Pro-79, | | | | |
| | | | | | | Phe-91 to Val-118, | | | | |
| | | | | | | Pro-129 to Pro-144. | | | | |
| 139 | HSBBF79 | 965764 | 149 | 3-707 | 762 | Gln-2 to Glu-12. | AR061: 520, AR089: | | | |
| | | | | | | | 428 | | | |
| | | | | | | | S0040: 1, H0669: 1, | | | |
| | | | | | | | H0662: 1, S0420: 1, | | | |
| | | | | | | | S0358: 1, S0376: 1, | | | |
| | | | | | | | H0632: 1, T0040: 1, | | | |
| | | | | | | | T0110: 1, H0633: 1, | | | |
| | | | | | | | L0800: 1, H0666: 1, | | | |
| | | | | | | | S0152: 1, S0028: 1, | | | |
| | | | | | | | L0581: 1 and L0594: 1. | | | |
| 140 | HSLKA77 | 1204269 | 150 | 22-1137 | 763 | | AR061: 4, AR089: 3 | | | |
| | | | | | | | L0748: 20, L0731: 8, | | | |
| | | | | | | | L0755: 6, H0031: 5, | | | |
| | | | | | | | H0644: 5, H0090: 5, | | | |
| | | | | | | | L0775: 5, L0749: 5, | | | |
| | | | | | | | S0360: 4, L0770: 4, | | | |
| | | | | | | | L0766: 4, L0740: 4, | | | |
| | | | | | | | L0754: 4, L0777: 4, | | | |
| | | | | | | | L0757: 4, L0758: 4, | | | |
| | | | | | | | H0050: 3, L0764: 3, | | | |
| | | | | | | | L0768: 3, L0666: 3, | | | |
| | | | | | | | L0665: 3, L0750: 3, | | | |
| | | | | | | | L0756: 3, S0212: 2, | | | |
| | | | | | | | H0580: 2, H0545: 2, | | | |
| | | | | | | | H0123: 2, L0471: 2, | | | |
| | | | | | | | H0012: 2, S0022: 2, | | | |
| | | | | | | | H0622: 2, H0553: 2, | | | |
| | | | | | | | H0383: 2, S0344: 2, | | | |
| | | | | | | | L0662: 2, L0657: 2, | | | |
| | | | | | | | L0663: 2, L0664: 2, | | | |
| | | | | | | | H0144: 2, H0555: 2, | | | |
| | | | | | | | S0390: 2, L0743: 2, | | | |
| | | | | | | | L0747: 2, L0759: 2, | | | |
| | | | | | | | L0581: 2, L0599: 2, | | | |
| | | | | | | | H0265: 1, H0295: 1, | | | |
| | | | | | | | T0049: 1, S0358: 1, | | | |
| | | | | | | | H0619: 1, L0717: 1, | | | |
| | | | | | | | H0592: 1, H0486: 1, | | | |
| | | | | | | | L0477: 1, T0039: 1, | | | |
| | | | | | | | T0040: 1, H0013: 1, | | | |
| | | | | | | | S0010: 1, H0318: 1, | | | |
| | | | | | | | H0052: 1, H0046: 1, | | | |
| | | | | | | | H0023: 1, H0051: 1, | | | |
| | | | | | | | T0079: 1, H0355: 1, | | | |
| | | | | | | | H0510: 1, H0290: 1, | | | |
| | | | | | | | S0250: 1, H0628: 1, | | | |
| | | | | | | | L0456: 1, H0316: 1, | | | |
| | | | | | | | H0040: 1, H0264: 1, | | | |
| | | | | | | | H0623: 1, H0494: 1, | | | |
| | | | | | | | S0016: 1, S0210: 1, | | | |
| | | | | | | | L0761: 1, L0771: 1, | | | |
| | | | | | | | L0650: 1, L0774: 1, | | | |
| | | | | | | | L0375: 1, L0784: 1, | | | |
| | | | | | | | L0776: 1, L0655: 1, | | | |
| | | | | | | | H0547: 1, H0659: 1, | | | |
| | | | | | | | H0670: 1, H0672: 1, | | | |
| | | | | | | | H0696: 1, S0037: 1, | | | |
| | | | | | | | S0028: 1, S0032: 1, | | | |
| | | | | | | | L0744: 1, L0779: 1, | | | |
| | | | | | | | L0752: 1, L0753: 1, | | | |
| | | | | | | | S0031: 1 and L0366: 1. | | | |
| | | 911589 | 526 | 88-414 | 1139 | Pro-52 to Asp-57, | | | | |
| | | | | | | Asp-67 to Trp-72, | | | | |
| | | | | | | Lys-87 to Gly-92, | | | | |
| | | | | | | Asp-98 to Gly-104. | | | | |
| 141 | hagdr21 | 1090433 | 151 | 74-1183 | 764 | Gly-36 to Asp-42, | AR061: 3, AR089: 1 | | | |
| | | | | | | Pro-51 to Ala-56, | S0222: 1, S6014: 1, | | | |
| | | | | | | Gln-84 to Leu-91, | S0010: 1, S6028: 1 and | | | |
| | | | | | | His-105 to His-112, | S0036: 1. | | | |
| | | | | | | Tyr-115 to Pro-124, | | | | |
| | | | | | | Pro-155 to Ser-162, | | | | |
| | | | | | | Cys-167 to Ala-173, | | | | |
| | | | | | | His-178 to Leu-190, | | | | |
| | | | | | | Ser-217 to Ala-224, | | | | |
| | | | | | | Pro-226 to Gly-234, | | | | |
| | | | | | | Lys-270 to Ala-275, | | | | |
| | | | | | | Pro-316 to Lys-323. | | | | |
| | | 1002124 | 527 | 80-349 | 1140 | Gly-10 to Asp-16, | | | | |
| | | | | | | Pro-25 to Ala-30, | | | | |
| | | | | | | Gln-58 to Leu-65. | | | | |
| 142 | HHFNH27 | 1025277 | 152 | 252-1634 | 765 | Arg-13 to Gly-21, | AR089: 81, AR061: 32 | | | |
| | | | | | | Arg-24 to Gly-31, | H0341: 9, H0657: 7, | | | |
| | | | | | | Ser-41 to Gln-73, | S0358: 4, H0251: 4, | | | |
| | | | | | | Glu-83 to Gly-92, | H0428: 4, L0748: 4, | | | |
| | | | | | | Asp-98 to Ala-103, | L0750: 4, H0445: 4, | | | |
| | | | | | | Asn-105 to Gln-115, | S0116: 3, H0333: 3, | | | |
| | | | | | | Glu-129 to Glu-135, | H0318: 3, T0041: 3, | | | |
| | | | | | | Asp-142 to Gly-147, | S0126: 3, H0670: 3, | | | |
| | | | | | | Val-149 to Met-154, | H0648: 3, H0543: 3, | | | |
| | | | | | | His-171 to Lys-177, | H0170: 2, S0376: 2, | | | |
| | | | | | | Pro-187 to Gly-196, | S0360: 2, S0007: 2, | | | |
| | | | | | | Ala-199 to Cys-208, | H0619: 2, H0393: 2, | | | |
| | | | | | | Arg-230 to Tyr-245, | H0486: 2, H0156: 2, | | | |
| | | | | | | Glu-249 to His-256, | H0596: 2, H0046: 2, | | | |
| | | | | | | Asn-265 to Phe-270, | H0014: 2, H0059: 2, | | | |
| | | | | | | Val-277 to Arg-286, | T0004: 2, H0647: 2, | | | |
| | | | | | | Ala-292 to Asp-300, | L0521: 2, L0375: 2, | | | |
| | | | | | | Leu-327 to Pro-351, | L0517: 2, H0659: 2, | | | |
| | | | | | | Gln-374 to His-380, | H0658: 2, H0660: 2, | | | |
| | | | | | | Leu-382 to Gly-391, | H0672: 2, S0380: 2, | | | |
| | | | | | | Lys-393 to Gly-402. | H0521: 2, S0044: 2, | | | |
| | | | | | | | H0576: 2, L0747: 2, | | | |
| | | | | | | | L0485: 2, L0595: 2, | | | |
| | | | | | | | L0362: 2, S0026: 2, | | | |
| | | | | | | | H0624: 1, S0180: 1, | | | |
| | | | | | | | S0212: 1, H0663: 1, | | | |
| | | | | | | | H0305: 1, H0459: 1, | | | |
| | | | | | | | S0418: 1, S0420: 1, | | | |
| | | | | | | | S0045: 1, S0046: 1, | | | |
| | | | | | | | H0351: 1, S0222: 1, | | | |
| | | | | | | | H0392: 1, H0249: 1, | | | |
| | | | | | | | H0643: 1, H0331: 1, | | | |
| | | | | | | | H0618: 1, T0071: 1, | | | |
| | | | | | | | H0581: 1, H0421: 1, | | | |
| | | | | | | | H0263: 1, L0040: 1, | | | |
| | | | | | | | H0546: 1, H0009: 1, | | | |
| | | | | | | | H0123: 1, H0050: 1, | | | |
| | | | | | | | L0471: 1, H0012: 1, | | | |
| | | | | | | | H0023: 1, H0015: 1, | | | |
| | | | | | | | H0083: 1, H0510: 1, | | | |
| | | | | | | | S0336: 1, H0687: 1, | | | |
| | | | | | | | H0290: 1, H0028: 1, | | | |
| | | | | | | | S0250: 1, S0022: 1, | | | |
| | | | | | | | H0615: 1, T0006: 1, | | | |
| | | | | | | | H0030: 1, H0169: 1, | | | |
| | | | | | | | S0364: 1, H0068: 1, | | | |
| | | | | | | | S0366: 1, H0376: 1, | | | |
| | | | | | | | H0598: 1, H0090: 1, | | | |
| | | | | | | | H0040: 1, H0412: 1, | | | |
| | | | | | | | T0069: 1, L0564: 1, | | | |
| | | | | | | | T0042: 1, H0494: 1, | | | |
| | | | | | | | H0359: 1, H0646: 1, | | | |
| | | | | | | | S0422: 1, H0026: 1, | | | |
| | | | | | | | L0520: 1, L0625: 1, | | | |
| | | | | | | | L0764: 1, L0767: 1, | | | |
| | | | | | | | L0806: 1, L0655: 1, | | | |
| | | | | | | | L0657: 1, L0809: 1, | | | |
| | | | | | | | L0519: 1, L0789: 1, | | | |
| | | | | | | | L0664: 1, S0374: 1, | | | |
| | | | | | | | L0565: 1, H0689: 1, | | | |
| | | | | | | | H0435: 1, H0414: 1, | | | |
| | | | | | | | H0666: 1, H0539: 1, | | | |
| | | | | | | | S0378: 1, S0004: 1, | | | |
| | | | | | | | S0146: 1, S0027: 1, | | | |
| | | | | | | | S0028: 1, S0206: 1, | | | |
| | | | | | | | L0741: 1, L0439: 1, | | | |
| | | | | | | | L0740: 1, L0754: 1, | | | |
| | | | | | | | L0749: 1, L0756: 1, | | | |
| | | | | | | | L0777: 1, L0731: 1, | | | |
| | | | | | | | L0758: 1, L0581: 1, | | | |
| | | | | | | | L0599: 1, L0608: 1, | | | |
| | | | | | | | L0594: 1, L0603: 1, | | | |
| | | | | | | | H0668: 1, H0665: 1, | | | |
| | | | | | | | H0667: 1, S0194: 1, | | | |
| | | | | | | | H0542: 1, H0423: 1, | | | |
| | | | | | | | H0422: 1, S0424: 1 and | | | |
| | | | | | | | H0506: 1. | | | |
| 143 | HTLIT05 | 1217625 | 153 | 81-623 | 766 | | AR054: 41, AR050: | | | |
| | | | | | | | 39, AR051: 30, AR089: | | | |
| | | | | | | | 7, AR061: 5 | | | |
| | | | | | | | H0618: 2, H0040: 1 | | | |
| | | | | | | | and H0522: 1. | | | |
| | | 1095161 | 528 | 149-622 | 1141 | Thr-27 to Asn-33, | | | | |
| | | | | | | Thr-63 to Asp-69. | | | | |
| 144 | HAPNV33 | 1151374 | 154 | 1-774 | 767 | Gln-93 to Arg-105, | AR061: 7, AR089: 2 | | | |
| | | | | | | Ser-130 to Ile-135, | H0619: 1, H0575: 1, | | | |
| | | | | | | Ser-166 to Lys-175, | H0615: 1 and S0028: 1. | | | |
| | | | | | | Ser-238 to Glu-243. | | | | |
| | | 947872 | 529 | 1-477 | 1142 | Gln-93 to Arg-105, | | | | |
| | | | | | | Ser-130 to Ile-135. | | | | |
| 145 | HBTAE84 | 1128800 | 155 | 3-416 | 768 | Thr-45 to Phe-55, | AR089: 1, AR061: 0 | | | |
| | | | | | | Leu-62 to Asn-67. | S0180: 1 | | | |
| | | 781946 | 530 | 2-295 | 1143 | Thr-41 to Phe-51, | | | | |
| | | | | | | Leu-58 to Asn-63. | | | | |
| 146 | HDPVY89 | 827026 | 156 | 2-580 | 769 | Ile-8 to Arg-16, | AR089: 4, AR061: 3 | | | |
| | | | | | | Leu-104 to Asp-110, | H0657: 3, H0253: 3, | | | |
| | | | | | | Arg-133 to Leu-141, | H0494: 3, H0521: 3, | | | |
| | | | | | | Gly-182 to Asp-187. | L0593: 3, H0437: 2, | | | |
| | | | | | | | H0587: 2, H0559: 2, | | | |
| | | | | | | | H0620: 2, H0428: 2, | | | |
| | | | | | | | L0769: 2, L0666: 2, | | | |
| | | | | | | | H0547: 2, S0028: 2, | | | |
| | | | | | | | L0439: 2, H0556: 1, | | | |
| | | | | | | | H0662: 1, H0125: 1, | | | |
| | | | | | | | S0418: 1, H0619: 1, | | | |
| | | | | | | | L0021: 1, H0618: 1, | | | |
| | | | | | | | H0318: 1, H0052: 1, | | | |
| | | | | | | | H0545: 1, H0009: 1, | | | |
| | | | | | | | H0172: 1, H0012: 1, | | | |
| | | | | | | | H0266: 1, H0181: 1, | | | |
| | | | | | | | H0617: 1, H0673: 1, | | | |
| | | | | | | | S0364: 1, H0135: 1, | | | |
| | | | | | | | H0087: 1, H0059: 1, | | | |
| | | | | | | | H0529: 1, L0763: 1, | | | |
| | | | | | | | L0662: 1, L0766: 1, | | | |
| | | | | | | | L0803: 1, L0791: 1, | | | |
| | | | | | | | L0438: 1, H0519: 1, | | | |
| | | | | | | | H0682: 1, H0539: 1, | | | |
| | | | | | | | H0134: 1, H0436: 1, | | | |
| | | | | | | | H0576: 1, S0037: 1, | | | |
| | | | | | | | S0206: 1, S0032: 1, | | | |
| | | | | | | | L0601: 1, H0665: 1, | | | |
| | | | | | | | S0424: 1, H0506: 1 and | | | |
| | | | | | | | H0008: 1. | | | |
| 147 | HGLDB21 | 1010920 | 157 | 240-1388 | 770 | Leu-20 to Pro-34, | AR061: 10, AR089: 4 | | | |
| | | | | | | Lys-36 to Leu-55, | H0688: 2, L0803: 2, | | | |
| | | | | | | Arg-63 to Gln-72, | L0666: 2, L0749: 2, | | | |
| | | | | | | Pro-215 to Thr-222, | L0777: 2, L0594: 2, | | | |
| | | | | | | Ile-288 to Leu-297, | S0218: 1, H0657: 1, | | | |
| | | | | | | Ala-337 to Gly-346. | H0656: 1, H0341: 1, | | | |
| | | | | | | | H0663: 1, H0351: 1, | | | |
| | | | | | | | H0370: 1, H0318: 1, | | | |
| | | | | | | | T0103: 1, H0024: 1, | | | |
| | | | | | | | H0652: 1, L0769: 1, | | | |
| | | | | | | | L0800: 1, L0794: 1, | | | |
| | | | | | | | L0766: 1, L0561: 1, | | | |
| | | | | | | | L0804: 1, L0657: 1, | | | |
| | | | | | | | L0636: 1, L0635: 1, | | | |
| | | | | | | | L0789: 1, L0663: 1, | | | |
| | | | | | | | L0665: 1, L0750: 1 and | | | |
| | | | | | | | H0216: 1. | | | |
| | | 455474 | 531 | 3-230 | 1144 | Ala-30 to Gly-39. | | | | |
| 148 | HMIAN37 | 947881 | 158 | 1-645 | 771 | Asp-60 to Lys-75, | AR061: 2, AR089: 1 | | | |
| | | | | | | Glu-136 to Gln-142. | S0414: 26, L0439: 12, | | | |
| | | | | | | | L0766: 10, L0779: 10, | | | |
| | | | | | | | L0777: 10, L0758: 10, | | | |
| | | | | | | | L0757: 8, L0752: 7, | | | |
| | | | | | | | L0740: 5, H0170: 4, | | | |
| | | | | | | | S0354: 4, L0471: 4, | | | |
| | | | | | | | L0794: 4, L0653: 4, | | | |
| | | | | | | | L0809: 4, L0666: 4, | | | |
| | | | | | | | L0748: 4, H0441: 3, | | | |
| | | | | | | | H0051: 3, H0266: 3, | | | |
| | | | | | | | S0003: 3, H0644: 3, | | | |
| | | | | | | | H0032: 3, L0770: 3, | | | |
| | | | | | | | L0803: 3, L0664: 3, | | | |
| | | | | | | | H0658: 3, S0380: 3, | | | |
| | | | | | | | S3014: 3, S0206: 3, | | | |
| | | | | | | | L0754: 3, L0750: 3, | | | |
| | | | | | | | L0731: 3, S0192: 3, | | | |
| | | | | | | | H0657: 2, S0298: 2, | | | |
| | | | | | | | S0358: 2, S0360: 2, | | | |
| | | | | | | | L0717: 2, S6016: 2, | | | |
| | | | | | | | H0574: 2, T0040: 2, | | | |
| | | | | | | | H0013: 2, H0052: 2, | | | |
| | | | | | | | H0009: 2, S6028: 2, | | | |
| | | | | | | | H0428: 2, H0090: 2, | | | |
| | | | | | | | H0591: 2, S0422: 2, | | | |
| | | | | | | | L0804: 2, L0659: 2, | | | |
| | | | | | | | L0663: 2, L0665: 2, | | | |
| | | | | | | | H0144: 2, H0689: 2, | | | |
| | | | | | | | H0521: 2, S3012: 2, | | | |
| | | | | | | | S0037: 2, S0028: 2, | | | |
| | | | | | | | L0742: 2, L0745: 2, | | | |
| | | | | | | | L0747: 2, L0756: 2, | | | |
| | | | | | | | L0780: 2, L0753: 2, | | | |
| | | | | | | | H0667: 2, H0423: 2, | | | |
| | | | | | | | S0412: 2, H0171: 1, | | | |
| | | | | | | | H0686: 1, S0040: 1, | | | |
| | | | | | | | T0049: 1, H0656: 1, | | | |
| | | | | | | | S0212: 1, H0663: 1, | | | |
| | | | | | | | S0408: 1, H0208: 1, | | | |
| | | | | | | | H0619: 1, H0645: 1, | | | |
| | | | | | | | H0351: 1, H0411: 1, | | | |
| | | | | | | | S0222: 1, H0453: 1, | | | |
| | | | | | | | H0392: 1, H0455: 1, | | | |
| | | | | | | | H0587: 1, H0632: 1, | | | |
| | | | | | | | T0114: 1, H0427: 1, | | | |
| | | | | | | | H0156: 1, H0575: 1, | | | |
| | | | | | | | S0474: 1, H0309: 1, | | | |
| | | | | | | | H0596: 1, H0046: 1, | | | |
| | | | | | | | H0083: 1, H0355: 1, | | | |
| | | | | | | | S0022: 1, H0615: 1, | | | |
| | | | | | | | H0031: 1, H0553: 1, | | | |
| | | | | | | | H0628: 1, H0212: 1, | | | |
| | | | | | | | H0068: 1, S0036: 1, | | | |
| | | | | | | | H0268: 1, H0623: 1, | | | |
| | | | | | | | T0069: 1, H0494: 1, | | | |
| | | | | | | | S0370: 1, H0633: 1, | | | |
| | | | | | | | S0210: 1, L0598: 1, | | | |
| | | | | | | | H0529: 1, L0637: 1, | | | |
| | | | | | | | L0641: 1, L0764: 1, | | | |
| | | | | | | | L0771: 1, L0773: 1, | | | |
| | | | | | | | L0662: 1, L0649: 1, | | | |
| | | | | | | | L0388: 1, L0774: 1, | | | |
| | | | | | | | L0607: 1, L0636: 1, | | | |
| | | | | | | | L0783: 1, L0647: 1, | | | |
| | | | | | | | L0790: 1, S0374: 1, | | | |
| | | | | | | | L0438: 1, H0519: 1, | | | |
| | | | | | | | S0126: 1, S0378: 1, | | | |
| | | | | | | | H0518: 1, H0696: 1, | | | |
| | | | | | | | H0436: 1, S0027: 1, | | | |
| | | | | | | | L0744: 1, L0749: 1, | | | |
| | | | | | | | L0755: 1, L0759: 1, | | | |
| | | | | | | | H0445: 1, L0581: 1, | | | |
| | | | | | | | S0011: 1, H0653: 1, | | | |
| | | | | | | | S0242: 1, H0422: 1, | | | |
| | | | | | | | S0042: 1 and S0424: 1. | | | |
| 149 | HODAK55 | 1110333 | 159 | 361-2 | 772 | Cys-52 to Trp-58, | AR061: 11, AR089: 9 | | | |
| | | | | | | His-61 to Phe-68. | L0748: 3 and H0328: | | | |
| | | | | | | | 1. | | | |
| | | 745532 | 532 | 2-169 | 1145 | | | | | |
| 150 | HSLEI59 | 1128801 | 160 | 770-267 | 773 | | AR089: 1, AR061: 1 | | | |
| | | | | | | | S0028: 2, H0171: 1, | | | |
| | | | | | | | H0318: 1, S0216: 1, | | | |
| | | | | | | | S0044: 1 and S0031: 1. | | | |
| | | 781945 | 533 | 3-470 | 1146 | Thr-32 to Phe-42, | | | | |
| | | | | | | Leu-49 to Asn-54. | | | | |
| 151 | HSQFH29 | 1217061 | 161 | 2-1723 | 774 | Glu-33 to Arg-47, | AR089: 14, AR061: 12 | | | |
| | | | | | | Glu-75 to Phe-87, | S0026: 2, S0045: 1 and | | | |
| | | | | | | Tyr-167 to Lys-173, | L0375: 1. | | | |
| | | | | | | Pro-199 to Ala-204, | | | | |
| | | | | | | Arg-249 to Lys-256, | | | | |
| | | | | | | Leu-319 to Asn-324, | | | | |
| | | | | | | Pro-385 to Glu-390, | | | | |
| | | | | | | Val-441 to Val-448, | | | | |
| | | | | | | Asn-512 to Ile-517. | | | | |
| | | 967708 | 534 | 46-462 | 1147 | | | | | |
| 152 | HTLEA35 | 1107230 | 162 | 503-3 | 775 | | AR089: 25, AR061: 15 | | | |
| | | | | | | | H0545: 3, H0265: 2, | | | |
| | | | | | | | H0424: 2, H0556: 1, | | | |
| | | | | | | | S0470: 1, H0663: 1, | | | |
| | | | | | | | S0420: 1, H0443: 1, | | | |
| | | | | | | | H0559: 1, H0253: 1, | | | |
| | | | | | | | H0086: 1, H0388: 1 and | | | |
| | | | | | | | H0087: 1. | | | |
| | | 827028 | 535 | 3-371 | 1148 | Ala-4 to Phe-11, | | | | |
| | | | | | | Pro-28 to Arg-35, | | | | |
| | | | | | | Ala-49 to Lys-57, | | | | |
| | | | | | | Asp-62 to Cys-67. | | | | |
| 153 | HUVGG63 | 1204716 | 163 | 1-1467 | 776 | Phe-4 to Arg-13, | AR089: 1, AR061: 1 | | | |
| | | | | | | Arg-20 to Pro-27, | H0556: 14, L0751: 12, | | | |
| | | | | | | Thr-29 to Ala-38, | L0777: 11, H0265: 7, | | | |
| | | | | | | Asp-48 to Thr-54, | L0769: 7, L0747: 5, | | | |
| | | | | | | Ala-68 to Glu-78, | H0052: 4, L0764: 4, | | | |
| | | | | | | Ser-101 to Ile-108, | L0438: 4, L0741: 4, | | | |
| | | | | | | Asp-117 to Gln-162, | L0604: 4, S0358: 3, | | | |
| | | | | | | Thr-206 to Trp-212, | H0266: 3, H0424: 3, | | | |
| | | | | | | Cys-285 to Lys-300, | S0344: 3, L0775: 3, | | | |
| | | | | | | Gly-311 to Gly-316, | L0776: 3, L0758: 3, | | | |
| | | | | | | Thr-362 to Thr-367, | S0212: 2, H0402: 2, | | | |
| | | | | | | Arg-376 to Ser-382, | S0007: 2, S0046: 2, | | | |
| | | | | | | Pro-413 to Pro-418, | S0132: 2, S0222: 2, | | | |
| | | | | | | Ser-430 to Gly-435, | H0253: 2, S0051: 2, | | | |
| | | | | | | Asp-484 to Ser-489. | H0594: 2, H0328: 2, | | | |
| | | | | | | | H0213: 2, H0617: 2, | | | |
| | | | | | | | H0674: 2, H0412: 2, | | | |
| | | | | | | | H0100: 2, H0647: 2, | | | |
| | | | | | | | S0002: 2, L0761: 2, | | | |
| | | | | | | | L0774: 2, L0809: 2, | | | |
| | | | | | | | S0152: 2, L0742: 2, | | | |
| | | | | | | | L0439: 2, L0755: 2, | | | |
| | | | | | | | L0757: 2, H0445: 2, | | | |
| | | | | | | | L0594: 2, H0542: 2, | | | |
| | | | | | | | H0543: 2, H0484: 1, | | | |
| | | | | | | | H0254: 1, H0255: 1, | | | |
| | | | | | | | H0125: 1, S0418: 1, | | | |
| | | | | | | | S0360: 1, H0580: 1, | | | |
| | | | | | | | L0717: 1, H0550: 1, | | | |
| | | | | | | | H0600: 1, H0333: 1, | | | |
| | | | | | | | H0574: 1, L0622: 1, | | | |
| | | | | | | | T0114: 1, H0427: 1, | | | |
| | | | | | | | H0599: 1, H0575: 1, | | | |
| | | | | | | | T0082: 1, H0036: 1, | | | |
| | | | | | | | S0346: 1, H0318: 1, | | | |
| | | | | | | | S0474: 1, S0049: 1, | | | |
| | | | | | | | H0178: 1, H0050: 1, | | | |
| | | | | | | | H0012: 1, H0620: 1, | | | |
| | | | | | | | S0050: 1, S0362: 1, | | | |
| | | | | | | | L0163: 1, T0010: 1, | | | |
| | | | | | | | H0510: 1, S6028: 1, | | | |
| | | | | | | | S0250: 1, H0252: 1, | | | |
| | | | | | | | H0615: 1, H0428: 1, | | | |
| | | | | | | | H0031: 1, H0181: 1, | | | |
| | | | | | | | L0055: 1, H0124: 1, | | | |
| | | | | | | | S0036: 1, H0623: 1, | | | |
| | | | | | | | H0494: 1, H0633: 1, | | | |
| | | | | | | | L0763: 1, L0770: 1, | | | |
| | | | | | | | L0768: 1, L0766: 1, | | | |
| | | | | | | | L0375: 1, L0651: 1, | | | |
| | | | | | | | L0378: 1, L0653: 1, | | | |
| | | | | | | | L0606: 1, L0783: 1, | | | |
| | | | | | | | L0790: 1, L0663: 1, | | | |
| | | | | | | | L0665: 1, H0144: 1, | | | |
| | | | | | | | H0547: 1, S0126: 1, | | | |
| | | | | | | | H0690: 1, S0330: 1, | | | |
| | | | | | | | H0539: 1, H0576: 1, | | | |
| | | | | | | | S0322: 1, S0027: 1, | | | |
| | | | | | | | S0206: 1, S0032: 1, | | | |
| | | | | | | | L0740: 1, L0754: 1, | | | |
| | | | | | | | L0749: 1, L0750: 1, | | | |
| | | | | | | | L0779: 1, L0752: 1, | | | |
| | | | | | | | H0444: 1, H0707: 1, | | | |
| | | | | | | | S0194: 1, H0423: 1 and | | | |
| | | | | | | | S0424: 1. | | | |
| | | 969432 | 536 | 3-1448 | 1149 | | | | | |
| 154 | HAGAX57 | 1150865 | 164 | 192-785 | 777 | Tyr-7 to Tyr-15, | AR061: 9, AR089: 4 | | | |
| | | | | | | Pro-43 to Ala-52, | L0748: 13, L0752: 8, | | | |
| | | | | | | Gln-57 to Ala-62, | L0438: 4, H0212: 3, | | | |
| | | | | | | Asn-68 to Ala-73, | S0328: 3, S0010: 2, | | | |
| | | | | | | Tyr-75 to Met-83, | L0764: 2, L0776: 2, | | | |
| | | | | | | Glu-115 to Leu-140, | L0659: 2, L0749: 2, | | | |
| | | | | | | Ala-144 to Glu-156, | L0779: 2, L0599: 2, | | | |
| | | | | | | Val-159 to Ser-166, | H0170: 1, T0104: 1, | | | |
| | | | | | | Arg-178 to Pro-186, | H0331: 1, H0574: 1, | | | |
| | | | | | | Arg-191 to Ile-198. | H0052: 1, H0596: 1, | | | |
| | | | | | | | S0050: 1, H0051: 1, | | | |
| | | | | | | | L0483: 1, H0032: 1, | | | |
| | | | | | | | H0068: 1, S0466: 1, | | | |
| | | | | | | | S0422: 1, L0800: 1, | | | |
| | | | | | | | L0803: 1, L0651: 1, | | | |
| | | | | | | | L0791: 1, H0539: 1, | | | |
| | | | | | | | H0521: 1, L0780: 1, | | | |
| | | | | | | | L0753: 1, L0758: 1 and | | | |
| | | | | | | | S0192: 1. | | | |
| | | 949211 | 537 | 185-778 | 1150 | Tyr-7 to Tyr-15, | | | | |
| | | | | | | Pro-43 to Ala-52, | | | | |
| | | | | | | Gln-57 to Ala-62, | | | | |
| | | | | | | Asn-68 to Ala-73, | | | | |
| | | | | | | Tyr-75 to Met-83, | | | | |
| | | | | | | Glu-115 to Leu-140, | | | | |
| | | | | | | Ala-144 to Glu-156, | | | | |
| | | | | | | Val-159 to Ser-166, | | | | |
| | | | | | | Arg-178 to Pro-186, | | | | |
| | | | | | | Arg-191 to Ile-198. | | | | |
| 155 | HAMGX15 | 1177932 | 165 | 293-763 | 778 | | AR089: 4, AR061: 2 | | | |
| | | | | | | | H0551: 2, H0581: 1, | | | |
| | | | | | | | H0560: 1, H0414: 1, | | | |
| | | | | | | | S0152: 1 and H0522: 1. | | | |
| | | 908840 | 538 | 428-757 | 1151 | Ala-54 to Ile-59, | | | | |
| | | | | | | His-71 to His-82. | | | | |
| 156 | HAUBV06 | 1106041 | 166 | 1164-2108 | 779 | Met-5 to Asn-11, | AR061: 1, AR089: 0 | | | |
| | | | | | | Gly-20 to Arg-30, | S0052: 2, S0028: 2, | | | |
| | | | | | | Thr-36 to Ile-41, | H0624: 1, H0294: 1, | | | |
| | | | | | | His-136 to Thr-143, | S0001: 1, S0282: 1, | | | |
| | | | | | | Thr-152 to Asp-161, | H0250: 1, H0271: 1, | | | |
| | | | | | | Gly-176 to Cys-183. | H0189: 1, S0150: 1, | | | |
| | | | | | | | S0428: 1, S0031: 1 and | | | |
| | | | | | | | S0260: 1. | | | |
| | | 596802 | 539 | 3-1025 | 1152 | Arg-1 to Lys-11, | | | | |
| | | | | | | Thr-23 to Arg-28, | | | | |
| | | | | | | Gly-70 to Ala-76, | | | | |
| | | | | | | Lys-118 to Thr-125, | | | | |
| | | | | | | Pro-161 to His-168, | | | | |
| | | | | | | Arg-170 to Lys-175, | | | | |
| | | | | | | Glu-222 to Leu-228, | | | | |
| | | | | | | Pro-259 to Gly-265, | | | | |
| | | | | | | Asn-299 to Leu-305, | | | | |
| | | | | | | Leu-309 to Gly-314, | | | | |
| | | | | | | Pro-316 to Ser-327. | | | | |
| | | 929762 | 540 | 2211-1192 | 1153 | Asn-1 to Lys-10, | | | | |
| | | | | | | Thr-22 to Arg-27, | | | | |
| | | | | | | Gly-69 to Ala-75. | | | | |
| 157 | HBWCM62 | 1185273 | 167 | 1-477 | 780 | Glu-7 to Tyr-14, | AR089: 2, AR061: 1 | | | |
| | | | | | | Arg-21 to Leu-29, | H0341: 2, H0052: 2, | | | |
| | | | | | | Pro-42 to Ala-54, | H0556: 1, H0656: 1, | | | |
| | | | | | | Arg-95 to Phe-106. | S0354: 1, H0427: 1, | | | |
| | | | | | | | H0040: 1, H0488: 1, | | | |
| | | | | | | | H0059: 1 and S0386: 1. | | | |
| | | 908818 | 541 | 1-477 | 1154 | Glu-7 to Tyr-14, | | | | |
| | | | | | | Arg-21 to Lys-30. | | | | |
| 158 | HCWFA35 | 1105672 | 168 | 237-623 | 781 | Asn-54 to Asn-63, | AR089: 13, AR061: 6 | | | |
| | | | | | | Gln-70 to Glu-75. | H0305: 1 | | | |
| | | 908820 | 542 | 50-364 | 1155 | Lys-19 to Thr-26. | | | | |
| 159 | HDACA35 | 1107236 | 169 | 68-913 | 782 | Asp-1 to Lys-12, | AR089: 6, AR061: 3 | | | |
| | | | | | | Pro-18 to Arg-26, | H0497: 1, H0617: 1, | | | |
| | | | | | | Asp-51 to Val-74, | L0769: 1, L0766: 1, | | | |
| | | | | | | Ala-80 to Leu-102. | L0775: 1, H0670: 1 and | | | |
| | | | | | | | H0672: 1. | | | |
| | | 908837 | 543 | 68-460 | 1156 | | | | | |
| 160 | HDQGM08 | 1151469 | 170 | 541-146 | 783 | Glu-25 to Ser-30, | AR061: 3, AR089: 2 | | | |
| | | | | | | Glu-57 to Thr-62, | L0748: 8, H0212: 3, | | | |
| | | | | | | His-64 to Ser-72, | S0010: 2, L0438: 2, | | | |
| | | | | | | His-101 to Pro-106, | L0752: 2, H0170: 1, | | | |
| | | | | | | Val-111 to Gln-117. | H0052: 1, H0596: 1, | | | |
| | | | | | | | H0051: 1, H0032: 1, | | | |
| | | | | | | | H0068: 1, L0800: 1, | | | |
| | | | | | | | L0764: 1, L0803: 1, | | | |
| | | | | | | | L0791: 1, H0521: 1, | | | |
| | | | | | | | L0749: 1, L0758: 1, | | | |
| | | | | | | | L0599: 1 and S0192: 1. | | | |
| | | 949210 | 544 | 505-185 | 1157 | Tyr-7 to Tyr-15, | | | | |
| | | | | | | Pro-43 to Ala-52, | | | | |
| | | | | | | Gln-57 to Ala-62, | | | | |
| | | | | | | Asn-68 to Ala-73, | | | | |
| | | | | | | Tyr-75 to Met-83. | | | | |
| 161 | HELGB06 | 1148741 | 171 | 287-3 | 784 | Gln-38 to Ser-51. | AR089: 2, AR061: 0 | | | |
| | | | | | | | S0045: 1 and S0053: 1. | | | |
| | | 935730 | 545 | 161-445 | 1158 | Gln-38 to Ser-51. | | | | |
| 162 | HEOPR74 | 1226822 | 172 | 2-937 | 785 | Pro-1 to Gln-8, | AR089: 3, ARO61: 2 | | | |
| | | | | | | Lys-32 to Lys-45, | H0457: 8, H0264: 2, | | | |
| | | | | | | Pro-51 to Arg-59, | H0645: 1, H0549: 1, | | | |
| | | | | | | Asp-84 to Val-107, | H0069: 1, H0599: 1, | | | |
| | | | | | | Ala-113 to Leu-135, | H0318: 1, H0566: 1, | | | |
| | | | | | | Gln-137 to Leu-156, | H0132: 1, H0658: 1 and | | | |
| | | | | | | Gln-160 to Arg-170, | S0350: 1. | | | |
| | | | | | | Gln-182 to Pro-194, | | | | |
| | | | | | | Lys-201 to Ser-213, | | | | |
| | | | | | | Arg-272 to Tyr-278. | | | | |
| | | 908836 | 546 | 2-649 | 1159 | Pro-1 to Gln-8, | | | | |
| | | | | | | Lys-32 to Lys-45, | | | | |
| | | | | | | Pro-51 to Arg-59, | | | | |
| | | | | | | Asp-84 to Val-107, | | | | |
| | | | | | | Ala-113 to Leu-135, | | | | |
| | | | | | | Gln-137 to Leu-156, | | | | |
| | | | | | | Gln-160 to Arg-170, | | | | |
| | | | | | | Gln-182 to Leu-198. | | | | |
| 163 | HIBEK35 | 731480 | 173 | 3-416 | 786 | | AR089: 0,AR061: 0 | | | |
| | | | | | | | T0010: 2 | | | |
| 164 | HJMAR88 | 1104937 | 174 | 3-551 | 787 | Ala-11 to Asn-16, | AR089: 14, AR061: 5 | | | |
| | | | | | | Ala-18 to Leu-25, | H0545: 1, H0560: 1 | | | |
| | | | | | | Lys-40 to Arg-52, | and L0805: 1. | | | |
| | | | | | | Tyr-58 to Ile-76, | | | | |
| | | | | | | Lys-151 to Thr-162, | | | | |
| | | | | | | Gln-176 to Gly-182. | | | | |
| | | 908839 | 547 | 6-344 | 1160 | Ser-11 to Ala-21, | | | | |
| | | | | | | Asp-23 to Ile-28. | | | | |
| 165 | HMWGU56 | 1226470 | 175 | 800-3 | 788 | | AR061: 4, AR089: 3 | | | |
| | | | | | | | H0521: 4, H0265: 1, | | | |
| | | | | | | | H0341: 1, S0212: 1, | | | |
| | | | | | | | S0418: 1, S0356: 1, | | | |
| | | | | | | | H0619: 1, T0114: 1, | | | |
| | | | | | | | H0004: 1, T0048: 1, | | | |
| | | | | | | | H0052: 1, H0081: 1, | | | |
| | | | | | | | H0024: 1, H0124: 1, | | | |
| | | | | | | | H0040: 1, H0551: 1, | | | |
| | | | | | | | H0477: 1, H0623: 1, | | | |
| | | | | | | | H0059: 1, H0494: 1, | | | |
| | | | | | | | H0641. 1, S0144. 1, | | | |
| | | | | | | | S0126: 1, H0660: 1, | | | |
| | | | | | | | H0672: 1, L0743: 1 and | | | |
| | | | | | | | H0445: 1. | | | |
| | | 908825 | 548 | 3-776 | 1161 | Met-16 to Ala-23, | | | | |
| | | | | | | Ile-34 to Arg-41, | | | | |
| | | | | | | Lys-48 to Pro-54, | | | | |
| | | | | | | Leu-65 to Thr-82, | | | | |
| | | | | | | Glu-104 to Thr-110, | | | | |
| | | | | | | Arg-119 to Tyr-126, | | | | |
| | | | | | | Gly-135 to Ala-144, | | | | |
| | | | | | | His-153 to His-158, | | | | |
| | | | | | | Asn-178 to Gln-194, | | | | |
| | | | | | | Arg-197 to His-202, | | | | |
| | | | | | | Ser-236 to Arg-241, | | | | |
| | | | | | | Gln-245 to Arg-250. | | | | |
| 166 | HOUDS09 | 1164010 | 176 | 3-1121 | 789 | Ala-15 to Gln-22, | AR061: 153, AR089: | | | |
| | | | | | | Pro-55 to Val-91, | 48 | | | |
| | | | | | | Glu-116 to Tyr-122, | L0599: 12, L0766: 11, | | | |
| | | | | | | His-130 to His-135, | L0754: 8, L0803: 2, | | | |
| | | | | | | Asn-155 to Tyr-162, | L0809: 2, L0743: 2, | | | |
| | | | | | | Leu-164 to Cys-186, | L0731: 2, H0624: 1, | | | |
| | | | | | | Ser-213 to Gln-222, | H0171: 1, S0040: 1, | | | |
| | | | | | | Ser-228 to Gly-239, | H0650: 1, H0656: 1, | | | |
| | | | | | | Ile-281 to Glu-286, | S0298: 1, S0282: 1, | | | |
| | | | | | | Lys-296 to Lys-303, | H0580: 1, S0046: 1, | | | |
| | | | | | | Val-310 to Glu-315, | S0222: 1, H0431: 1, | | | |
| | | | | | | Thr-320 to Asp-335, | H0587: 1, H0486: 1, | | | |
| | | | | | | Arg-344 to Ala-352. | S0010: 1, H0318: 1, | | | |
| | | | | | | | H0581: 1, H0309: 1, | | | |
| | | | | | | | H0416: 1, T0006: 1, | | | |
| | | | | | | | H0063: 1, T0041: 1, | | | |
| | | | | | | | H0560: 1, S0422: 1, | | | |
| | | | | | | | S0002: 1, L0641: 1, | | | |
| | | | | | | | L0363: 1, L0523: 1, | | | |
| | | | | | | | L0659: 1, H0547: 1, | | | |
| | | | | | | | H0539: 1, S0152: 1, | | | |
| | | | | | | | H0521: 1, L0758: 1, | | | |
| | | | | | | | S0242: 1, H0543: 1 and | | | |
| | | | | | | | H0423: 1. | | | |
| | | 949051 | 549 | 16-906 | 1162 | Cys-3 to Glu-8, | | | | |
| | | | | | | Gly-13 to Gln-19, | | | | |
| | | | | | | Pro-52 to Val-88. | | | | |
| 167 | HTEGM38 | 675087 | 177 | 84-263 | 790 | Ala-15 to Tyr-24, | AR089: 1, AR061: 0 | 11q25 | 602782 | |
| | | | | | | His-32 to Asp-39. | H0038: 2 | | | |
| 168 | HTEKY82 | 1152495 | 178 | 499-125 | 791 | Gln-85 to Gly-91, | AR061: 5, AR089: 2 | | | |
| | | | | | | Ser-99 to Arg-104. | H0038: 3, H0575: 1, | | | |
| | | | | | | | H0052: 1, H0628: 1, | | | |
| | | | | | | | H0412: 1, L0780: 1 and | | | |
| | | | | | | | L0758: 1. | | | |
| | | | | | | | 908846 | 550 | 122-517 | 1163 |
| 169 | HTLCY54 | 1193550 | 179 | 1043-510 | 792 | | AR061: 5, AR089: 5 | | | |
| | | | | | | | H0253: 4, H0618: 3, | | | |
| | | | | | | | L0758: 3, L0779: 2 and | | | |
| | | | | | | | L0794: 1. | | | |
| | | 908832 | 551 | 134-934 | 1164 | Arg-1 to Arg-6, | | | | |
| | | | | | | Ala-49 to Tyr-58, | | | | |
| | | | | | | Pro-67 to Lys-80, | | | | |
| | | | | | | Ser-92 to Trp-108. | | | | |
| 170 | HFOXK14 | 603245 | 180 | 150-401 | 793 | Ala-6 to Tyr-17. | AR089: 19, AR061: 8 | | | |
| | | | | | | | L0747: 5, L0731: 2, | | | |
| | | | | | | | H0656: 1, H0351: 1, | | | |
| | | | | | | | H0392: 1, H0333: 1, | | | |
| | | | | | | | S0362: 1, S0306: 1, | | | |
| | | | | | | | S0002: 1, L0770: 1, | | | |
| | | | | | | | L0648: 1, L0776: 1, | | | |
| | | | | | | | H0547: 1, H0555: 1 and | | | |
| | | | | | | | S0276: 1. | | | |
| 171 | HHFFO69 | 837703 | 181 | 1-723 | 794 | | AR089: 1, AR061: 1 | | | |
| | | | | | | | S0005: 1, H0457: 1, | | | |
| | | | | | | | H0009: 1, H0050: 1, | | | |
| | | | | | | | S6028: 1, S0036: 1 and | | | |
| | | | | | | | H0135: 1. | | | |
| 172 | HHFLU06 | 857884 | 182 | 2-328 | 795 | | AR061: 5, AR089: 2 | | | |
| | | | | | | | H0619: 1 | | | |
| 173 | HAGBA56 | 732597 | 183 | 115-633 | 796 | Asp-52 to Leu-57, | AR061: 2, AR089: 1 | 7q21-q22 | 116860, | |
| | | | | | | Lys-82 to Thr-87, | S0010: 1, H0135: 1, | | 126650, | |
| | | | | | | Ser-90 to Trp-98, | L0766: 1, L0745: 1, | | 126650, | |
| | | | | | | Ser-118 to Leu-123. | L0779: 1 and L0758: 1. | | 129900, | |
| | | | | | | | | | 133170, | |
| | | | | | | | | | 154276, | |
| | | | | | | | | | 173360, | |
| | | | | | | | | | 173360, | |
| | | | | | | | | | 602136, | |
| | | | | | | | | | 602136, | |
| | | | | | | | | | 602136, | |
| | | | | | | | | | 602447 | |
| 174 | HAGGF84 | 911312 | 184 | 1-333 | 797 | Lys-14 to Glu-27. | AR061: 3, AR089: 2 | | | |
| | | | | | | | L0766: 18, L0748: 11, | | | |
| | | | | | | | L0439: 9, L0749: 8, | | | |
| | | | | | | | L0438: 5, L0750: 5, | | | |
| | | | | | | | L0777: 4, L0759: 4, | | | |
| | | | | | | | H0441: 3, H0052: 3, | | | |
| | | | | | | | L0637: 3, L0761: 3, | | | |
| | | | | | | | L0740: 3, L0747: 3, | | | |
| | | | | | | | L0103: 2, H0574: 2, | | | |
| | | | | | | | H0156: 2, H0597: 2, | | | |
| | | | | | | | S0250: 2, L0649: 2, | | | |
| | | | | | | | L0803: 2, L0806: 2, | | | |
| | | | | | | | L0792: 2, S3014: 2, | | | |
| | | | | | | | L0757: 2, L0485: 2, | | | |
| | | | | | | | L0599: 2, H0171: 1, | | | |
| | | | | | | | S6024: 1, L0002: 1, | | | |
| | | | | | | | H0657: 1, H0341: 1, | | | |
| | | | | | | | S0358: 1, S0360: 1, | | | |
| | | | | | | | S0132: 1, L0717: 1, | | | |
| | | | | | | | H0632: 1, H0013: 1, | | | |
| | | | | | | | H0599: 1, S0010: 1, | | | |
| | | | | | | | S0346: 1, H0318: 1, | | | |
| | | | | | | | H0251: 1, T0115: 1, | | | |
| | | | | | | | H0544: 1, L0471: 1, | | | |
| | | | | | | | H0014: 1, S0362: 1, | | | |
| | | | | | | | H0083: 1, H0188: 1, | | | |
| | | | | | | | H0428: 1, H0646: 1, | | | |
| | | | | | | | H0538: 1, L0598: 1, | | | |
| | | | | | | | L0762: 1, L0763: 1, | | | |
| | | | | | | | L0769: 1, L0662: 1, | | | |
| | | | | | | | L0768: 1, L0776: 1, | | | |
| | | | | | | | L0655: 1, L0659: 1, | | | |
| | | | | | | | L0526: 1, L0783: 1, | | | |
| | | | | | | | L0789: 1, L0665: 1, | | | |
| | | | | | | | S0148: 1, H0520: 1, | | | |
| | | | | | | | H0519: 1, S0330: 1, | | | |
| | | | | | | | L0602: 1, S0152: 1, | | | |
| | | | | | | | S0136: 1, S0350: 1, | | | |
| | | | | | | | L0752: 1, H0343: 1, | | | |
| | | | | | | | L0366: 1, S0011: 1, | | | |
| | | | | | | | H0665: 1, S0196: 1, | | | |
| | | | | | | | H0423: 1, L0697: 1 and | | | |
| | | | | | | | S0462: 1. | | | |
| 175 | HAHGD33 | 921782 | 185 | 1-1020 | 798 | Phe-22 to Ala-37, | AR061: 7, AR089: 5 | 19p | | |
| | | | | | | Cys-94 to Asn-100, | H0039: 5, H0622: 5, | | | |
| | | | | | | Gly-137 to Pro-145, | L0748: 4, H0667: 4, | | | |
| | | | | | | Glu-172 to Ala-179, | H0255: 3, S0126: 3, | | | |
| | | | | | | Ile-217 to Asp-222. | H0393: 2, S0278: 2, | | | |
| | | | | | | | H0599: 2, H0618: 2, | | | |
| | | | | | | | H0318: 2, H0123: 2, | | | |
| | | | | | | | H0050: 2, H0179: 2, | | | |
| | | | | | | | H0271: 2, S0036: 2, | | | |
| | | | | | | | H0135: 2, H0634: 2, | | | |
| | | | | | | | H0087: 2, H0100: 2, | | | |
| | | | | | | | H0633: 2, S0210: 2, | | | |
| | | | | | | | S0002: 2, H0144: 2, | | | |
| | | | | | | | L0438: 2, L0602: 2, | | | |
| | | | | | | | L0744: 2, L0731: 2, | | | |
| | | | | | | | L0595: 2, L0601: 2, | | | |
| | | | | | | | H0665: 2, H0542: 2, | | | |
| | | | | | | | H0556: 1, H0222: 1, | | | |
| | | | | | | | H0294: 1, H0583: 1, | | | |
| | | | | | | | H0650: 1, H0657: 1, | | | |
| | | | | | | | H0484: 1, H0306: 1, | | | |
| | | | | | | | S0418: 1, S0420: 1, | | | |
| | | | | | | | S0354: 1, H0580: 1, | | | |
| | | | | | | | S0007: 1, S0046: 1, | | | |
| | | | | | | | H0619: 1, H0550: 1, | | | |
| | | | | | | | H0392: 1, H0586: 1, | | | |
| | | | | | | | H0333: 1, H0486: 1, | | | |
| | | | | | | | H0122: 1, H0196: 1, | | | |
| | | | | | | | H0597: 1, H0544: 1, | | | |
| | | | | | | | H0009: 1, H0172: 1, | | | |
| | | | | | | | L0471: 1, H0023: 1, | | | |
| | | | | | | | H0071: 1, H0266: 1, | | | |
| | | | | | | | H0290: 1, H0553: 1, | | | |
| | | | | | | | H0628: 1, H0551: 1, | | | |
| | | | | | | | H0056: 1, H0623: 1, | | | |
| | | | | | | | S0038: 1, H0494: 1, | | | |
| | | | | | | | H0625: 1, H0561: 1, | | | |
| | | | | | | | H0386: 1, H0509: 1, | | | |
| | | | | | | | H0131: 1, H0130: 1, | | | |
| | | | | | | | H0646: 1, S0144: 1, | | | |
| | | | | | | | S0426: 1, H0529: 1, | | | |
| | | | | | | | L0565: 1, H0547: 1, | | | |
| | | | | | | | H0689: 1, H0435: 1, | | | |
| | | | | | | | H0670: 1, S0330: 1, | | | |
| | | | | | | | H0521: 1, S0027: 1, | | | |
| | | | | | | | S0028: 1, S0032: 1, | | | |
| | | | | | | | L0439: 1, L0747: 1, | | | |
| | | | | | | | L0759: 1, S0260: 1, | | | |
| | | | | | | | H0445: 1, L0597: 1, | | | |
| | | | | | | | L0604: 1, L0593: 1, | | | |
| | | | | | | | L0366: 1, H0668: 1, | | | |
| | | | | | | | S0242: 1 and H0422: 1. | | | |
| 176 | HAHIY08 | 962113 | 186 | 3-278 | 799 | | AR061: 10, AR089: 6 | | | |
| 177 | HBIOZ10 | 973131 | 187 | 3-503 | 800 | Leu-50 to Asp-61, | AR054: 189, AR051: | | | |
| | | | | | | Ser-100 to Leu-107, | 68, AR050: 35, AR089: | | | |
| | | | | | | Ala-120 to Thr-130. | 4, AR061: 3 | | | |
| | | | | | | | H0593: 1 | | | |
| 178 | HBKDI30 | 729048 | 188 | 1-381 | 801 | Gly-15 to Thr-21, | AR089: 1, AR061: 0 | | | |
| | | | | | | Glu-76 to Lys-86. | S0364: 3, S0366: 3, | | | |
| | | | | | | | L0604: 3, H0624: 1, | | | |
| | | | | | | | L0622: 1, L0623: 1, | | | |
| | | | | | | | H0041: 1, L0791: 1, | | | |
| | | | | | | | S0380: 1 and L0748: 1. | | | |
| 179 | HBXBW40 | 706115 | 189 | 124-456 | 802 | Gln-3 to Ser-12, | AR089: 16, AR061: 8 | | | |
| | | | | | | Arg-33 to Arg-50, | S0038: 2, H0438: 1, | | | |
| | | | | | | Ser-93 to Glu-98. | S0049: 1 and H0547: 1. | | | |
| 180 | HCEHE35 | 909937 | 190 | 3-392 | 803 | Asn-6 to Pro-13. | AR061: 8, AR089: 3 | | | |
| | | | | | | | S0222: 1, H0052: 1, | | | |
| | | | | | | | H0194: 1, H0290: 1 and | | | |
| | | | | | | | H0264: 1. | | | |
| 181 | HCEPW85 | 911374 | 191 | 3-314 | 804 | Thr-2 to Gln-7. | H0052: 1 and L0471: | | | |
| | | | | | | | 1. | | | |
| 182 | HCFAT25 | 932068 | 192 | 82-588 | 805 | Lys-15 to Ser-20, | AR061: 2, AR089: 2 | | | |
| | | | | | | Arg-51 to Arg-60, | S0358: 1, H0413: 1, | | | |
| | | | | | | Lys-64 to Pro-101. | L0502: 1, L0657: 1, | | | |
| | | | | | | | H0522: 1 and H0422: 1. | | | |
| 183 | HCFCF47 | 1139731 | 193 | 3-764 | 806 | Leu-1 to Glu-9, | AR089: 14, AR061: 7 | | | |
| | | | | | | Gln-43 to Ala-52, | H0341: 1 and H0422. | | | |
| | | | | | | Gly-169 to Gly-176, | 1. | | | |
| | | | | | | Arg-178 to Leu-185, | | | | |
| | | | | | | Pro-192 to Phe-199. | | | | |
| | | 894415 | 552 | 2-298 | 1165 | Arg-1 to Glu-8. | | | | |
| 184 | HDAAV61 | 810305 | 194 | 2-343 | 807 | Asp-90 to Lys-105. | AR089: 25, AR061: 11 | 5q34 | 109690, | |
| | | | | | | | L0601: 5, H0266: 4, | | 109690, | |
| | | | | | | | S0222: 3, H0265: 2, | | 123101, | |
| | | | | | | | H0556: 2, H0575: 2, | | 180071, | |
| | | | | | | | H0052: 2, H0271: 2, | | 600584 | |
| | | | | | | | S0114: 1, S0134: 1, | | | |
| | | | | | | | S0420: 1, H0393: 1, | | | |
| | | | | | | | H0550: 1, H0497: 1, | | | |
| | | | | | | | H0318: 1, H0581: 1, | | | |
| | | | | | | | H0251: 1, T0115: 1, | | | |
| | | | | | | | H0014: 1, H0286: 1, | | | |
| | | | | | | | H0494: 1, H0561: 1, | | | |
| | | | | | | | L0766: 1, L0657: 1, | | | |
| | | | | | | | H0698: 1, H0684: 1, | | | |
| | | | | | | | S0330: 1, H0521: 1, | | | |
| | | | | | | | S3014: 1, L0777: 1, | | | |
| | | | | | | | S0260: 1, L0591: 1, | | | |
| | | | | | | | L0594: 1 and H0543: 1. | | | |
| 185 | HDPKD75 | 810824 | 195 | 2-445 | 808 | Ala-13 to Asn-20, | AR089: 4, AR061: 0 | | | |
| | | | | | | Phe-38 to Gly-46, | H0581: 1, H0494: 1, | | | |
| | | | | | | Glu-89 to His-95. | H0521: 1, H0543: 1 and | | | |
| | | | | | | | L0465: 1. | | | |
| 186 | HDPNC96 | 934520 | 196 | 3-734 | 809 | Val-2 to Gly-8, | AR089: 1, AR061: 1 | | | |
| | | | | | | Asp-20 to Gln-26. | H0522: 2 and L0766: | | | |
| | | | | | | | 1. | | | |
| 187 | HDPSR15 | 969666 | 197 | 168-785 | 810 | Pro-26 to Leu-34, | AR061: 2, AR089: 2 | 9 | | |
| | | | | | | His-42 to Asn-51. | L0759: 12, L0439: 11, | | | |
| | | | | | | | L0766: 7, L0775: 5, | | | |
| | | | | | | | H0521: 5, L0755: 5, | | | |
| | | | | | | | L0748: 4, L0756: 4, | | | |
| | | | | | | | L0777: 4, L0731: 4, | | | |
| | | | | | | | L0581: 4, L0619: 3, | | | |
| | | | | | | | L0666: 3, L0779: 3, | | | |
| | | | | | | | L0757: 3, L0588: 3, | | | |
| | | | | | | | S0418: 2, L0618: 2, | | | |
| | | | | | | | H0580: 2, L0055: 2, | | | |
| | | | | | | | L0769: 2, L0773: 2, | | | |
| | | | | | | | L0774: 2, L0791: 2, | | | |
| | | | | | | | L0747: 2, L0750: 2, | | | |
| | | | | | | | H0265: 1, H0663: 1, | | | |
| | | | | | | | S0356: 1, H0208: 1, | | | |
| | | | | | | | H0370: 1, H0108: 1, | | | |
| | | | | | | | H0575: 1, H0618: 1, | | | |
| | | | | | | | H0544: 1, H0545: 1, | | | |
| | | | | | | | S0050: 1, H0510: 1, | | | |
| | | | | | | | H0286: 1, H0031: 1, | | | |
| | | | | | | | H0644: 1, H0068: 1, | | | |
| | | | | | | | H0135: 1, L0564: 1, | | | |
| | | | | | | | H0494: 1, L0475: 1, | | | |
| | | | | | | | H0396: 1, S0144: 1, | | | |
| | | | | | | | S0002: 1, S0426: 1, | | | |
| | | | | | | | L0763: 1, L0761: 1, | | | |
| | | | | | | | L0642: 1, L0764: 1, | | | |
| | | | | | | | L0662: 1, L0768: 1, | | | |
| | | | | | | | L0806: 1, L0661: 1, | | | |
| | | | | | | | L0659: 1, L0367: 1, | | | |
| | | | | | | | L0663: 1, H0519: 1, | | | |
| | | | | | | | H0435: 1, H0658: 1, | | | |
| | | | | | | | S3014: 1, L0751: 1, | | | |
| | | | | | | | L0749: 1, L0603: 1, | | | |
| | | | | | | | H0665: 1 and H0542: 1. | | | |
| 188 | HDQDX20 | 919027 | 198 | 210-1037 | 811 | Met-7 to Ser-12, | AR089: 30, AR061: 4 | | | |
| | | | | | | Ser-20 to Arg-30, | H0521: 3, H0051: 2, | | | |
| | | | | | | Asp-85 to Ala-92, | L0756: 2, H0590: 1, | | | |
| | | | | | | Met-119 to Asn-146, | S0250: 1, L0772: 1, | | | |
| | | | | | | Pro-151 to Asp-161. | H0522: 1, S0406: 1 and | | | |
| | | | | | | | L0748: 1. | | | |
| 189 | HDQHB19 | 1226089 | 199 | 1-747 | 812 | Phe-73 to Pro-81, | AR061: 3, AR089: 3 | | | |
| | | | | | | His-156 to Asp-165, | L0759: 12, L0439: 11, | | | |
| | | | | | | Pro-182 to Lys-187, | L0766: 7, L0775: 5, | | | |
| | | | | | | Lys-196 to Asp-201, | H0521: 5, L0755: 5, | | | |
| | | | | | | Pro-204 to Leu-214, | L0748: 4, L0756: 4, | | | |
| | | | | | | Pro-224 to Asp-231. | L0777: 4, L0731: 4, | | | |
| | | | | | | | L0581: 4, L0619: 3, | | | |
| | | | | | | | L0666: 3, L0779: 3, | | | |
| | | | | | | | L0757: 3, L0588: 3, | | | |
| | | | | | | | S0418: 2, L0618: 2, | | | |
| | | | | | | | H0580: 2, L0055: 2, | | | |
| | | | | | | | L0769: 2, L0773: 2, | | | |
| | | | | | | | L0774: 2, L0791: 2, | | | |
| | | | | | | | L0747: 2, L0750: 2, | | | |
| | | | | | | | H0265: 1, H0663: 1, | | | |
| | | | | | | | S0356: 1, H0208: 1, | | | |
| | | | | | | | H0370: 1, H0108: 1, | | | |
| | | | | | | | H0575: 1, H0618: 1, | | | |
| | | | | | | | H0544: 1, H0545: 1, | | | |
| | | | | | | | S0050: 1, H0510: 1, | | | |
| | | | | | | | H0286: 1, H0031: 1, | | | |
| | | | | | | | H0644: 1, H0068: 1, | | | |
| | | | | | | | H0135: 1, L0564: 1, | | | |
| | | | | | | | H0494: 1, L0475: 1, | | | |
| | | | | | | | H0396: 1, S0144: 1, | | | |
| | | | | | | | S0002: 1, S0426: 1, | | | |
| | | | | | | | L0763: 1, L0761: 1, | | | |
| | | | | | | | L0642: 1, L0764: 1, | | | |
| | | | | | | | L0662: 1, L0768: 1, | | | |
| | | | | | | | L0806: 1, L0661: 1, | | | |
| | | | | | | | L0659: 1, L0367: 1, | | | |
| | | | | | | | L0663: 1, H0519: 1, | | | |
| | | | | | | | H0435: 1, H0658: 1, | | | |
| | | | | | | | S3014: 1, L0751: 1, | | | |
| | | | | | | | L0749: 1, L0603: 1, | | | |
| | | | | | | | H0665: 1 and H0542: 1. | | | |
| | | 895106 | 553 | 2-538 | 1166 | Pro-14 to Ala-20, | | | | |
| | | | | | | Pro-51 to Leu-59, | | | | |
| | | | | | | His-67 to Thr-77. | | | | |
| 190 | HDTBY88 | 934472 | 200 | 3-464 | 813 | His-130 to Lys-140. | AR089: 8, AR061: 2 | | | |
| | | | | | | | S0218: 1 and H0486: 1. | | | |
| 191 | HE2KZ07 | 909948 | 201 | 2-796 | 814 | Leu-10 to Gly-16, | AR061: 9, AR089: 4 | | | |
| | | | | | | Pro-37 to Glu-45, | H0624: 1 | | | |
| | | | | | | Glu-78 to Cys-87. | | | | |
| 192 | HE8UY74 | 960914 | 202 | 111-455 | 815 | | AR061: 2, AR089: 1 | | | |
| | | | | | | | H0013: 1 and S0027: 1. | | | |
| 193 | HE9NO66 | 974353 | 203 | 362-871 | 816 | Phe-8 to Lys-27, | AR061: 1, AR089: 1 | | | |
| | | | | | | Ser-79 to Ser-87, | L0774: 2 and H0144: | | | |
| | | | | | | Cys-102 to Val-116. | 2 | | | |
| 194 | HEMBT61 | 939957 | 204 | 1-351 | 817 | | AR061: 8, AR089: 4 | | | |
| | | | | | | | L0547: 2, S0046: 1, | | | |
| | | | | | | | L0471: 1, L0772: 1, | | | |
| | | | | | | | L0529: 1 and L0780: 1. | | | |
| 195 | HETLF29 | 909762 | 205 | 3-416 | 818 | | AR061: 4, AR089: 2 | | | |
| | | | | | | | H0046: 1 and L0758: | | | |
| | | | | | | | 1. | | | |
| 196 | HFIUE75 | 909758 | 206 | 2-775 | 819 | Cys-1 to Val-10, | AR089: 1, AR061: 1 | | | |
| | | | | | | Ala-14 to Met-22. | L0748: 5, S0242: 3, | | | |
| | | | | | | | H0615: 2, S0376: 1, | | | |
| | | | | | | | S0360: 1, L0717: 1, | | | |
| | | | | | | | L0641: 1, L0766: 1, | | | |
| | | | | | | | L0664: 1, H0478: 1, | | | |
| | | | | | | | L0593: 1 and S0196: 1. | | | |
| 197 | HFKIT06 | 934019 | 207 | 1-300 | 820 | Asp-2 to Pro-7, | AR089: 0, AR061: 0 | | | |
| | | | | | | Pro-15 to Gln-20. | H0620: 2, L0761: 2, | | | |
| | | | | | | | L0766: 2, L0744: 2, | | | |
| | | | | | | | L0754: 2, L0596: 2, | | | |
| | | | | | | | H0686: 1, H0295: 1, | | | |
| | | | | | | | H0657: 1, H0597: 1, | | | |
| | | | | | | | H0009: 1, H0264: 1, | | | |
| | | | | | | | S0002: 1, L0769: 1, | | | |
| | | | | | | | L0774: 1, L0805: 1, | | | |
| | | | | | | | L0657: 1, L0790: 1, | | | |
| | | | | | | | H0690: 1 and H0521: 1. | | | |
| 198 | HHEGG20 | 894409 | 208 | 26-820 | 821 | | AR089: 2, AR061: 1 | | | |
| | | | | | | | S0360: 1, H0013: 1, | | | |
| | | | | | | | L0664: 1 and H0542: 1. | | | |
| 199 | HHEHC53 | 921783 | 209 | 3-908 | 822 | Gly-59 to Ser-68, | AR089: 3, AR061: 2 | 19p | | |
| | | | | | | Ala-87 to Glu-98, | L0748: 8, H0039: 5, | | | |
| | | | | | | Pro-106 to Asn-121, | H0622: 5, L0664: 5, | | | |
| | | | | | | Ser-148 to Lys-159, | L0439: 5, L0779: 5, | | | |
| | | | | | | Phe-207 to Ala-222, | L0731: 5, L0758: 5, | | | |
| | | | | | | Ile-284 to Lys-289. | L0665: 4, L0744: 4, | | | |
| | | | | | | | L0601: 4, H0667: 4, | | | |
| | | | | | | | H0255: 3, H0618: 3, | | | |
| | | | | | | | L0666: 3, L0438: 3, | | | |
| | | | | | | | S0126: 3, L0602: 3, | | | |
| | | | | | | | L0742: 3, L0604: 3, | | | |
| | | | | | | | L0595: 3, H0542: 3, | | | |
| | | | | | | | H0265: 2, S0358: 2, | | | |
| | | | | | | | H0393: 2, S0278: 2, | | | |
| | | | | | | | H0550: 2, H0333: 2, | | | |
| | | | | | | | H0599: 2, H0318: 2, | | | |
| | | | | | | | H0545: 2, H0123: 2, | | | |
| | | | | | | | H0050: 2, H0620: 2, | | | |
| | | | | | | | H0179: 2, H0271: 2, | | | |
| | | | | | | | S0036: 2, H0135: 2, | | | |
| | | | | | | | H0634: 2, H0087: 2, | | | |
| | | | | | | | H0100: 2, H0633: 2, | | | |
| | | | | | | | S0210: 2, S0002: 2, | | | |
| | | | | | | | L0769: 2, L0646: 2, | | | |
| | | | | | | | L0768: 2, L0774: 2, | | | |
| | | | | | | | H0144: 2, L0565: 2, | | | |
| | | | | | | | H0689: 2, S0027: 2, | | | |
| | | | | | | | L0747: 2, L0755: 2, | | | |
| | | | | | | | L0593: 2, H0665: 2, | | | |
| | | | | | | | H0556: 1, T0002: 1, | | | |
| | | | | | | | H0222: 1, H0685: 1, | | | |
| | | | | | | | H0294: 1, S0430: 1, | | | |
| | | | | | | | H0583: 1, H0650: 1, | | | |
| | | | | | | | H0657: 1, S0212: 1, | | | |
| | | | | | | | S0282: 1, H0484: 1, | | | |
| | | | | | | | H0306: 1, S0418: 1, | | | |
| | | | | | | | S0420: 1, S0354: 1, | | | |
| | | | | | | | S0360: 1, H0580: 1, | | | |
| | | | | | | | S0007: 1, S0046: 1, | | | |
| | | | | | | | H0619: 1, H0351: 1, | | | |
| | | | | | | | H0549: 1, H0392: 1, | | | |
| | | | | | | | H0586: 1, H0486: 1, | | | |
| | | | | | | | T0060: 1, L0022: 1, | | | |
| | | | | | | | H0122: 1, H0196: 1, | | | |
| | | | | | | | H0597: 1, H0544: 1, | | | |
| | | | | | | | H0009: 1, H0172: 1, | | | |
| | | | | | | | L0471: 1, H0023: 1, | | | |
| | | | | | | | H0071: 1, H0266: 1, | | | |
| | | | | | | | H0290: 1, S0022: 1, | | | |
| | | | | | | | H0030: 1, H0553: 1, | | | |
| | | | | | | | H0628: 1, H0182: 1, | | | |
| | | | | | | | H0617: 1, H0606: 1, | | | |
| | | | | | | | H0551: 1, H0413: 1, | | | |
| | | | | | | | H0056: 1, H0623: 1, | | | |
| | | | | | | | S0038: 1, H0494: 1, | | | |
| | | | | | | | H0625: 1, H0561: 1, | | | |
| | | | | | | | H0386: 1, H0509: 1, | | | |
| | | | | | | | H0131: 1, H0130: 1, | | | |
| | | | | | | | H0646: 1, S0144: 1, | | | |
| | | | | | | | S0344: 1, S0426: 1, | | | |
| | | | | | | | H0529: 1, L0763: 1, | | | |
| | | | | | | | L0770: 1, L0637: 1, | | | |
| | | | | | | | L0372: 1, L0662: 1, | | | |
| | | | | | | | L0775: 1, L0776: 1, | | | |
| | | | | | | | L0659: 1, L0383: 1, | | | |
| | | | | | | | L0790: 1, H0547: 1, | | | |
| | | | | | | | H0435: 1, H0658: 1, | | | |
| | | | | | | | H0670: 1, S0330: 1, | | | |
| | | | | | | | H0521: 1, H0436: 1, | | | |
| | | | | | | | S0390: 1, S0028: 1, | | | |
| | | | | | | | S0032: 1, L0750: 1, | | | |
| | | | | | | | L0753: 1, L0757: 1, | | | |
| | | | | | | | L0759: 1, S0260: 1, | | | |
| | | | | | | | H0445: 1, H0595: 1, | | | |
| | | | | | | | L0597: 1, L0366: 1, | | | |
| | | | | | | | H0668: 1, S0242: 1, | | | |
| | | | | | | | H0423: 1, H0422: 1 and | | | |
| | | | | | | | H0352: 1. | | | |
| 200 | HHERQ79 | 944057 | 210 | 88-474 | 823 | Ser-3 to Thr-11, | AR089: 3, AR061: 2 | | | |
| | | | | | | Lys-32 to Gly-39, | H0597: 1, H0435: 1 | | | |
| | | | | | | Thr-50 to Glu-57, | and H0543: 1. | | | |
| | | | | | | Thr-83 to Gln-88. | | | | |
| 201 | HISAF59 | 959140 | 211 | 130-843 | 824 | Gly-33 to Ser-48. | AR089: 2, AR061: 2 | | | |
| | | | | | | | L0789: 4, L0758: 4, | | | |
| | | | | | | | H0657: 3, H0052: 3, | | | |
| | | | | | | | H0046: 3, L0438: 3, | | | |
| | | | | | | | L0744: 3, L0779: 3, | | | |
| | | | | | | | L0005: 2, H0586: 2, | | | |
| | | | | | | | H0581: 2, H0194: 2, | | | |
| | | | | | | | H0038: 2, L0800: 2, | | | |
| | | | | | | | L0659: 2, H0521: 2, | | | |
| | | | | | | | L0743: 2, L0439: 2, | | | |
| | | | | | | | H0556: 1, S0282: 1, | | | |
| | | | | | | | S0358: 1, H0619: 1, | | | |
| | | | | | | | H0618: 1, H0231: 1, | | | |
| | | | | | | | H0569: 1, S0362: 1, | | | |
| | | | | | | | H0622: 1, T0006: 1, | | | |
| | | | | | | | H0135: 1, H0616: 1, | | | |
| | | | | | | | H0413: 1, H0623: 1, | | | |
| | | | | | | | L0351: 1, S0150: 1, | | | |
| | | | | | | | L0769: 1, L0372: 1, | | | |
| | | | | | | | L0662: 1, L0794: 1, | | | |
| | | | | | | | L0775: 1, L0651: 1, | | | |
| | | | | | | | L0527: 1, L0657: 1, | | | |
| | | | | | | | L0666: 1, H0144: 1, | | | |
| | | | | | | | H0547: 1, H0690: 1, | | | |
| | | | | | | | H0658: 1, H0672: 1, | | | |
| | | | | | | | H0539: 1, S0378: 1, | | | |
| | | | | | | | H0555: 1, L0754: 1, | | | |
| | | | | | | | L0747: 1, L0780: 1, | | | |
| | | | | | | | L0596: 1, S0192: 1, | | | |
| | | | | | | | H0542: 1 and H0423: 1. | | | |
| 202 | HKAKM10 | 918685 | 212 | 2-547 | 825 | Gly-25 to Gln-31, | AR089: 1, AR061: 1 | | | |
| | | | | | | Asn-58 to Leu-63, | L0794: 4, L0438: 4, | | | |
| | | | | | | Lys-71 to His-76, | L0761: 3, L0766: 3, | | | |
| | | | | | | Ile-82 to Arg-88, | L0748: 3, L0439: 3, | | | |
| | | | | | | Ala-134 to Thr-139. | H0556: 2, L0602: 2, | | | |
| | | | | | | | L0754: 2, L0779: 2, | | | |
| | | | | | | | H0580: 1, H0208: 1, | | | |
| | | | | | | | H0013: 1, T0082: 1, | | | |
| | | | | | | | S0010: 1, H0428: 1, | | | |
| | | | | | | | H0553: 1, H0038: 1, | | | |
| | | | | | | | H0616: 1, H0494: 1, | | | |
| | | | | | | | L0796: 1, L0800: 1, | | | |
| | | | | | | | L0773: 1, L0533: 1, | | | |
| | | | | | | | L0803: 1, L0776: 1, | | | |
| | | | | | | | L0657: 1, L0791: 1, | | | |
| | | | | | | | H0520: 1, H0519: 1, | | | |
| | | | | | | | H0521: 1, H0187: 1, | | | |
| | | | | | | | L0731: 1, S0031: 1 and | | | |
| | | | | | | | L0366: 1. | | | |
| 203 | HLTHP86 | 919354 | 213 | 3-1310 | 826 | | AR089: 1, AR061: 1 | | | |
| | | | | | | | L0439: 3, L0438: 2, | | | |
| | | | | | | | S0028: 2, H0656: 1, | | | |
| | | | | | | | H0645: 1, H0369: 1, | | | |
| | | | | | | | S0222: 1, S0346: 1, | | | |
| | | | | | | | H0328: 1, H0029: 1, | | | |
| | | | | | | | H0644: 1, H0169: 1, | | | |
| | | | | | | | H0591: 1, H0646: 1, | | | |
| | | | | | | | H0520: 1, H0539: 1, | | | |
| | | | | | | | L0746: 1 and L0366: 1. | | | |
| 204 | HMSJL96 | 934483 | 214 | 1-426 | 827 | Thr-15 to Arg-22, | AR054: 16, AR051: | | | |
| | | | | | | Ala-38 to Met-43, | 15, AR050: 12, AR089: | | | |
| | | | | | | Gln-49 to Lys-64, | 0, AR061: 0 | | | |
| | | | | | | Thr-97 to Gln-108, | L0777: 6, L0758: 5, | | | |
| | | | | | | Thr-131 to Lys-137. | L0779: 4, L0803: 3, | | | |
| | | | | | | | S0358: 2, H0004: 2, | | | |
| | | | | | | | L0662: 2, L0775: 2, | | | |
| | | | | | | | H0144: 2, S0126: 2, | | | |
| | | | | | | | S0328: 2, S3014: 2, | | | |
| | | | | | | | S0027: 2, L0743: 2, | | | |
| | | | | | | | L0748: 2, H0265: 1, | | | |
| | | | | | | | H0656: 1, S0212: 1, | | | |
| | | | | | | | H0663: 1, H0638: 1, | | | |
| | | | | | | | H0580: 1, H0632: 1, | | | |
| | | | | | | | H0486: 1, H0599: 1, | | | |
| | | | | | | | H0618: 1, L0105: 1, | | | |
| | | | | | | | H0251: 1, H0309: 1, | | | |
| | | | | | | | H0544: 1, H0123: 1, | | | |
| | | | | | | | H0050: 1, L0471: 1, | | | |
| | | | | | | | H0024: 1, H0399: 1, | | | |
| | | | | | | | S0003: 1, H0364: 1, | | | |
| | | | | | | | H0553: 1, H0038: 1, | | | |
| | | | | | | | H0412: 1, H0413: 1, | | | |
| | | | | | | | T0041: 1, S0344: 1, | | | |
| | | | | | | | S0002: 1, L0598: 1, | | | |
| | | | | | | | H0529: 1, L0645: 1, | | | |
| | | | | | | | L0363: 1, L0649: 1, | | | |
| | | | | | | | L0804: 1, L0805: 1, | | | |
| | | | | | | | L0558: 1, L0659: 1, | | | |
| | | | | | | | L0528: 1, L0789: 1, | | | |
| | | | | | | | L0792: 1, L0666: 1, | | | |
| | | | | | | | S0374: 1, H0555: 1, | | | |
| | | | | | | | S3012: 1, S0028: 1, | | | |
| | | | | | | | S0206: 1, S0032: 1, | | | |
| | | | | | | | L0439: 1, L0757: 1, | | | |
| | | | | | | | S0031: 1, H0707: 1, | | | |
| | | | | | | | S0192: 1, H0423: 1, | | | |
| | | | | | | | S0042: 1 and H0008: 1. | | | |
| 205 | HMTAJ73 | 813296 | 215 | 1-438 | 828 | Pro-23 to Lys-28, | AR061: 24, AR089: 14 | | | |
| | | | | | | Gln-39 to Thr-51, | L0806: 3, L0772: 2, | | | |
| | | | | | | Lys-93 to Ala-106, | L0648: 2, H0255: 1, | | | |
| | | | | | | Gln-112 to Pro-129, | L0717: 1, H0586: 1, | | | |
| | | | | | | Pro-132 to Pro-143. | H0599: 1, H0618: 1, | | | |
| | | | | | | | H0581: 1, H0052: 1, | | | |
| | | | | | | | H0123: 1, L0629: 1, | | | |
| | | | | | | | L0659: 1, L0663: 1, | | | |
| | | | | | | | S0330: 1, H0518: 1 and | | | |
| | | | | | | | H0555: 1. | | | |
| 206 | HNTCP13 | 909770 | 216 | 1-960 | 829 | | AR061: 3, AR089: 2 | 12q12-q13.1 | 126337, | |
| | | | | | | | L0750: 4, H0519: 3, | | 600194, | |
| | | | | | | | L0666: 2, L0565: 2, | | 600231, | |
| | | | | | | | H0539: 2, L0742: 2, | | 600808, | |
| | | | | | | | L0744: 2, L0754: 2, | | 601284, | |
| | | | | | | | L0777: 2, L0759: 2, | | 601769, | |
| | | | | | | | H0662: 1, S0045: 1, | | 601769, | |
| | | | | | | | S0346: 1, H0251: 1, | | 602116 | |
| | | | | | | | H0030: 1, H0628: 1, | | | |
| | | | | | | | H0674: 1, H0529: 1, | | | |
| | | | | | | | L0770: 1, L0764: 1, | | | |
| | | | | | | | L0526: 1, L0783: 1, | | | |
| | | | | | | | L0787: 1, H0547: 1, | | | |
| | | | | | | | H0521: 1, H0696: 1, | | | |
| | | | | | | | H0555: 1, L0747: 1, | | | |
| | | | | | | | L0749: 1, L0786: 1, | | | |
| | | | | | | | L0779: 1, L0780: 1, | | | |
| | | | | | | | L0752: 1 and L0592: 1. | | | |
| 207 | HNTMD79 | 934522 | 217 | 182-586 | 830 | | AR089: 2, AR061: 2 | | | |
| | | | | | | | H0519: 2, S0420: 1, | | | |
| | | | | | | | T0114: 1, H0013: 1, | | | |
| | | | | | | | S0346. 1, H0038: 1, | | | |
| | | | | | | | S0142: 1, H0520: 1, | | | |
| | | | | | | | H0521: 1 and H0136: 1. | | | |
| 208 | HNTMH70 | 757184 | 218 | 2-688 | 831 | Pro-1 to Glu-6, | AR089: 0, AR061: 0 | | | |
| | | | | | | His-17 to Lys-22, | H0520: 1 | | | |
| | | | | | | Pro-52 to Gln-58. | | | | |
| 209 | HNTNB14 | 909942 | 219 | 2-658 | 832 | Ala-2 to Gln-9, | AR089: 1, AR061: 1 | | | |
| | | | | | | Arg-22 to Val-29, | S0007: 1, S0222: 1, | | | |
| | | | | | | Glu-51 to Leu-64. | S0049: 1, L0438: 1, | | | |
| | | | | | | | H0520: 1 and L0439: 1. | | | |
| 210 | HODFF88 | 974911 | 220 | 14-544 | 833 | His-8 to Gly-18, | AR054: 34, AR051: | | | |
| | | | | | | Glu-150 to Leu-167. | 29, AR050: 23, AR089: | | | |
| | | | | | | | 4, AR061: 4 | | | |
| | | | | | | | H0615: 1 | | | |
| 211 | HOHCE47 | 1216683 | 221 | 629-2161 | 834 | Tyr-83 to Ser-92, | AR061: 1, AR089: 0 | | | |
| | | | | | | Leu-118 to Tyr-123, | S0040: 1, H0580: 1, | | | |
| | | | | | | Leu-137 to Ser-143, | S0222: 1, H0355: 1, | | | |
| | | | | | | Gln-148 to Ser-158. | S0250: 1, L0565: 1 and | | | |
| | | | | | | | S0152: 1. | | | |
| | | 911566 | 554 | 1-429 | 1167 | Gly-1 to Trp-6. | | | | |
| 212 | HPCRV84 | 945856 | 222 | 112-417 | 835 | Thr-1 to Leu-12. | AR089: 0, AR061: 0 | | | |
| 213 | HRACK83 | 888037 | 223 | 1-471 | 836 | Gln-15 to Gln-21. | AR089: 3, AR061: 2 | | | |
| | | | | | | | L0803: 4, L0758: 3, | | | |
| | | | | | | | S0212: 2, S0358: 2, | | | |
| | | | | | | | H0038: 2, L0770: 2, | | | |
| | | | | | | | L0767: 2, L0766: 2, | | | |
| | | | | | | | L0748: 2, L0751: 2, | | | |
| | | | | | | | L0747: 2, L0759: 2, | | | |
| | | | | | | | L0588: 2, L0599: 2, | | | |
| | | | | | | | H0411: 1, H0392: 1, | | | |
| | | | | | | | H0333: 1, L0021: 1, | | | |
| | | | | | | | H0118: 1, T0115: 1, | | | |
| | | | | | | | L0471: 1, L0163: 1, | | | |
| | | | | | | | H0633: 1, L0769: 1, | | | |
| | | | | | | | L0764: 1, L0775: 1, | | | |
| | | | | | | | L0376: 1, L0806: 1, | | | |
| | | | | | | | L0805: 1, L0807: 1, | | | |
| | | | | | | | L0787: 1, H0547: 1, | | | |
| | | | | | | | S0122: 1, H0555: 1, | | | |
| | | | | | | | H0478: 1, L0744: 1, | | | |
| | | | | | | | L0740: 1, L0749: 1, | | | |
| | | | | | | | L0750: 1, L0755: 1 and | | | |
| | | | | | | | L0595: 1. | | | |
| 214 | HRADM45 | 717358 | 224 | 2-472 | 837 | Lys-1 to Leu-6, | AR089: 14, AR061: 6 | | | |
| | | | | | | Asp-25 to Pro-30. | H0555: 1 and L0777: | | | |
| | | | | | | | 1. | | | |
| 215 | HRAED74 | 942527 | 225 | 289-651 | 838 | His-9 to Ile-15. | AR061: 1, AR089: 1 | | | |
| | | | | | | | S0222: 3, H0052: 3, | | | |
| | | | | | | | L0361: 3, H0179: 2, | | | |
| | | | | | | | L0769: 2, H0521: 2, | | | |
| | | | | | | | H0555: 2, L0779: 2, | | | |
| | | | | | | | L0758: 2, H0663: 1, | | | |
| | | | | | | | H0549: 1, S0220: 1, | | | |
| | | | | | | | H0586: 1, H0156: 1, | | | |
| | | | | | | | S0010: 1, H0596: 1, | | | |
| | | | | | | | S0051: 1, T0010: 1, | | | |
| | | | | | | | H0271: 1, L0143: 1, | | | |
| | | | | | | | H0617: 1, H0652: 1, | | | |
| | | | | | | | L0764: 1, L0794: 1, | | | |
| | | | | | | | L0806: 1, L0809: 1, | | | |
| | | | | | | | H0518: 1, H0478: 1, | | | |
| | | | | | | | L0751: 1, L0747: 1, | | | |
| | | | | | | | L0750: 1, L0780: 1, | | | |
| | | | | | | | L0731: 1 and L0366: 1. | | | |
| 216 | HRODZ70 | 942673 | 226 | 3-440 | 839 | Lys-49 to Lys-54, | AR089: 12, AR061: 4 | | | |
| | | | | | | Trp-106 to Lys-112, | H0598: 1 and H0135: | | | |
| | | | | | | Leu-130 to Gly-141. | 1. | | | |
| 217 | HSKAC24 | 823869 | 227 | 98-481 | 840 | Ser-1 to Asp-7, | AR061: 2, AR089: 1 | | | |
| | | | | | | Leu-38 to Ser-44, | H0370: 2, S0002: 1, | | | |
| | | | | | | Pro-85 to Tyr-90. | S0428: 1 and S0027: 1. | | | |
| 218 | HSSMT34 | 911294 | 228 | 56-553 | 841 | Glu-29 to Arg-35, | AR061: 4, AR089: 3 | | | |
| | | | | | | Arg-50 to Leu-55, | L0439: 6, L0777: 6, | | | |
| | | | | | | Leu-60 to Ser-69, | H0052: 4, L0748: 4, | | | |
| | | | | | | Lys-102 to Asp-108, | H0634: 3, L0662: 3, | | | |
| | | | | | | Pro-133 to Gln-141. | L0805: 3, L0659: 3, | | | |
| | | | | | | | L0438: 3, H0547: 3, | | | |
| | | | | | | | L0750: 3, L0758: 3, | | | |
| | | | | | | | H0208: 2, H0123: 2, | | | |
| | | | | | | | H0014: 2, H0617: 2, | | | |
| | | | | | | | H0135: 2, L0769: 2, | | | |
| | | | | | | | L0766: 2, L0803: 2, | | | |
| | | | | | | | L0776: 2, L0666: 2, | | | |
| | | | | | | | L0751: 2, L0745: 2, | | | |
| | | | | | | | L0731: 2, H0265: 1, | | | |
| | | | | | | | S0408: 1, H0549: 1, | | | |
| | | | | | | | H0497: 1, L0622: 1, | | | |
| | | | | | | | H0581: 1, H0194: 1, | | | |
| | | | | | | | L0738: 1, H0546: 1, | | | |
| | | | | | | | H0024: 1, S0362: 1, | | | |
| | | | | | | | L0163: 1, T0010: 1, | | | |
| | | | | | | | H0083: 1, H0510: 1, | | | |
| | | | | | | | H0266: 1, H0428: 1, | | | |
| | | | | | | | H0622: 1, H0673: 1, | | | |
| | | | | | | | H0598: 1, S0036: 1, | | | |
| | | | | | | | H0163: 1, H0413: 1, | | | |
| | | | | | | | L0370: 1, T0041: 1, | | | |
| | | | | | | | H0647: 1, L0637: 1, | | | |
| | | | | | | | L0667: 1, L0772: 1, | | | |
| | | | | | | | L0646: 1, L0800: 1, | | | |
| | | | | | | | L0764: 1, L0649: 1, | | | |
| | | | | | | | L0657: 1, L0809: 1, | | | |
| | | | | | | | L0788: 1, L0663: 1, | | | |
| | | | | | | | S0374: 1, H0520: 1, | | | |
| | | | | | | | H0670: 1, H0666: 1, | | | |
| | | | | | | | S0330: 1, H0539: 1, | | | |
| | | | | | | | H0521: 1, H0696: 1, | | | |
| | | | | | | | H0478: 1, S0028: 1, | | | |
| | | | | | | | L0741: 1, L0747: 1, | | | |
| | | | | | | | L0749: 1, L0780: 1, | | | |
| | | | | | | | L0752: 1 and H0543: 1. | | | |
| 219 | HT3BG12 | 921593 | 229 | 1-381 | 842 | Glu-1 to Ala-15, | AR061: 8, AR089: 3 | | | |
| | | | | | | Lys-25 to Ser-32, | L0758: 3, H0159: 2, | | | |
| | | | | | | Asp-45 to Thr-51, | S0001: 1, H0618: 1, | | | |
| | | | | | | Pro-59 to Pro-65, | H0660: 1 and L0779: 1. | | | |
| | | | | | | Pro-78 to Ser-85. | | | | |
| 220 | HTEGO05 | 932583 | 230 | 3-884 | 843 | Pro-12 to Tyr-21. | AR089: 1, AR061: 0 | | | |
| | | | | | | | H0038: 2, L0745: 2 | | | |
| | | | | | | | and H0616: 1. | | | |
| 221 | HTEKT33 | 953308 | 231 | 200-1426 | 844 | | AR089: 15, AR061: 9 | | | |
| | | | | | | | L0766: 4, L0745: 3, | | | |
| | | | | | | | L0752: 3, S0360: 2, | | | |
| | | | | | | | L0748: 2, L0746: 2, | | | |
| | | | | | | | L0755: 2, H0624: 1, | | | |
| | | | | | | | S0114: 1, H0098: 1, | | | |
| | | | | | | | L0471: 1, H0083: 1, | | | |
| | | | | | | | H0428: 1, L0483: 1, | | | |
| | | | | | | | H0090: 1, H0616: 1, | | | |
| | | | | | | | H0494: 1, H0560: 1, | | | |
| | | | | | | | H0509: 1, L0761: 1, | | | |
| | | | | | | | L0772: 1, L0803: 1, | | | |
| | | | | | | | L0776: 1, L0655: 1, | | | |
| | | | | | | | L0792: 1, L0664: 1, | | | |
| | | | | | | | S0374: 1, L0438: 1, | | | |
| | | | | | | | H0520: 1, H0519: 1, | | | |
| | | | | | | | H0435: 1, H0648: 1, | | | |
| | | | | | | | S0152: 1, H0521: 1, | | | |
| | | | | | | | H0478: 1, L0747: 1, | | | |
| | | | | | | | L0756: 1, L0779: 1, | | | |
| | | | | | | | L0758: 1, L0759: 1, | | | |
| | | | | | | | H0667: 1, H0543: 1 and | | | |
| | | | | | | | L0465: 1. | | | |
| 222 | HTEMU66 | 944419 | 232 | 454-963 | 845 | Ala-1 to Gln-7, | AR061: 7, AR089: 5 | | | |
| | | | | | | Lys-24 to Ser-30, | H0616: 1 | | | |
| | | | | | | Pro-44 to Asn-53, | | | | |
| | | | | | | Glu-104 to Asp-112, | | | | |
| | | | | | | Leu-152 to Ser-157. | | | | |
| 223 | HTEMV09 | 909843 | 233 | 1-711 | 846 | Asp-22 to Asp-28, | AR089: 13, AR061: 13 | | | |
| | | | | | | Leu-98 to Trp-103, | L0666: 3, L0758: 3, | | | |
| | | | | | | Glu-123 to Trp-154. | H0616: 2, L0779: 2, | | | |
| | | | | | | | S0036: 1, L0598: 1, | | | |
| | | | | | | | L0766: 1, L0651: 1, | | | |
| | | | | | | | L0806: 1, L0776: 1, | | | |
| | | | | | | | H0144: 1, H0547: 1, | | | |
| | | | | | | | H0672: 1 and H0555: 1. | | | |
| 224 | HTEMV66 | 1151075 | 234 | 861-175 | 847 | Ile-39 to Ser-46, | AR061: 5, AR089: 1 | | | |
| | | | | | | Val-69 to Gln-75, | H0616: 1 and L0758: | | | |
| | | | | | | Phe-90 to Ser-100. | 1. | | | |
| | | 813038 | 555 | 1-318 | 1168 | Ser-38 to Pro-45. | | | | |
| 225 | HTGAU79 | 1175071 | 235 | 62-976 | 848 | His-12 to Arg-20, | AR061: 7, AR089: 4 | | | |
| | | | | | | Pro-26 to Asp-43, | H0551: 3, H0529: 3, | | | |
| | | | | | | Ala-62 to Glu-70, | L0769: 3, L0758: 3, | | | |
| | | | | | | Arg-78 to Arg-83, | S0418: 2, L0770: 2, | | | |
| | | | | | | Phe-100 to Gln-105, | L0773: 2, L0521: 2, | | | |
| | | | | | | Gly-129 to Glu-136, | H0701: 2, S0126: 2, | | | |
| | | | | | | Met-182 to Gly-190, | L0747: 2, L0731: 2, | | | |
| | | | | | | Tyr-277 to Ala-284. | L0759: 2, L0589: 2, | | | |
| | | | | | | | L0601: 2, H0624: 1, | | | |
| | | | | | | | H0149: 1, H0556: 1, | | | |
| | | | | | | | H0295: 1, S0134: 1, | | | |
| | | | | | | | H0583: 1, H0661: 1, | | | |
| | | | | | | | H0592: 1, H0013: 1, | | | |
| | | | | | | | H0635: 1, H0581: 1, | | | |
| | | | | | | | S0250: 1, H0212: 1, | | | |
| | | | | | | | H0412: 1, S0144: 1, | | | |
| | | | | | | | L0763: 1, L0645: 1, | | | |
| | | | | | | | L0764: 1, L0794: 1, | | | |
| | | | | | | | L0766: 1, L0775: 1, | | | |
| | | | | | | | L0783: 1, L0665: 1, | | | |
| | | | | | | | H0519: 1, H0435: 1, | | | |
| | | | | | | | H0672: 1, H0436: 1, | | | |
| | | | | | | | S3014: 1, S0028: 1, | | | |
| | | | | | | | L0750: 1, L0777: 1, | | | |
| | | | | | | | L0366: 1, H0667: 1 and | | | |
| | | | | | | | H0423: 1. | | | |
| | | 940369 | 556 | 63-977 | 1169 | His-12 to Arg-20, | | | | |
| | | | | | | | Pro-26 to Asp-43, | | | |
| | | | | | | | Ala-62 to Glu-70, | | | |
| | | | | | | | Arg-78 to Arg-83, | | | |
| | | | | | | | Phe-100 to Gln-105, | | | |
| | | | | | | | Gly-129 to Glu-136. | | | |
| 226 | HTLEJ11 | 973302 | 236 | 2-802 | 849 | Tyr-52 to Gln-60, | AR061: 3, AR089: 1 | 15q13-qter | | |
| | | | | | | Phe-86 to Ala-94, | H0618: 3 and H0253: | | | |
| | | | | | | Lys-111 to Arg-118, | 1. | | | |
| | | | | | | His-193 to Tyr-198. | | | | |
| 227 | HTLIY52 | 1218691 | 237 | 180-1376 | 850 | Pro-3 to Gly-8, | AR061: 0, AR089: 0 | | | |
| | | | | | | Val-21 to Gly-30, | H0618: 64, H0253: 52, | | | |
| | | | | | | Gly-68 to Ala-85, | L0758: 6, L0779: 2, | | | |
| | | | | | | His-94 to Gly-99, | H0392: 1, H0038: 1, | | | |
| | | | | | | Ala-105 to Arg-110, | L0761: 1, L0803: 1, | | | |
| | | | | | | Ala-114 to Gln-138, | L0806: 1 and L0697: 1. | | | |
| | | | | | | Arg-143 to Glu-155, | | | | |
| | | | | | | Leu-202 to Arg-222, | | | | |
| | | | | | | Arg-287 to Ser-292, | | | | |
| | | | | | | Pro-325 to Arg-332, | | | | |
| | | | | | | Arg-337 to Gly-351, | | | | |
| | | | | | | Pro-389 to Arg-399. | | | | |
| | | 942161 | 557 | 1-1368 | 1170 | | | | | |
| 228 | HTOAK34 | 966800 | 238 | 918-1196 | 851 | Ser-67 to Trp-77. | AR089: 1, AR061: 1 | | | |
| | | | | | | | L0766: 2, H0264: 1 | | | |
| | | | | | | | and H0521: 1. | | | |
| 229 | HTPGG25 | 911282 | 239 | 3-392 | 852 | Pro-3 to Arg-8. | AR061: 2, AR089: 2 | | | |
| | | | | | | | L0439: 6, L0777: 6, | | | |
| | | | | | | | H0052: 4, L0748: 4, | | | |
| | | | | | | | H0634: 3, L0662: 3, | | | |
| | | | | | | | L0805: 3, L0659: 3, | | | |
| | | | | | | | L0438: 3, H0547: 3, | | | |
| | | | | | | | L0750: 3, L0758: 3, | | | |
| | | | | | | | H0208: 2, H0123: 2, | | | |
| | | | | | | | H0014: 2, H0617: 2, | | | |
| | | | | | | | H0135: 2, L0769: 2, | | | |
| | | | | | | | L0766: 2, L0803: 2, | | | |
| | | | | | | | L0776: 2, L0666: 2, | | | |
| | | | | | | | L0751: 2, L0745: 2, | | | |
| | | | | | | | L0731: 2, H0265: 1, | | | |
| | | | | | | | S0408: 1, H0549: 1, | | | |
| | | | | | | | H0497: 1, L0622: 1, | | | |
| | | | | | | | H0581: 1, H0194: 1, | | | |
| | | | | | | | L0738: 1, H0546: 1, | | | |
| | | | | | | | H0024: 1, S0362: 1, | | | |
| | | | | | | | L0163: 1, T0010: 1, | | | |
| | | | | | | | H0083: 1, H0510: 1, | | | |
| | | | | | | | H0266: 1, H0428: 1, | | | |
| | | | | | | | H0622: 1, H0673: 1, | | | |
| | | | | | | | H0598: 1, S0036: 1, | | | |
| | | | | | | | H0163: 1, H0413: 1, | | | |
| | | | | | | | L0370: 1, T0041: 1, | | | |
| | | | | | | | H0647: 1, L0637: 1, | | | |
| | | | | | | | L0667: 1, L0772: 1, | | | |
| | | | | | | | L0646: 1, L0800: 1, | | | |
| | | | | | | | L0764: 1, L0649: 1, | | | |
| | | | | | | | L0657: 1, L0809: 1, | | | |
| | | | | | | | L0788: 1, L0663: 1, | | | |
| | | | | | | | S0374: 1, H0520: 1, | | | |
| | | | | | | | H0670: 1, H0666: 1, | | | |
| | | | | | | | S0330: 1, H0539: 1, | | | |
| | | | | | | | H0521: 1, H0696: 1, | | | |
| | | | | | | | H0478: 1, S0028: 1, | | | |
| | | | | | | | L0741: 1, L0747: 1, | | | |
| | | | | | | | L0749: 1, L0780: 1, | | | |
| | | | | | | | L0752: 1 and H0543: 1. | | | |
| 230 | HUJAD24 | 1161319 | 240 | 770-1237 | 853 | Gln-49 to Thr-69, | AR089: 1, AR061:. 0 | | | |
| | | | | | | His-129 to Cys-143. | L0750: 3, H0650: 2, | | | |
| | | | | | | | H0637: 2, H0265: 1, | | | |
| | | | | | | | H0556: 1, S0222: 1, | | | |
| | | | | | | | H0040: 1, H0280: 1, | | | |
| | | | | | | | L0655: 1, L0789: 1 and | | | |
| | | | | | | | L0666: 1. | | | |
| | | 911498 | 558 | 3-293 | 1171 | | | | | |
| 231 | HUTSF11 | 966029 | 241 | 3-302 | 854 | Glu-1 to Glu-6, | AR089: 0, AR061: 0 | | | |
| | | | | | | | Asn-16 to Arg-22. | S0464: 1 and L0356: 1. | | |
| 232 | HUVGZ88 | 1227628 | 242 | 83-862 | 855 | Gln-216 to Asp-226, | AR089: 2, AR061: 2 | | | |
| | | | | | | Thr-250 to Thr-256. | L0789: 4, L0758: 4, | | | |
| | | | | | | | H0657: 3, H0052: 3, | | | |
| | | | | | | | L0438: 3, L0744: 3, | | | |
| | | | | | | | L0779: 3, L0005: 2, | | | |
| | | | | | | | H0581: 2, H0194: 2, | | | |
| | | | | | | | H0046: 2, H0038: 2, | | | |
| | | | | | | | L0800: 2, L0659: 2, | | | |
| | | | | | | | H0521: 2, L0743: 2, | | | |
| | | | | | | | L0439: 2, H0556: 1, | | | |
| | | | | | | | S0282: 1, S0358: 1, | | | |
| | | | | | | | H0619: 1, H0586: 1, | | | |
| | | | | | | | H0618: 1, H0231: 1, | | | |
| | | | | | | | S0362: 1, H0622: 1, | | | |
| | | | | | | | T0006: 1, H0616: 1, | | | |
| | | | | | | | H0413: 1, H0623: 1, | | | |
| | | | | | | | L0351: 1, S0150: 1, | | | |
| | | | | | | | L0769: 1, L0372: 1, | | | |
| | | | | | | | L0662: 1, L0794: 1, | | | |
| | | | | | | | L0775: 1, L0651: 1, | | | |
| | | | | | | | L0527: 1, L0657: 1, | | | |
| | | | | | | | L0666: 1, H0547: 1, | | | |
| | | | | | | | H0690: 1, H0658: 1, | | | |
| | | | | | | | H0672: 1, H0539: 1, | | | |
| | | | | | | | S0378: 1, H0555: 1, | | | |
| | | | | | | | L0754: 1, L0747: 1, | | | |
| | | | | | | | L0780: 1, L0596: 1, | | | |
| | | | | | | | S0192: 1, H0542: 1 and | | | |
| | | | | | | | H0423: 1. | | | |
| | | 959020 | 559 | 83-439 | 1172 | Asn-89 to Asn-95. | | | | |
| 233 | HWADY66 | 1096252 | 243 | 365-117 | 856 | | AR061: 1, AR089: 1 | | | |
| | | | | | | | H0581: 1, H0494: 1, | | | |
| | | | | | | | H0521: 1, H0444: 1, | | | |
| | | | | | | | H0543: 1 and L0465: 1. | | | |
| | | 734565 | 560 | 1-186 | 1173 | | | | | |
| 234 | HWAFG04 | 952878 | 244 | 1658-789 | 857 | Gln-10 to Asp-120, | AR089: 17, AR061: 8 | | | |
| | | | | | | Ser-189 to Phe-207, | L0789: 4, L0758: 4, | | | |
| | | | | | | Cys-218 to Ser-228, | H0657: 3, H0052: 3, | | | |
| | | | | | | Gln-240 to Ala-245, | L0438: 3, L0744: 3, | | | |
| | | | | | | Glu-263 to Ser-271. | L0779: 3, L0005: 2, | | | |
| | | | | | | | H0581: 2, H0194: 2, | | | |
| | | | | | | | H0046: 2, H0038: 2, | | | |
| | | | | | | | L0800: 2, L0659: 2, | | | |
| | | | | | | | H0521: 2, L0743: 2, | | | |
| | | | | | | | L0439: 2, H0556: 1, | | | |
| | | | | | | | S0282: 1, S0358: 1, | | | |
| | | | | | | | H0619: 1, H0586: 1, | | | |
| | | | | | | | H0618: 1, H0231: 1, | | | |
| | | | | | | | S0362: 1, H0622: 1, | | | |
| | | | | | | | T0006: 1, H0616: 1, | | | |
| | | | | | | | H0413: 1, H0623: 1, | | | |
| | | | | | | | L0351: 1, S0150: 1, | | | |
| | | | | | | | L0769: 1, L0372: 1, | | | |
| | | | | | | | L0662: 1, L0794: 1, | | | |
| | | | | | | | L0775: 1, L0651: 1, | | | |
| | | | | | | | L0527: 1, L0657: 1, | | | |
| | | | | | | | L0666: 1, H0547: 1, | | | |
| | | | | | | | H0690: 1, H0658: 1, | | | |
| | | | | | | | H0672: 1, H0539: 1, | | | |
| | | | | | | | S0378: 1, H0555: 1, | | | |
| | | | | | | | L0754: 1, L0747: 1, | | | |
| | | | | | | | L0780: 1, L0596: 1, | | | |
| | | | | | | | S0192: 1, H0542: 1 and | | | |
| | | | | | | | H0423: 1. | | | |
| 235 | HWAFS18 | 948434 | 245 | 54-791 | 858 | Pro-1 to Pro-7, | AR089: 4, AR061: 3 | | | |
| | | | | | | Leu-10 to Lys-18, | H0581: 3, H0622: 3, | | | |
| | | | | | | Val-119 to Lys-126, | H0575: 2, H0090: 2, | | | |
| | | | | | | Gln-146 to Trp-151, | L0777: 2, L0757: 2, | | | |
| | | | | | | Asp-210 to Arg-216. | S0114: 1, H0650: 1, | | | |
| | | | | | | | H0255: 1, S0360: 1, | | | |
| | | | | | | | S0278: 1, H0486: 1, | | | |
| | | | | | | | H0318: 1, H0457: 1, | | | |
| | | | | | | | H0039: 1, H0553: 1, | | | |
| | | | | | | | L0763: 1, L0761: 1, | | | |
| | | | | | | | L0764: 1, L0789: 1, | | | |
| | | | | | | | H0144: 1, S0374: 1, | | | |
| | | | | | | | S0310: 1, H0555: 1, | | | |
| | | | | | | | L0758: 1, H0445: 1 and | | | |
| | | | | | | | S0276: 1. | | | |
| 236 | HWAGS73 | 1150212 | 246 | 1-339 | 859 | Val-14 to Lys-21, | AR089: 2, AR061: 2 | | | |
| | | | | | | Gln-41 to Trp-46, | H0581: 3, H0622: 3, | | | |
| | | | | | | Ala-98 to Pro-103. | H0575: 2, H0090: 2, | | | |
| | | | | | | | L0777: 2, L0757: 2, | | | |
| | | | | | | | S0114: 1, H0650: 1, | | | |
| | | | | | | | H0255: 1, S0360: 1, | | | |
| | | | | | | | S0278: 1, H0486: 1, | | | |
| | | | | | | | H0318: 1, H0046: 1, | | | |
| | | | | | | | H0457: 1, H0039: 1, | | | |
| | | | | | | | H0553: 1, L0763: 1, | | | |
| | | | | | | | L0761: 1, L0764: 1, | | | |
| | | | | | | | L0789: 1, H0144: 1, | | | |
| | | | | | | | S0374: 1, S0310: 1, | | | |
| | | | | | | | H0555: 1, L0758: 1, | | | |
| | | | | | | | H0445: 1 and S0276: 1. | | | |
| | | 894404 | 561 | 1-339 | 1174 | Val-14 to Lys-21, | | | | |
| | | | | | | Gln-41 to Trp-46, | | | | |
| | | | | | | Ala-98 to Pro-103. | | | | |
| 237 | HWLEA48 | 927676 | 247 | 100-408 | 860 | Pro-1 to Thr-8. | AR089: 1, AR061: 0 | | | |
| | | | | | | | S0354: 1 and L0596: 1. | | | |
| 238 | HWLHS82 | 934505 | 248 | 2-427 | 861 | Gly-34 to Lys-44, | AR089: 2, AR061: 1 | | | |
| | | | | | | Glu-113 to Glu-118. | L0769: 3, S0354: 1, | | | |
| | | | | | | | H0393: 1, H0355: 1 and | | | |
| | | | | | | | H0124: 1. | | | |
| 239 | HWMIB81 | 955336 | 249 | 1491-922 | 862 | Ile-94 to Asp-99, | AR061: 1, AR089: 1 | | | |
| | | | | | | Asp-118 to Pro-123, | L0748: 2, H0171: 1, | | | |
| | | | | | | Glu-131 to Ile-140, | S0134: 1, S0354: 1, | | | |
| | | | | | | Tyr-143 to Asp-152, | S0358: 1, H0014: 1, | | | |
| | | | | | | Glu-169 to Lys-179. | H0083: 1, HO510: 1, | | | |
| | | | | | | | L0764: 1, L0803: 1, | | | |
| | | | | | | | L0789: 1, H0593: 1, | | | |
| | | | | | | | H0659: 1, H0539: 1, | | | |
| | | | | | | | H0555: 1, L0751: 1, | | | |
| | | | | | | | L0758: 1, L0759: 1 and | | | |
| | | | | | | | L0595: 1. | | | |
| 240 | HCWDV17 | 1105673 | 250 | 32-607 | 863 | Ala-144 to Glu-151, | AR089: 12, AR061: 6 | | | |
| | | | | | | Thr-162 to Thr-168. | H0305: 4 | | | |
| | | 974478 | 562 | 32-697 | 1175 | Ala-144 to Glu-151, | | | | |
| | | | | | | Thr-162 to Thr-168. | | | | |
| 241 | HELDI95 | 1103374 | 251 | 49-525 | 864 | | AR089: 1, AR061: 1 | | | |
| | | | | | | | S0045: 2, S0278: 1, | | | |
| | | | | | | | H0191: 1, H0027: 1, | | | |
| | | | | | | | H0644: 1, S0028: 1, | | | |
| | | | | | | | S0031: 1 and S0260: 1. | | | |
| | | 953059 | 563 | 461-895 | 1176 | Arg-71 to Asp-76. | | | | |
| 242 | HAGFO25 1150845 | 252 | 1-735 | 865 | Gly-1 to Glu-7, | AR061: 9, AR089: 3 | | | | |
| | | | | | | Gly-30 to Gln-40, | L0794: 11, S0010: 3, | | | |
| | | | | | | Gly-69 to Gln-75, | S0346: 3, L0791: 2, | | | |
| | | | | | | Leu-98 to Leu-107, | L0439: 2, L0758: 2, | | | |
| | | | | | | Tyr-146 to Gly-161, | S0222: 1, T0060: 1, | | | |
| | | | | | | Arg-179 to Ser-186. | H0051: 1, S0388: 1, | | | |
| | | | | | | | H0188: 1, S0214: 1, | | | |
| | | | | | | | H0252: 1, L0666: 1, | | | |
| | | | | | | | L0438: 1, L0743: 1, | | | |
| | | | | | | | L0750: 1, L0779: 1, | | | |
| | | | | | | | S0031: 1, L0480: 1, | | | |
| | | | | | | | L0597: 1 and H0667: 1. | | | |
| | | 957992 | 564 | 3-728 | 1177 | Gly-26 to Gln-36, | | | | |
| | | | | | | Gly-65 to Gln-71, | | | | |
| | | | | | | Leu-94 to Leu-103. | | | | |
| 243 | HAWAB54 | 1149319 | 253 | 1440-283 | 866 | Ala-16 to Thr-21, | L0794: 11, S0010: 3, | | | |
| | | | | | | Arg-76 to Asn-104, | S0346: 3, L0791: 2, | | | |
| | | | | | | Ala-123 to Glu-129, | L0439: 2, L0758: 2, | | | |
| | | | | | | Leu-142 to Glu-147, | S0222: 1, T0060: 1, | | | |
| | | | | | | Gly-170 to Gln-180, | H0051: 1, S0388: 1, | | | |
| | | | | | | Gly-209 to Gln-215, | H0188: 1, S0214: 1, | | | |
| | | | | | | Leu-238 to Leu-247, | H0252: 1, L0666: 1, | | | |
| | | | | | | Tyr-286 to Gly-301, | L0438: 1, L0743: 1, | | | |
| | | | | | | Arg-319 to Ser-326. | L0750: 1, L0779: 1, | | | |
| | | | | | | | S0031: 1, L0480: 1, | | | |
| | | | | | | | L0597: 1 and H0667: 1. | | | |
| | | 957993 | 565 | 9-374 | 1178 | Arg-1 to Arg-6. | | | | |
| 244 | HLIBV06 | 934887 | 254 | 3-350 | 867 | Arg-1 to Thr-6, | AR089: 4, AR061: 2 | | | |
| | | | | | | Pro-8 to Arg-24, | L0752: 13, L0777: 10, | | | |
| | | | | | | Glu-30 to Lys-35. | H0663: 7, L0803: 7, | | | |
| | | | | | | | L0731: 7, S0356: 6, | | | |
| | | | | | | | H0441: 6, L0766: 6, | | | |
| | | | | | | | L0758: 6, L0646: 5, | | | |
| | | | | | | | L0659: 5, L0485: 5, | | | |
| | | | | | | | H0586: 4, H0031: 4, | | | |
| | | | | | | | H0553: 4, L0521: 4, | | | |
| | | | | | | | L0664: 4, H0660: 4, | | | |
| | | | | | | | S0378: 4, L0740: 4, | | | |
| | | | | | | | L0754: 4, L0756: 4, | | | |
| | | | | | | | H0431: 3, H0615: 3, | | | |
| | | | | | | | H0673: 3, S0040: 2, | | | |
| | | | | | | | S0354: 2, S0360: 2, | | | |
| | | | | | | | H0369: 2, H0331: 2, | | | |
| | | | | | | | T0040: 2, H0318: 2, | | | |
| | | | | | | | L0471: 2, H0197: 2, | | | |
| | | | | | | | H0428: 2, L0770: 2, | | | |
| | | | | | | | L0662: 2, L0774: 2, | | | |
| | | | | | | | L0651: 2, L0666: 2, | | | |
| | | | | | | | S0374: 2, S0126: 2, | | | |
| | | | | | | | H0518: 2, H0555: 2, | | | |
| | | | | | | | L0747: 2, L0750: 2, | | | |
| | | | | | | | L0759: 2, S0031: 2, | | | |
| | | | | | | | L0591: 2, H0506: 2, | | | |
| | | | | | | | H0352: 2, L0615: 1, | | | |
| | | | | | | | H0685: 1, S0114: 1, | | | |
| | | | | | | | S0358: 1, S0376: 1, | | | |
| | | | | | | | H0637: 1, H0580: 1, | | | |
| | | | | | | | H0411: 1, H0592: 1, | | | |
| | | | | | | | H0632: 1, T0039: 1, | | | |
| | | | | | | | S0280: 1, H0156: 1, | | | |
| | | | | | | | L0021: 1, H0599: 1, | | | |
| | | | | | | | H0098: 1, T0048: 1, | | | |
| | | | | | | | S0474: 1, H0421: 1, | | | |
| | | | | | | | H0251: 1, H0263: 1, | | | |
| | | | | | | | H0596: 1, H0597: 1, | | | |
| | | | | | | | H0231: 1, H0009: 1, | | | |
| | | | | | | | H0199: 1, H0246: 1, | | | |
| | | | | | | | H0057: 1, H0014: 1, | | | |
| | | | | | | | H0355: 1, H0510: 1, | | | |
| | | | | | | | H0379: 1, H0059: 1, | | | |
| | | | | | | | H0494: 1, S0464: 1, | | | |
| | | | | | | | S0466: 1, H0509: 1, | | | |
| | | | | | | | H0641: 1, H0647: 1, | | | |
| | | | | | | | L0369: 1, L0772: 1, | | | |
| | | | | | | | L0771: 1, L0804: 1, | | | |
| | | | | | | | L0805: 1, L0776: 1, | | | |
| | | | | | | | L0657: 1, L0382: 1, | | | |
| | | | | | | | L0809: 1, L0663: 1, | | | |
| | | | | | | | L0665: 1, H0144: 1, | | | |
| | | | | | | | H0691: 1, T0068: 1, | | | |
| | | | | | | | H0520: 1, H0658: 1, | | | |
| | | | | | | | H0648: 1, H0539: 1, | | | |
| | | | | | | | H0521: 1, S0028: 1, | | | |
| | | | | | | | L0744: 1, L0748: 1, | | | |
| | | | | | | | L0779: 1, L0592: 1, | | | |
| | | | | | | | L0604: 1, L0362: 1 and | | | |
| | | | | | | | S0276: 1. | | | |
| 245 | HMALL66 | 1105097 | 255 | 38-376 | 868 | Gln-54 to Val-63, | AR061: 9, AR089: 3 | | | |
| | | | | | | Asn-88 to Pro-93. | L0770: 4, H0638: 1, | | | |
| | | | | | | | S0278: 1, H0641: 1, | | | |
| | | | | | | | L0763: 1, L0809: 1, | | | |
| | | | | | | | L0779: 1 and L0758: 1. | | | |
| | | 956195 | 566 | 39-377 | 1179 | Gln-54 to Val-63, | | | | |
| | | | | | | Asn-88 to Pro-93. | | | | |
| 246 | HOACE12 | 858976 | 256 | 2-349 | 869 | | AR089: 2, AR061: 1 | | | |
| | | | | | | | L0794: 11, S0010: 3, | | | |
| | | | | | | | S0346: 3, L0791: 2, | | | |
| | | | | | | | L0439: 2, L0758: 2, | | | |
| | | | | | | | S0222: 1, T0060: 1, | | | |
| | | | | | | | H0051: 1, S0388: 1, | | | |
| | | | | | | | H0188: 1, S0214: 1, | | | |
| | | | | | | | H0252: 1, L0666: 1, | | | |
| | | | | | | | L0438: 1, L0743: 1, | | | |
| | | | | | | | L0750: 1, L0779: 1, | | | |
| | | | | | | | S0031: 1, L0480: 1, | | | |
| | | | | | | | L0597: 1 and H0667: 1. | | | |
| 247 | HOGCG69 | 924848 | 257 | 480-1187 | 870 | Asn-29 to Gly-39, | AR089: 36, AR061: 2 | | | |
| | | | | | | Pro-49 to Asn-56, | H0616: 2, H0618: 1, | | | |
| | | | | | | Gln-112 to Ala-119, | H0604: 1, H0063: 1 and | | | |
| | | | | | | Arg-193 to Gln-201, | H0435: 1. | | | |
| | | | | | | Leu-222 to Gln-227. | | | | |
| 248 | HAGAE09 | 1150864 | 258 | 852-565 | 871 | Ser-47 to His-52. | AR061: 1, AR089: 1 | | | |
| | | | | | | | L0005: 1, H0438: 1, | | | |
| | | | | | | | S0010: 1, L0665: 1, | | | |
| | | | | | | | H0444: 1 and L0594: 1. | | | |
| | | 525926 | 567 | 48-206 | 1180 | Leu-l6 to Ser-32. | | | | |
| 249 | HAGAE34 | 1121869 | 259 | 193-480 | 872 | Phe-7 to Glu-13, | AR089: 10, AR061: 8 | | | |
| | | | | | | Gln-46 to Thr-59. | L0439: 2, S0010: 1, | | | |
| | | | | | | | L0796: 1 and L0805: 1. | | | |
| | | 525878 | 568 | 83-322 | 1181 | | | | | |
| 250 | HARMH78 | 1137572 | 260 | 560-3 | 873 | | AR089: 13, AR061: 5 | | | |
| | | | | | | | S0360: 1, H0592: 1 and | | | |
| | | | | | | | H0087: 1. | | | |
| | | 773210 | 569 | 87-284 | 1182 | Gln-24 to Arg-44. | | | | |
| 251 | HBJLB53 | 1226988 | 261 | 1150-869 | 874 | Asn-8 to Thr-14, | AR089: 9, AR061: 8 | | | |
| | | | | | | Gly-38 to Gly-44, | H0318: 2, H0171: 1, | | | |
| | | | | | | Lys-58 to Val-63, | H0069: 1, H0123: 1, | | | |
| | | | | | | Tyr-71 to Val-78. | L0783: 1, H0521: 1 and | | | |
| | | | | | | | L0748: 1. | | | |
| | | 974122 | 570 | 298-450 | 1183 | Gln-20 to Arg-26. | | | | |
| 252 | HBJNB52 | 1128792 | 262 | 527-75 | 875 | Leu-16 to Glu-22, | AR061: 4, AR089: 4 | | | |
| | | | | | | Tyr-89 to Asn-95. | H0318: 1, L0766: 1 | | | |
| | | | | | | | and L0748: 1. | | | |
| | | 726475 | 571 | 160-357 | 1184 | Pro-15 to Cys-23. | | | | |
| 253 | HDABQ83 | 1201703 | 263 | 183-1 | 876 | Lys-17 to Phe-26, | AR089: 4, AR061: 2 | | | |
| | | | | | | Gln-30 to Leu-43. | L0163: 3, H0497: 2, | | | |
| | | | | | | | L0439: 2, H0662: 1, | | | |
| | | | | | | | S0360: 1, L0717: 1, | | | |
| | | | | | | | S6016: 1, S0051: 1, | | | |
| | | | | | | | H0428: 1, L0662: 1, | | | |
| | | | | | | | L0768: 1, L0774: 1, | | | |
| | | | | | | | L0776: 1, L0656: 1, | | | |
| | | | | | | | L0789: 1, L0666: 1, | | | |
| | | | | | | | L0743: 1, L0749: 1 and | | | |
| | | | | | | | L0777: 1. | | | |
| | | 669619 | 572 | 219-374 | 1185 | Asp-3 to Ser-11. | | | | |
| 254 | HDPDC84 | 1226990 | 264 | 82-2970 | 877 | Lys-32 to Val-61, | AR061: 4, AR089: 1 | | | |
| | | | | | | Pro-83 to Ala-89, | L0749: 6, L0794: 5, | | | |
| | | | | | | Lys-114 to Gly-120, | H0550: 4, H0575: 4, | | | |
| | | | | | | Asn-137 to Arg-147, | H0521: 4, L0601: 4, | | | |
| | | | | | | Gly-186 to Thr-194, | H0580: 3, L0761: 3, | | | |
| | | | | | | Val-211 to Glu-227, | L0766: 3, H0402: 2, | | | |
| | | | | | | Ile-236 to Glu-242, | S0360: 2, H0549: 2, | | | |
| | | | | | | Phe-254 to Lys-264, | H0628: 2, H0264: 2, | | | |
| | | | | | | Glu-328 to Leu-334, | H0560: 2, S0002: 2, | | | |
| | | | | | | Phe-355 to Asn-379, | L0803: 2, L0787: 2, | | | |
| | | | | | | Thr-434 to Leu-444, | L0789: 2, S3014: 2, | | | |
| | | | | | | Glu-495 to Leu-502, | L0777: 2, L0752: 2, | | | |
| | | | | | | Gln-533 to Lys-538, | L0731: 2, H0423: 2, | | | |
| | | | | | | Ser-586 to Trp-594, | H0657: 1, S0212: 1, | | | |
| | | | | | | Leu-605 to Glu-611, | H0306: 1, H0589: 1, | | | |
| | | | | | | Pro-6l4 to Leu-624, | S0358: 1, S0046: 1, | | | |
| | | | | | | Thr-626 to Gln-640, | H0610: 1, H0391: 1, | | | |
| | | | | | | Ser-679 to Ala-684, | H0486: 1, H0250: 1, | | | |
| | | | | | | Lys-750 to Gly-771, | S0280: 1, H0318: 1, | | | |
| | | | | | | Glu-840 to Asp-853, | H0581: 1, H0309: 1, | | | |
| | | | | | | Glu-866 to Glu-874, | H0373: 1, H0030: 1, | | | |
| | | | | | | Ser-881 to Ala-915, | H0135: 1, H0038: 1, | | | |
| | | | | | | Asn-929 to Gly-944, | H0634: 1, H0272: 1, | | | |
| | | | | | | Ala-946 to Thr-953. | H0494: 1, H0509: 1, | | | |
| | | | | | | | S0426: 1, L0662: 1, | | | |
| | | | | | | | L0804: 1, L0775: 1, | | | |
| | | | | | | | L0806: 1, L0659: 1, | | | |
| | | | | | | | L0532: 1, H0547: 1, | | | |
| | | | | | | | H0555: 1, S0432: 1, | | | |
| | | | | | | | L0754: 1, L0747: 1, | | | |
| | | | | | | | L0750: 1, L0779: 1, | | | |
| | | | | | | | L0758: 1, S0031: 1, | | | |
| | | | | | | | L0584: 1 and H0136: 1. | | | |
| | | 616980 | 573 | 64-528 | 1186 | Lys-32 to Val-61, | | | | |
| | | | | | | Pro-83 to Ala-89. | | | | |
| 255 | HDPUF40 | 1212494 | 265 | 49-1713 | 878 | Ala-9 to Glu-20, | AR089: 0, AR061: 0 | | | |
| | | | | | | Thr-22 to Gly-32, | H0436: 11, H0255: 7, | | | |
| | | | | | | Gly-57 to Ser-67, | H0559: 7, H0521: 7, | | | |
| | | | | | | Arg-125 to Ser-138, | H0254: 4, H0423: 4, | | | |
| | | | | | | Gly-167 to Gly-173, | H0265: 3, H0486: 3, | | | |
| | | | | | | Ala-289 to Glu-298, | H0250: 3, H0581: 3, | | | |
| | | | | | | Leu-317 to Ala-323, | H0271: 3, H0124: 3, | | | |
| | | | | | | Glu-339 to Gly-347, | H0264: 3, H0555: 3, | | | |
| | | | | | | Leu-358 to Thr-363, | H0341: 2, S0354: 2, | | | |
| | | | | | | Glu-395 to Arg-411, | H0580: 2, H0370: 2, | | | |
| | | | | | | Ser-446 to Glu-455, | H0586: 2, H0257: 2, | | | |
| | | | | | | Glu-475 to Ala-481, | H0069: 2, H0083: 2, | | | |
| | | | | | | Ser-489 to Leu-497, | H0031: 2, H0634: 2, | | | |
| | | | | | | Ala-501 to Pro-512, | H0488: 2, S0422: 2, | | | |
| | | | | | | Asn-520 to Asn-526, | S0426: 2, L0766: 2, | | | |
| | | | | | | Ser-546 to Glu-553. | L0649: 2, L0805: 2, | | | |
| | | | | | | | L0653: 2, L0776: 2, | | | |
| | | | | | | | L0655: 2, L0731: 2, | | | |
| | | | | | | | H0445: 2, H0543: 2, | | | |
| | | | | | | | H0677: 2, H0556: 1, | | | |
| | | | | | | | H0584: 1, H0140: 1, | | | |
| | | | | | | | H0583: 1, H0656: 1, | | | |
| | | | | | | | H0402: 1, H0305: 1, | | | |
| | | | | | | | H0458: 1, S0140: 1, | | | |
| | | | | | | | H0550: 1, H0497: 1, | | | |
| | | | | | | | H0575: 1, S0474: 1, | | | |
| | | | | | | | H0421: 1, H0024: 1, | | | |
| | | | | | | | H0213: 1, H0087: 1, | | | |
| | | | | | | | H0272: 1, H0641: 1, | | | |
| | | | | | | | S0144: 1, L0763: 1, | | | |
| | | | | | | | L0761: 1, L0662: 1, | | | |
| | | | | | | | L0794: 1, L0803: 1, | | | |
| | | | | | | | L0804: 1, L0659: 1, | | | |
| | | | | | | | L0787: 1, L0666: 1, | | | |
| | | | | | | | L0663: 1, H0518: 1, | | | |
| | | | | | | | S0044: 1, H0576: 1, | | | |
| | | | | | | | L0756: 1, H0422: 1, | | | |
| | | | | | | | S0452: 1 and H0506: 1. | | | |
| | | 970586 | 574 | 49-705 | 1187 | Ala-9 to Glu-20, | | | | |
| | | | | | | Thr-22 to Gly-32, | | | | |
| | | | | | | Gly-57 to Ser-67, | | | | |
| | | | | | | Arg-125 to Ser-138, | | | | |
| | | | | | | Gly-167 to Gln-176. | | | | |
| 256 | HDPWU07 | 1228286 | 266 | 1036-1416 | 879 | Ser-77 to His-82. | AR089: 2, AR061: 1 | | | |
| | | | | | | | H0587: 3, L0664: 3, | | | |
| | | | | | | | L0665: 3, H0648: 3, | | | |
| | | | | | | | L0740: 3, H0581: 2, | | | |
| | | | | | | | L0659: 2, H0539: 2, | | | |
| | | | | | | | H0521: 2, L0750: 2, | | | |
| | | | | | | | L0777: 2, L0759: 2, | | | |
| | | | | | | | H0423: 2, S0218: 1, | | | |
| | | | | | | | H0661: 1, H0305: 1, | | | |
| | | | | | | | H0459: 1, S0360: 1, | | | |
| | | | | | | | H0580: 1, L0717: 1, | | | |
| | | | | | | | H0486: 1, T0074: 1, | | | |
| | | | | | | | H0036: 1, H0051: 1, | | | |
| | | | | | | | S0388: 1, H0039: 1, | | | |
| | | | | | | | H0553: 1, H0124: 1, | | | |
| | | | | | | | H0412: 1, L0770: 1, | | | |
| | | | | | | | L0662: 1, L0768: 1, | | | |
| | | | | | | | L0766: 1, L0649: 1, | | | |
| | | | | | | | L0775: 1, L0789: 1, | | | |
| | | | | | | | L0791: 1, L0532: 1, | | | |
| | | | | | | | S0216: 1, H0682: 1, | | | |
| | | | | | | | H0659: 1, H0670: 1, | | | |
| | | | | | | | S0270: 1, H0540: 1, | | | |
| | | | | | | | L0747: 1, L0780: 1, | | | |
| | | | | | | | L0755: 1, L0592: 1, | | | |
| | | | | | | | L0581: 1, L0604: 1 and | | | |
| | | | | | | | H0422: 1. | | | |
| | | 952734 | 575 | 297-446 | 1188 | | | | | |
| 257 | HDTJJ02 | 1106328 | 267 | 86-331 | 880 | Pro-47 to Gly-54. | AR089: 34, AR061: 11 | | | |
| | | | | | | | H0486: 2 | | | |
| | | 913787 | 576 | 3-116 | 1189 | | | | | |
| 258 | HE2GA18 | 1121872 | 268 | 288-1 | 881 | Tyr-1 to Ser-10, | AR089: 1, AR061: 1 | | | |
| | | | | | | Gln-19 to Glu-27. | H0171: 1, H0383: 1 | | | |
| | | | | | | | and S0028: 1. | | | |
| | | 867276 | 577 | 2-160 | 1190 | | | | | |
| 259 | HE2SY03 | 1207925 | 269 | 1084-725 | 882 | Val-10 to Ser-22, | AR089: 6, AR061: 4 | | | |
| | | | | | | Ile-26 to Ser-46, | L0749: 2 and H0624: | | | |
| | | | | | | Thr-86 to Asn-91, | 1. | | | |
| | | | | | | His-110 to Asn-119. | | | | |
| | | 947947 | 578 | 195-455 | 1191 | Ser-7 to Ile-14, | | | | |
| | | | | | | His-48 to Gln-54, | | | | |
| | | | | | | His-68 to His-74, | | | | |
| | | | | | | Pro-80 to His-87. | | | | |
| 260 | HELGY64 | 1228289 | 270 | 1-2463 | 883 | Asn-129 to Ser-140, | AR061: 3, AR089: 3 | | | |
| | | | | | | Glu-164 to Thr-169, | L0751: 10, L0743: 9, | | | |
| | | | | | | Leu-173 to Ser-184, | H0556: 4, S0046: 3, | | | |
| | | | | | | Ala-186 to Arg-192, | L0662: 3, L0779: 3, | | | |
| | | | | | | Lys-239 to Ala-250, | H0265: 2, S0045: 2, | | | |
| | | | | | | Asp-285 to Gly-291, | H0581: 2, H0355: 2, | | | |
| | | | | | | Ser-305 to Gln-316, | H0271: 2, H0030: 2, | | | |
| | | | | | | Thr-334 to Glu-344, | H0063: 2, S0002: 2, | | | |
| | | | | | | Tyr-350 to Asp-365, | H0529: 2, L0372: 2, | | | |
| | | | | | | Gln-373 to Lys-382, | L0659: 2, L0602: 2, | | | |
| | | | | | | Pro-429 to Gly-434, | S0404: 2, L0756: 2, | | | |
| | | | | | | Gly-510 to Arg-518, | L0605: 2, H0423: 2, | | | |
| | | | | | | Pro-531 to Arg-539, | S0114: 1, H0650: 1, | | | |
| | | | | | | Glu-585 to Leu-593, | H0656: 1, L0785: 1, | | | |
| | | | | | | Gln-669 to Ser-674, | S0212: 1, H0663: 1, | | | |
| | | | | | | Pro-693 to Ile-700, | H0662: 1, H0306: 1, | | | |
| | | | | | | Pro-795 to Gly-801. | S0358: 1, S0132: 1, | | | |
| | | | | | | | H0437: 1, H0549: 1, | | | |
| | | | | | | | H0609: 1, H0610: 1, | | | |
| | | | | | | | H0602: 1, H0587: 1, | | | |
| | | | | | | | H0333: 1, H0559: 1, | | | |
| | | | | | | | H0486: 1, H0013: 1, | | | |
| | | | | | | | H0069: 1, H0635: 1, | | | |
| | | | | | | | H0156: 1, H0575: 1, | | | |
| | | | | | | | H0590: 1, H0318: 1, | | | |
| | | | | | | | H0052: 1, H0046: 1, | | | |
| | | | | | | | H0457: 1, H0081: 1, | | | |
| | | | | | | | H0083: 1, H0247: 1, | | | |
| | | | | | | | H0284: 1, H0615: 1, | | | |
| | | | | | | | L0194: 1, H0031: 1, | | | |
| | | | | | | | H0038: 1, H0551: 1, | | | |
| | | | | | | | H0272: 1, H0494: 1, | | | |
| | | | | | | | H0625: 1, H0641: 1, | | | |
| | | | | | | | L0763: 1, L0769: 1, | | | |
| | | | | | | | L0761: 1, L0772: 1, | | | |
| | | | | | | | L0771: 1, L0773: 1, | | | |
| | | | | | | | L0648: 1, L0767: 1, | | | |
| | | | | | | | L0768: 1, L0794: 1, | | | |
| | | | | | | | L0766: 1, L0774: 1, | | | |
| | | | | | | | L0375: 1, L0607: 1, | | | |
| | | | | | | | L0788: 1, L0665: 1, | | | |
| | | | | | | | H0144: 1, H0593: 1, | | | |
| | | | | | | | S0126: 1, H0658: 1, | | | |
| | | | | | | | H0660: 1, H0539: 1, | | | |
| | | | | | | | H0555: 1, S3014: 1, | | | |
| | | | | | | | L0777: 1, L0731: 1, | | | |
| | | | | | | | H0445: 1, L0588: 1, | | | |
| | | | | | | | H0542: 1, H0506: 1 and | | | |
| | | | | | | | H0352: 1. | | | |
| | | 934511 | 579 | 1-576 | 1192 | Asn-128 to Ser-139, | | | | |
| | | | | | | Glu-163 to Thr-168, | | | | |
| | | | | | | Leu-172 to Ser-182. | | | | |
| 261 | HFIYW31 | 1151476 | 271 | 521-288 | 884 | Lys-7 to Thr-16, | AR089: 2, AR061: 1 | | | |
| | | | | | | Lys-33 to Asn-41, | L0809: 7, L0771: 6, | | | |
| | | | | | | Glu-52 to Arg-63. | L0766: 6, S0360: 5, | | | |
| | | | | | | | L0805: 4, L0748: 4, | | | |
| | | | | | | | H0674: 3, L0776: 3, | | | |
| | | | | | | | L0756: 3, L0779: 3, | | | |
| | | | | | | | L0770: 2, L0794: 2, | | | |
| | | | | | | | L0518: 2, L0666: 2, | | | |
| | | | | | | | L0439: 2, L0740: 2, | | | |
| | | | | | | | L0749: 2, L0608: 2, | | | |
| | | | | | | | S0242: 2, H0556: 1, | | | |
| | | | | | | | H0306: 1, S0358: 1, | | | |
| | | | | | | | S0376: 1, H0438: 1, | | | |
| | | | | | | | H0597: 1, S6028: 1, | | | |
| | | | | | | | S0036: 1, T0041: 1, | | | |
| | | | | | | | S0002: 1, L0631: 1, | | | |
| | | | | | | | L0769: 1, L0372: 1, | | | |
| | | | | | | | L0764: 1, L0768: 1, | | | |
| | | | | | | | L0803: 1, L0783: 1, | | | |
| | | | | | | | L0545: 1, L0791: 1, | | | |
| | | | | | | | L0664: 1, L0665: 1, | | | |
| | | | | | | | H0144: 1, L0438: 1, | | | |
| | | | | | | | H0689: 1, S0380: 1, | | | |
| | | | | | | | S0013: 1, H0696: 1, | | | |
| | | | | | | | H0555: 1, L0743: 1, | | | |
| | | | | | | | L0744: 1, L0747: 1, | | | |
| | | | | | | | L0731: 1, L0759: 1, | | | |
| | | | | | | | L0596: 1 and L0604: 1. | | | |
| | | 697730 | 580 | 2-181 | 1193 | Gly-43 to Tyr-50. | | | | |
| 262 | HFVIP88 | 1124705 | 272 | 96-299 | 885 | | AR061: 6, AR089: 2 | | | |
| | | | | | | | L0755: 5, H0212: 2, | | | |
| | | | | | | | L0439: 2, L0754: 2, | | | |
| | | | | | | | H0393: 1, H0409: 1, | | | |
| | | | | | | | L0764: 1, L0662: 1, | | | |
| | | | | | | | L0803: 1, L0382: 1, | | | |
| | | | | | | | L0666: 1, L0438: 1, | | | |
| | | | | | | | L0749: 1 and L0752: 1. | | | |
| | | 960741 | 581 | 96-299 | 1194 | | | | | |
| 263 | HGBAS76 | 1193040 | 273 | 1181-1603 | 886 | Asn-36 to Gly-43, | AR089: 1, AR061: 0 | | | |
| | | | | | | Gly-66 to Glu-73, | L0747: 5, L0439: 3, | | | |
| | | | | | | Ser-86 to Pro-92, | L0756: 3, L0775: 2, | | | |
| | | | | | | Asn-124 to Leu-133. | L0755: 2, L0759: 2, | | | |
| | | | | | | | S0342: 1, S6024: 1, | | | |
| | | | | | | | S0376: 1, L0021: 1, | | | |
| | | | | | | | H0150: 1, T0003: 1, | | | |
| | | | | | | | H0014: 1, L0764: 1, | | | |
| | | | | | | | L0794: 1, L0803: 1, | | | |
| | | | | | | | L0783: 1, L0809: 1, | | | |
| | | | | | | | L0666: 1, L0665: 1, | | | |
| | | | | | | | L0438: 1, L0749: 1, | | | |
| | | | | | | | L0779: 1, L0777: 1, | | | |
| | | | | | | | L0758: 1, L0604: 1, | | | |
| | | | | | | | S0026: 1 and H0423: 1. | | | |
| | | 771320 | 582 | 274-426 | 1195 | Asn-18 to Arg-23. | | | | |
| 264 | HHEBB62 | 1151481 | 274 | 459-1 | 887 | Ser-47 to Thr-54, | AR089: 7, AR061: 3 | | | |
| | | | | | | Asn-62 to Asp-67, | L0731: 3, H0395: 2, | | | |
| | | | | | | Pro-109 to Ser-114, | L0764: 2, L0794: 2, | | | |
| | | | | | | Arg-146 to Arg-153. | H0521: 2, T0049: 1, | | | |
| | | | | | | | H0650: 1, S0140: 1, | | | |
| | | | | | | | L0021: 1, H0083: 1, | | | |
| | | | | | | | H0271: 1, L0769: 1, | | | |
| | | | | | | | L0761: 1, L0646: 1, | | | |
| | | | | | | | L0771: 1, L0803: 1, | | | |
| | | | | | | | L0804: 1, L0775: 1, | | | |
| | | | | | | | L0519: 1, H0445: 1, | | | |
| | | | | | | | L0588: 1 and H0542: 1. | | | |
| | | 791469 | 583 | 529-158 | 1196 | Pro-27 to Lys-34, | _________ | | | |
| | | | | | | Glu-49 to Asn-59, | | | | |
| | | | | | | Lys-70 to Lys-82, | | | | |
| | | | | | | Gly-99 to Cys-116. | | | | |
| 265 | HHEHU73 | 1151483 | 275 | 378-746 | 888 | Glu-4 to Leu-11, | AR089: 64, AR061: 15 | | | |
| | | | | | | Gln-30 to Cys-40, | H0542: 2 | | | |
| | | | | | | Pro-53 to Pro-59, | | | | |
| | | | | | | Thr-99 to Ser-104. | | | | |
| | | 923895 | 584 | 61-279 | 1197 | Met-22 to Trp-27. | | | | |
| 266 | HHEMA11 | 1151484 | 276 | 129-497 | 889 | Gln-13 to Ile-29. | AR089: 3, AR061: 1 | | | |
| | | | | | | | H0328: 1, L0758: 1 | | | |
| | | | | | | | and H0543: 1. | | | |
| | | 966924 | 585 | 129-497 | 1198 | Gln-13 to Ile-29. | | | | |
| 267 | HHEQK01 | 1107392 | 277 | 195-1 | 890 | Gln-1 to Thr-6. | AR089: 7, AR061: 1 | | | |
| | | | | | | | L0589: 1, H0542: 1 | | | |
| | | | | | | | and H0543: 1. | | | |
| | | 871911 | 586 | 64-249 | 1199 | | | | | |
| 268 | HHPEM84 | 915639 | 278 | 2-373 | 891 | | AR089: 68, AR061: 29 | 20q11.2-q12 | 139190, | |
| | | | | | | | | | 139190, | |
| | | | | | | | | | 224100, | |
| | | | | | | | | | 600281, | |
| | | | | | | | | | 600281, | |
| | | | | | | | | | 601002, | |
| | | | | | | | | | 601002, | |
| | | | | | | | | | 601146, | |
| | | | | | | | | | 601146, | |
| | | | | | | | | | 601146 | |
| 269 | HHSED84 | 1150832 | 279 | 632-3 | 892 | Asp-73 to Ser-80, | AR061: 8, AR089: 4 | | | |
| | | | | | | Arg-104 to Asp-115, | L0748: 5, L0744: 4, | | | |
| | | | | | | Glu-195 to Pro-202. | L0751: 4, H0039: 3, | | | |
| | | | | | | | H0617: 3, L0646: 3, | | | |
| | | | | | | | L0809: 3, L0779: 3, | | | |
| | | | | | | | H0295: 2, H0255: 2, | | | |
| | | | | | | | S0358: 2, H0575: 2, | | | |
| | | | | | | | H0457: 2, H0181: 2, | | | |
| | | | | | | | H0673: 2, L0637: 2, | | | |
| | | | | | | | L0743: 2, L0750: 2, | | | |
| | | | | | | | L0758: 2, S0116: 1, | | | |
| | | | | | | | H0663: 1, S0356: 1, | | | |
| | | | | | | | S0376: 1, S0360: 1, | | | |
| | | | | | | | H0675: 1, S0007: 1, | | | |
| | | | | | | | H0497: 1, H0590: 1, | | | |
| | | | | | | | H0618: 1, H0253: 1, | | | |
| | | | | | | | H0545: 1, S0051: 1, | | | |
| | | | | | | | H0622: 1, H0030: 1, | | | |
| | | | | | | | H0135: 1, H0538: 1, | | | |
| | | | | | | | S0426: 1, H0529: 1, | | | |
| | | | | | | | L0763: 1, L0769: 1, | | | |
| | | | | | | | L0764: 1, L0771: 1, | | | |
| | | | | | | | L0773: 1, L0775: 1, | | | |
| | | | | | | | L0788: 1, L0663: 1, | | | |
| | | | | | | | H0144: 1, L0438: 1, | | | |
| | | | | | | | H0690: 1, H0670: 1, | | | |
| | | | | | | | H0672: 1, S0328: 1, | | | |
| | | | | | | | S0406: 1, H0187: 1, | | | |
| | | | | | | | L0747: 1, L0749: 1, | | | |
| | | | | | | | L0759: 1 and L0608: 1. | | | |
| | | 706739 | 587 | 2-496 | 1200 | Asn-1 to Asp-8, | | | | |
| | | | | | | Gly-51 to Ser-64. | | | | |
| 270 | HIBCC94 | 1161292 | 280 | 806-258 | 893 | Cys-12 to Gln-17, | AR089: 1, AR061: 1 | | | |
| | | | | | | Lys-47 to Thr-57, | L0439: 4, T0010: 1 and | | | |
| | | | | | | Leu-77 to Gly-92, | L0352: 1. | | | |
| | | | | | | Gln-153 to Arg-160. | | | | |
| | | 504326 | 588 | 3-251 | 1201 | Glu-1 to Arg-6, | | | | |
| | | | | | | Ser-11 to Val-17, | | | | |
| | | | | | | Gln-42 to Arg-54. | | | | |
| | | 504330 | 589 | 470-132 | 1202 | | | | | |
| 271 | HKADN56 | 1220254 | 281 | 370-1650 | 894 | Ser-32 to Glu-39, | AR089: 7, AR061: 4 | | | |
| | | | | | | Ala-60 to Trp-69. | L0754: 12, S0360: 8, | | | |
| | | | | | | | S0152: 7, S0358: 6, | | | |
| | | | | | | | H0046: 6, H0100: 5, | | | |
| | | | | | | | L0751: 5, L0777: 5, | | | |
| | | | | | | | L0601: 5, H0052: 4, | | | |
| | | | | | | | L0740: 4, H0051: 3, | | | |
| | | | | | | | H0266: 3, L0526: 3, | | | |
| | | | | | | | S0374: 3, L0779: 3, | | | |
| | | | | | | | H0265: 2, H0556: 2, | | | |
| | | | | | | | H0341: 2, H0661: 2, | | | |
| | | | | | | | H0619: 2, H0050: 2, | | | |
| | | | | | | | H0083: 2, H0622: 2, | | | |
| | | | | | | | H0617: 2, H0673: 2, | | | |
| | | | | | | | T0042: 2, H0529: 2, | | | |
| | | | | | | | L0763: 2, L0770: 2, | | | |
| | | | | | | | L0772: 2, L0373: 2, | | | |
| | | | | | | | L0374: 2, L0771: 2, | | | |
| | | | | | | | L0662: 2, L0768: 2, | | | |
| | | | | | | | L0809: 2, S0126: 2, | | | |
| | | | | | | | H0435: 2, H0658: 2, | | | |
| | | | | | | | S0332: 2, S0027: 2, | | | |
| | | | | | | | L0748: 2, L0750: 2, | | | |
| | | | | | | | L0756: 2, L0755: 2, | | | |
| | | | | | | | L0758: 2, L0589: 2, | | | |
| | | | | | | | L0591: 2, L0603: 2, | | | |
| | | | | | | | H0656: 1, S0282: 1, | | | |
| | | | | | | | H0484: 1, H0638: 1, | | | |
| | | | | | | | S0356: 1, H0580: 1, | | | |
| | | | | | | | S0140: 1, S0222: 1, | | | |
| | | | | | | | S0005: 1, H0574: 1, | | | |
| | | | | | | | H0253: 1, H0390: 1, | | | |
| | | | | | | | H0421: 1, H0194: 1, | | | |
| | | | | | | | H0085: 1, H0263: 1, | | | |
| | | | | | | | T0110: 1, H0597: 1, | | | |
| | | | | | | | H0545: 1, H0009: 1, | | | |
| | | | | | | | H0012: 1, H0057: 1, | | | |
| | | | | | | | H0267: 1, H0179: 1, | | | |
| | | | | | | | H0188: 1, H0290: 1, | | | |
| | | | | | | | H0252: 1, H0328: 1, | | | |
| | | | | | | | H0424: 1, H0213: 1, | | | |
| | | | | | | | H0031: 1, H0553: 1, | | | |
| | | | | | | | H0032: 1, H0674: 1, | | | |
| | | | | | | | H0361: 1, H0135: 1, | | | |
| | | | | | | | H0038: 1, H0551: 1, | | | |
| | | | | | | | H0264: 1, H0412: 1, | | | |
| | | | | | | | H0059: 1, H0494: 1, | | | |
| | | | | | | | H0561: 1, S0142: 1, | | | |
| | | | | | | | S0344: 1, S0210: 1, | | | |
| | | | | | | | S0002: 1, L0769: 1, | | | |
| | | | | | | | L0644: 1, L0773: 1, | | | |
| | | | | | | | L0767: 1, L0766: 1, | | | |
| | | | | | | | L0776: 1, L0542: 1, | | | |
| | | | | | | | L0783: 1, L0382: 1, | | | |
| | | | | | | | L0530: 1, L0367: 1, | | | |
| | | | | | | | L0790: 1, L0666: 1, | | | |
| | | | | | | | L0663: 1, L0664: 1, | | | |
| | | | | | | | L0665: 1, H0144: 1, | | | |
| | | | | | | | H0520: 1, H0547: 1, | | | |
| | | | | | | | H0593: 1, H0666: 1, | | | |
| | | | | | | | H0696: 1, H0436: 1, | | | |
| | | | | | | | L0747: 1, L0749: 1, | | | |
| | | | | | | | L0757: 1, H0445: 1, | | | |
| | | | | | | | H0707: 1, L0596: 1, | | | |
| | | | | | | | L0593: 1, S0011: 1, | | | |
| | | | | | | | H0668: 1, H0542: 1, | | | |
| | | | | | | | H0423: 1, H0422: 1, | | | |
| | | | | | | | S0456: 1 and H0352: 1. | | | |
| | | 968619 | 590 | 3-257 | 1203 | Lys-11 to Ala-39, | | | | |
| | | | | | | Ser-52 to Asp-57. | | | | |
| 272 | HKIXG58 | 1124750 | 282 | 351-674 | 895 | Lys-50 to Lys-56, | AR061: 2, AR089: 2 | | | |
| | | | | | | Thr-77 to Arg-87. | H0441: 3, L0794: 2, | | | |
| | | | | | | | L0805: 2, L0764: 1 and | | | |
| | | | | | | | L0521: 1. | | | |
| | | 464241 | 591 | 3-200 | 1204 | Ser-9 to Lys-14. | | | | |
| 273 | HLICI13 | 1177963 | 283 | 216-1364 | 896 | Arg-151 to Thr-159, | AR089: 3, AR061: 1 | | | |
| | | | | | | Arg-168 to Lys-173, | L0439: 4, L0769: 2, | | | |
| | | | | | | Glu-181 to His-190, | L0662: 2, L0592: 2, | | | |
| | | | | | | Phe-237 to Asn-242, | S0046: 1, H0618: 1, | | | |
| | | | | | | Asp-267 to Glu-274, | H0545: 1, S0388: 1, | | | |
| | | | | | | Tyr-283 to Pro-300, | S0051: 1, H0355: 1, | | | |
| | | | | | | Pro-306 to Trp-311, | H0264: 1, H0561: 1, | | | |
| | | | | | | Ala-371 to Asp-383. | L0770: 1, L0372: 1, | | | |
| | | | | | | | L0508: 1, H0547: 1, | | | |
| | | | | | | | H0689: 1, L0731: 1 and | | | |
| | | | | | | | L0758: 1. | | | |
| | | 626559 | 592 | 205-510 | 1205 | | | | | |
| 274 | HLTGF17 | 662405 | 284 | 1-234 | 897 | Pro-16 to Leu-22, | AR061: 7, AR089: 6 | | | |
| | | | | | | Arg-32 to Gln-37, | L0766: 4, H0620: 3, | | | |
| | | | | | | Thr-55 to Thr-72. | L0663: 3, L0749: 3, | | | |
| | | | | | | | L0731: 3, S0026: 3, | | | |
| | | | | | | | S0422: 2, L0764: 2, | | | |
| | | | | | | | L0655: 2, L0606: 2, | | | |
| | | | | | | | L0665: 2, L0439: 2, | | | |
| | | | | | | | L0759: 2, S0114: 1, | | | |
| | | | | | | | H0650: 1, H0369: 1, | | | |
| | | | | | | | H0600: 1, H0581: 1, | | | |
| | | | | | | | H0421: 1, H0271: 1, | | | |
| | | | | | | | H0615: 1, H0591: 1, | | | |
| | | | | | | | H0038: 1, H0040: 1, | | | |
| | | | | | | | H0063: 1, H0494: 1, | | | |
| | | | | | | | L0598: 1, L0520: 1, | | | |
| | | | | | | | L0761: 1, L0662: 1, | | | |
| | | | | | | | L0767: 1, L0649: 1, | | | |
| | | | | | | | L0803: 1, L0775: 1, | | | |
| | | | | | | | L0805: 1, L0809: 1, | | | |
| | | | | | | | L0664: 1, L0438: 1, | | | |
| | | | | | | | H0658: 1, H0672: 1, | | | |
| | | | | | | | H0436: 1, L0747: 1 and | | | |
| | | | | | | | S0196: 1. | | | |
| 275 | HLYDC50 | 1151494 | 285 | 2-874 | 898 | Ser-1 to Ser-10, | AR061: 4, AR089: 3 | | | |
| | | | | | | Ser-23 to Asp-38, | L0766: 5, L0806: 3, | | | |
| | | | | | | Arg-67 to Lys-73, | T0010: 2, L0761: 2, | | | |
| | | | | | | Ser-181 to Asp-187, | L0752: 2, H0677: 2, | | | |
| | | | | | | Asp-222 to Ser-233, | S0278: 1, H0486: 1, | | | |
| | | | | | | Pro-248 to Asn-253. | S0038: 1, L0796: 1, | | | |
| | | | | | | | L0644: 1, L0771: 1, | | | |
| | | | | | | | L0659: 1, L0666: 1, | | | |
| | | | | | | | L0664: 1, H0521: 1, | | | |
| | | | | | | | L0779: 1, H0445: 1 and | | | |
| | | | | | | | L0595: 1. | | | |
| | | 677050 | 593 | 2-424 | 1206 | Ser-1 to Ser-10, | | | | |
| | | | | | | Ser-23 to Asp-38. | | | | |
| 276 | HMADD49 | 1217031 | 286 | 2227-803 | 899 | Pro-45 to Ser-50, | AR061: 77, AR089: 30 | | | |
| | | | | | | Thr-54 to Ile-64, | S0136: 3, S0036: 1 and | | | |
| | | | | | | Lys-205 to Arg-211, | S0144: 1. | | | |
| | | | | | | Pro-214 to Gly-220, | | | | |
| | | | | | | Asp-296 to Asp-301, | | | | |
| | | | | | | Pro-355 to Glu-367, | | | | |
| | | | | | | Thr-391 to Glu-396. | | | | |
| | | 867481 | 594 | 2-283 | 1207 | Leu-33 to Phe-38. | | | | |
| 277 | HMEKE78 | 1128290 | 287 | 80-1339 | 900 | Pro-39 to Glu-45, | AR061: 10, AR089: 5 | | | |
| | | | | | | Pro-102 to Arg-107, | S0328: 4, S0218: 3, | | | |
| | | | | | | Tyr-121 to Lys-128, | H0040: 2, L0438: 2, | | | |
| | | | | | | Gln-140 to Ile-169, | L0439: 2, H0624: 1, | | | |
| | | | | | | Arg-269 to Gly-285, | H0431: 1, L0021: 1, | | | |
| | | | | | | Lys-313 to Gly-320, | S0049: 1, H0266: 1, | | | |
| | | | | | | Ala-344 to Thr-350, | H0090: 1, H0561: 1, | | | |
| | | | | | | Arg-356 to Gln-365, | S0422: 1, H0529: 1, | | | |
| | | | | | | Tyr-373 to His-380, | L0659: 1, S0126: 1, | | | |
| | | | | | | Arg-392 to Leu-399, | S0027: 1, S0028: 1, | | | |
| | | | | | | Leu-403 to Gln-408. | S0206: 1, L0748: 1, | | | |
| | | | | | | | L0731: 1, S0031: 1, | | | |
| | | | | | | | L0596: 1, L0608: 1 and | | | |
| | | | | | | | S0011: 1. | | | |
| | | 792383 | 595 | 3-461 | 1208 | Phe-3 to Phe-8, | | | | |
| | | | | | | Pro-30 to Glu-36, | | | | |
| | | | | | | Pro-93 to Arg-98. | | | | |
| 278 | HMSHU26 | 1150833 | 288 | 993-703 | 901 | Ser-41 to Glu-47, | AR061: 5, AR089: 4 | | | |
| | | | | | | Arg-71 to Leu-85, | L0748: 2, H0191: 1, | | | |
| | | | | | | Asp-87 to Glu-97. | H0100: 1, S0002: 1, | | | |
| | | | | | | | L0646: 1, L0794. 1, | | | |
| | | | | | | | L0806: 1 and L0758: 1. | | | |
| | | 681745 | 596 | 29-235 | 1209 | Glu-15 to His-24, | | | | |
| | | | | | | Asn-47 to His-53. | | | | |
| 279 | HNEEB82 | 1076509 | 289 | 261-1 | 902 | Gln-1 to Gly-7, | AR061: 5, AR089: 3 | | | |
| | | | | | | Ser-63 to Gly-68, | L0766: 2, H0575: 1, | | | |
| | | | | | | Pro-74 to Cys-81. | H0179: 1, H0416: 1, | | | |
| | | | | | | | H0539: 1 and L0592: 1. | | | |
| | | 778884 | 597 | 30-260 | 1210 | Glu-1 to Glu-22. | | | | |
| 280 | HNHIA06 | 1162086 | 290 | 605-159 | 903 | Asp-29 to Arg-35, | AR089: 3, AR061: 3 | | | |
| | | | | | | Leu-58 to Thr-64. | S0282: 1 and S0053: 1. | | | |
| | | 859932 | 598 | 120-566 | 1211 | Asp-29 to Arg-35, | | | | |
| | | | | | | Leu-58 to Thr-64. | | | | |
| 281 | HODFY16 | 1105244 | 291 | 370-221 | 904 | Ile-34 to Gly-42. | AR061: 6, AR089: 3 | | | |
| | | | | | | | H0615: 2 and L0766: | | | |
| | | | | | | | 1. | | | |
| | | 958329 | 599 | 163-309 | 1212 | | | | | |
| 282 | HPQSB68 | 1221022 | 292 | 294-97 | 905 | Asp-36 to Lys-42. | AR089: 1, AR061: 1 | | | |
| | | | | | | | S0136: 2 | | | |
| | | 740087 | 600 | 89-247 | 1213 | Leu-7 to Gln-17. | | | | |
| 283 | HRDBH04 | 1150876 | 293 | 329-724 | 906 | Thr-56 to Gly-62, | AR089: 7, AR061: 6 | | | |
| | | | | | | Glu-72 to Gly-81. | L0769: 16, L0776: 16, | | | |
| | | | | | | | L0742: 13, L0745: 13, | | | |
| | | | | | | | L0754: 12, L0748: 11, | | | |
| | | | | | | | L0439: 11, L0747: 10, | | | |
| | | | | | | | L0805: 8, L0438: 6, | | | |
| | | | | | | | L0731: 6, L0764: 5, | | | |
| | | | | | | | L0806: 5, L0749: 5, | | | |
| | | | | | | | L0779: 5, L0752: 5, | | | |
| | | | | | | | L0771: 4, H0052: 3, | | | |
| | | | | | | | L0796: 3, L0761: 3, | | | |
| | | | | | | | L0741: 3, L0756: 3, | | | |
| | | | | | | | L0753: 3, L0758: 3, | | | |
| | | | | | | | S0360: 2, H0013: 2, | | | |
| | | | | | | | H0068: 2, T0041: 2, | | | |
| | | | | | | | L0768: 2, L0659: 2, | | | |
| | | | | | | | L0783: 2, L0809: 2, | | | |
| | | | | | | | H0670: 2, L0746: 2, | | | |
| | | | | | | | L0591: 2, H0265: 1, | | | |
| | | | | | | | H0686: 1, H0583: 1, | | | |
| | | | | | | | H0657: 1, L0785: 1, | | | |
| | | | | | | | H0662: 1, S0418: 1, | | | |
| | | | | | | | S0132: 1, S0222: 1, | | | |
| | | | | | | | H0441: 1, H0455: 1, | | | |
| | | | | | | | L0622: 1, H0486: 1, | | | |
| | | | | | | | T0039: 1, H0036: 1, | | | |
| | | | | | | | S0010: 1, H0544: 1, | | | |
| | | | | | | | H0545: 1, H0123: 1, | | | |
| | | | | | | | H0024: 1, T0010: 1, | | | |
| | | | | | | | H0615: 1, H0622: 1, | | | |
| | | | | | | | T0006: 1, H0604: 1, | | | |
| | | | | | | | H0424: 1, H0213: 1, | | | |
| | | | | | | | H0401: 1, H0182: 1, | | | |
| | | | | | | | H0617: 1, H0124: 1, | | | |
| | | | | | | | H0038: 1, H0488: 1, | | | |
| | | | | | | | H0623: 1, H0059: 1, | | | |
| | | | | | | | S0112: 1, H0494: 1, | | | |
| | | | | | | | L0475: 1, H0334: 1, | | | |
| | | | | | | | H0560: 1, L0640: 1, | | | |
| | | | | | | | L0770: 1, L0630: 1, | | | |
| | | | | | | | L0773: 1, L0766: 1, | | | |
| | | | | | | | L0774: 1, L0775: 1, | | | |
| | | | | | | | L0655: 1, L0807: 1, | | | |
| | | | | | | | L0527: 1, L0788: 1, | | | |
| | | | | | | | L0789: 1, L0666: 1, | | | |
| | | | | | | | H0593: 1, H0682: 1, | | | |
| | | | | | | | H0659: 1, H0660: 1, | | | |
| | | | | | | | H0666: 1, S0380: 1, | | | |
| | | | | | | | L0743: 1, L0777: 1, | | | |
| | | | | | | | L0780: 1, L0755: 1, | | | |
| | | | | | | | L0757: 1, L0759: 1, | | | |
| | | | | | | | L0603: 1, S0026: 1, | | | |
| | | | | | | | H0543: 1 and H0352: 1. | | | |
| | | 922022 | 601 | 285-680 | 1214 | Thr-56 to Gly-62, | | | | |
| | | | | | | Glu-72 to Gly-81. | | | | |
| 284 | HSICR69 | 1226965 | 294 | 547-29 | 907 | Thr-48 to Arg-54, | AR089: 2, AR061: 1 | | | |
| | | | | | | Pro-149 to Ser-155. | H0036: 2 | | | |
| | | 531061 | 602 | 127-273 | 1215 | Ser-14 to Lys-19. | | | | |
| 285 | HSIGJ94 | 1105417 | 295 | 713-438 | 908 | | AR061: 8, AR089: 7 | | | |
| | | | | | | | H0590: 1, L0766: 1, | | | |
| | | | | | | | L0659: 1, L0608: 1 and | | | |
| | | | | | | | L0362: 1. | | | |
| | | 793624 | 603 | 117-284 | 1216 | | | | | |
| 286 | HSYBL15 | 1104299 | 296 | 2-931 | 909 | Pro-26 to Gly-32, | AR061: 1, AR089: 0 | | | |
| | | | | | | Ala-133 to Cys-138, | S0212: 1, H0551: 1 and | | | |
| | | | | | | Asp-145 to Lys-152, | L0366: 1. | | | |
| | | | | | | Leu-164 to Ser-173, | | | | |
| | | | | | | Lys-178 to Ser-183, | | | | |
| | | | | | | Asp-260 to Phe-266. | | | | |
| | | 660053 | 604 | 2-286 | 1217 | Pro-26 to Gly-32. | | | | |
| 287 | HTEKH29 | 855660 | 297 | 478-2028 | 910 | Ser-27 to Glu-35, | AR089: 8, AR061: 7 | | | |
| | | | | | | Thr-43 to Phe-52, | | | | |
| | | | | | | Val-59 to Gln-70, | | | | |
| | | | | | | His-74 to Val-79, | | | | |
| | | | | | | Pro-108 to Lys-122, | | | | |
| | | | | | | Ala-130 to Phe-141, | | | | |
| | | | | | | Val-145 to Ala-151, | | | | |
| | | | | | | Asp-159 to Glu-165, | | | | |
| | | | | | | Ser-185 to Lys-191. | | | | |
| 288 | HTGEL46 | 1151520 | 298 | 331-705 | 911 | Glu-55 to His-72. | AR089: 0, AR061: 0 | | | |
| | | | | | | | S0218: 1, H0264: 1 and | | | |
| | | | | | | | S0053: 1. | | | |
| | | 685425 | 605 | 323-457 | 1218 | | | | | |
| 289 | HTGFA05 | 1198110 | 299 | 3-1262 | 912 | Ile-45 to Arg-52, | AR061: 1, AR089: 0 | | | |
| | | | | | | Phe-77 to Pro-85, | H0556: 10, L0748: 8, | | | |
| | | | | | | Leu-111 to Val-118, | H0620: 7, L0747: 7, | | | |
| | | | | | | Ile-124 to Thr-129, | L0637: 5, H0265: 4, | | | |
| | | | | | | Pro-139 to Gly-151, | H0013: 4, H0551: 4, | | | |
| | | | | | | Arg-186 to Gly-215, | L0776: 4, L0663: 4, | | | |
| | | | | | | Lys-223 to Glu-230. | L0596: 4, H0622: 3, | | | |
| | | | | | | | H0617: 3, L0772: 3, | | | |
| | | | | | | | L0766: 3, S0126: 3, | | | |
| | | | | | | | L0751: 3, L0752: 3, | | | |
| | | | | | | | S0031: 3, L0593: 3, | | | |
| | | | | | | | H0657: 2, S0360: 2, | | | |
| | | | | | | | S0222: 2, T0115: 2, | | | |
| | | | | | | | H0009: 2, L0471: 2, | | | |
| | | | | | | | H0594: 2, H0288: 2, | | | |
| | | | | | | | H0039: 2, H0424: 2, | | | |
| | | | | | | | H0135: 2, H0040: 2, | | | |
| | | | | | | | H0623: 2, L0763: 2, | | | |
| | | | | | | | L0769: 2, L0796: 2, | | | |
| | | | | | | | L0804: 2, L0775: 2, | | | |
| | | | | | | | L0634: 2, L0666: 2, | | | |
| | | | | | | | L0438: 2, L0756: 2, | | | |
| | | | | | | | L0757: 2, H0445: 2, | | | |
| | | | | | | | L0595: 2, H0542: 2, | | | |
| | | | | | | | H0423: 2, H0422: 2, | | | |
| | | | | | | | T0002: 1, S0114: 1, | | | |
| | | | | | | | S0218: 1, H0661: 1, | | | |
| | | | | | | | S0358: 1, S0007: 1, | | | |
| | | | | | | | S0046: 1, S0132: 1, | | | |
| | | | | | | | S0278: 1, H0431: 1, | | | |
| | | | | | | | H0370: 1, H0586: 1, | | | |
| | | | | | | | H0632: 1, H0486: 1, | | | |
| | | | | | | | T0040: 1, S0280: 1, | | | |
| | | | | | | | H0318: 1, H0581: 1, | | | |
| | | | | | | | H0085: 1, T0110: 1, | | | |
| | | | | | | | H0545: 1, H0081: 1, | | | |
| | | | | | | | S0362: 1, H0247: 1, | | | |
| | | | | | | | H0266: 1, H0290: 1, | | | |
| | | | | | | | H0292: 1, H0286: 1, | | | |
| | | | | | | | S0340: 1, S0036: 1, | | | |
| | | | | | | | H0090: 1, H0591: 1, | | | |
| | | | | | | | H0038: 1, H0616: 1, | | | |
| | | | | | | | H0433: 1, H0412: 1, | | | |
| | | | | | | | S0038: 1, H0561: 1, | | | |
| | | | | | | | S0352: 1, S0144: 1, | | | |
| | | | | | | | S0142: 1, L0369: 1, | | | |
| | | | | | | | L0761: 1, L0372: 1, | | | |
| | | | | | | | L0646: 1, L0374: 1, | | | |
| | | | | | | | L0764: 1, L0771: 1, | | | |
| | | | | | | | L0773: 1, L0381: 1, | | | |
| | | | | | | | L0388: 1, L0774: 1, | | | |
| | | | | | | | L0651: 1, L0378: 1, | | | |
| | | | | | | | L0657: 1, L0658: 1, | | | |
| | | | | | | | L0383: 1, L0665: 1, | | | |
| | | | | | | | L0352: 1, H0593: 1, | | | |
| | | | | | | | H0689: 1, H0682: 1, | | | |
| | | | | | | | H0660: 1, S0328: 1, | | | |
| | | | | | | | H0696: 1, S0044: 1, | | | |
| | | | | | | | S0037: 1, S3014: 1, | | | |
| | | | | | | | S0206: 1, L0439: 1, | | | |
| | | | | | | | L0754: 1, L0749: 1, | | | |
| | | | | | | | L0750: 1, L0731: 1, | | | |
| | | | | | | | L0759: 1, L0588: 1, | | | |
| | | | | | | | L0362: 1, L0361: 1, | | | |
| | | | | | | | H0653: 1, H0136: 1, | | | |
| | | | | | | | S0196: 1, H0543: 1 and | | | |
| | | | | | | | S0424: 1. | | | |
| | | 972982 | 606 | 1610-489 | 1219 | Arg-27 to Phe-33, | | | | |
| | | | | | | Phe-43 to Gly-51, | | | | |
| | | | | | | Cys-59 to Thr-68, | | | | |
| | | | | | | Ile-78 to Thr-83, | | | | |
| | | | | | | Pro-93 to Gly-105, | | | | |
| | | | | | | Arg-140 to Gly-169, | | | | |
| | | | | | | Lys-177 to Glu-184. | | | | |
| 290 | HTLDU61 | 1165319 | 300 | 690-220 | 913 | Gln-5 to His-17, | AR061: 2, AR089: 2 | | | |
| | | | | | | Pro-30 to Ser-40, | H0253: 1, S0010: 1, | | | |
| | | | | | | Pro-42 to Thr-65, | L0456: 1, H0695: 1 and | | | |
| | | | | | | Gly-102 to Gln-107, | L0657: 1. | | | |
| | | | | | | Ala-112 to Lys-118, | | | | |
| | | | | | | Ser-127 to Thr-138. | | | | |
| | | 530316 | 607 | 63-224 | 1220 | | | | | |
| 291 | HTOFT34 | 1152490 | 301 | 361-609 | 914 | | AR089: 8, AR061: 5 | | | |
| | | | | | | | H0264: 2 and L0367: | | | |
| | | | | | | | 1. | | | |
| | | 527144 | 608 | 106-270 | 1221 | | | | | |
| 292 | HTTDH46 | 1152491 | 302 | 2-1144 | 915 | Gly-50 to Asp-59, | AR061: 7, AR089: 2 | | | |
| | | | | | | Thr-220 to Phe-233, | H0253: 10, H0617: 8, | | | |
| | | | | | | Glu-285 to Tyr-291, | H0559: 7, H0265: 6, | | | |
| | | | | | | Thr-298 to Arg-303, | H0618: 5, H0551: 5, | | | |
| | | | | | | Ala-353 to Asn-358. | H0052: 4, H0620: 4, | | | |
| | | | | | | | L0794: 4, H0556: 3, | | | |
| | | | | | | | H0135: 3, H0087: 3, | | | |
| | | | | | | | L0659: 3, L0666: 3, | | | |
| | | | | | | | L0663: 3, L0438: 3, | | | |
| | | | | | | | H0522: 3, L0749: 3, | | | |
| | | | | | | | H0171: 2, H0657: 2, | | | |
| | | | | | | | H0341: 2, H0484: 2, | | | |
| | | | | | | | H0255: 2, S0356: 2, | | | |
| | | | | | | | S0360: 2, S0046: 2, | | | |
| | | | | | | | H0550: 2, H0251: 2, | | | |
| | | | | | | | H0051: 2, H0188: 2, | | | |
| | | | | | | | H0424: 2, H0031: 2, | | | |
| | | | | | | | H0040: 2, H0494: 2, | | | |
| | | | | | | | S0344: 2, L0769: 2, | | | |
| | | | | | | | L0662: 2, L0774: 2, | | | |
| | | | | | | | L0783: 2, L0809: 2, | | | |
| | | | | | | | H0696: 2, L0439: 2, | | | |
| | | | | | | | L0751: 2, L0779: 2, | | | |
| | | | | | | | L0731: 2, L0759: 2, | | | |
| | | | | | | | L0605: 2, L0361: 2, | | | |
| | | | | | | | L0601: 2, H0624: 1, | | | |
| | | | | | | | H0159: 1, H0295: 1, | | | |
| | | | | | | | H0656: 1, S0420: 1, | | | |
| | | | | | | | H0637: 1, L0717: 1, | | | |
| | | | | | | | H0351: 1, S0222: 1, | | | |
| | | | | | | | H0441: 1, H0370: 1, | | | |
| | | | | | | | H0592: 1, H0586: 1, | | | |
| | | | | | | | H0497: 1, H0643: 1, | | | |
| | | | | | | | H0257: 1, H0013: 1, | | | |
| | | | | | | | H0635: 1, H0156: 1, | | | |
| | | | | | | | H0042: 1, H0318: 1, | | | |
| | | | | | | | H0581: 1, H0194: 1, | | | |
| | | | | | | | H0327: 1, H0046: 1, | | | |
| | | | | | | | H0009: 1, H0178: 1, | | | |
| | | | | | | | H0012: 1, H0023: 1, | | | |
| | | | | | | | H0201: 1, S0051: 1, | | | |
| | | | | | | | H0083: 1, S6028: 1, | | | |
| | | | | | | | H0266: 1, H0271: 1, | | | |
| | | | | | | | H0428: 1, H0604: 1, | | | |
| | | | | | | | H0417: 1, H0181: 1, | | | |
| | | | | | | | H0163: 1, H0038: 1, | | | |
| | | | | | | | H0634: 1, H0063: 1, | | | |
| | | | | | | | H0264: 1, H0412: 1, | | | |
| | | | | | | | S0038: 1, L0351: 1, | | | |
| | | | | | | | H0359: 1, S0150: 1, | | | |
| | | | | | | | H0646: 1, H0538: 1, | | | |
| | | | | | | | S0002: 1, S0426: 1, | | | |
| | | | | | | | L0640: 1, L0772: 1, | | | |
| | | | | | | | L0372: 1, L0641: 1, | | | |
| | | | | | | | L0643: 1, L0764: 1, | | | |
| | | | | | | | L0767: 1, L0768: 1, | | | |
| | | | | | | | L0766: 1, L0375: 1, | | | |
| | | | | | | | L0378: 1, L0806: 1, | | | |
| | | | | | | | L0652: 1, L0656: 1, | | | |
| | | | | | | | L0636: 1, L0790: 1, | | | |
| | | | | | | | L0664: 1, H0144: 1, | | | |
| | | | | | | | S0374: 1, H0520: 1, | | | |
| | | | | | | | H0547: 1, H0593: 1, | | | |
| | | | | | | | H0682: 1, H0651: 1, | | | |
| | | | | | | | S0328: 1, H0539: 1, | | | |
| | | | | | | | S0380: 1, S0332: 1, | | | |
| | | | | | | | S3014: 1, S0027: 1, | | | |
| | | | | | | | L0754: 1, L0750: 1, | | | |
| | | | | | | | L0755: 1, L0757: 1, | | | |
| | | | | | | | L0758: 1, S0031: 1, | | | |
| | | | | | | | L0593: 1, H0667: 1, | | | |
| | | | | | | | H0217: 1, H0423: 1, | | | |
| | | | | | | | H0422: 1 and S0042: 1. | | | |
| | | 951114 | 609 | 3-500 | 1222 | Arg-1 to Thr-15. | | | | |
| 293 | HTTIO05 | 1229905 | 303 | 1367-1624 | 916 | | AR061: 57, AR089: 49 | | | |
| | | | | | | | L0770: 2, S0114: 1, | | | |
| | | | | | | | L0717: 1, H0634: 1, | | | |
| | | | | | | | L0773: 1, L0521: 1, | | | |
| | | | | | | | L0803: 1, L0791: 1, | | | |
| | | | | | | | L0664: 1, S0330: 1, | | | |
| | | | | | | | S0380: 1, L0759: 1 and | | | |
| | | | | | | | H0653: 1. | | | |
| | | 931037 | 610 | 1286-1564 | 1223 | | | | | |
| 294 | HWHGY45 | 911621 | 304 | 3-203 | 917 | | AR089: 23, AR061: 3 | | | |
| | | | | | | | S0144: 2, H0662: 1, | | | |
| | | | | | | | H0586: 1, H0587: 1, | | | |
| | | | | | | | T0060: 1, H0696: 1 and | | | |
| | | | | | | | L0745: 1. | | | |
| 295 | HWLQR48 | 1128304 | 305 | 338-508 | 918 | | AR089: 23, AR061: 6 | | | |
| | | | | | | | L0518: 4, L0731: 3, | | | |
| | | | | | | | L0637: 2, H0659: 2, | | | |
| | | | | | | | H0170: 1, S6024: 1, | | | |
| | | | | | | | S0360: 1, H0586: 1, | | | |
| | | | | | | | H0050: 1, L0598: 1, | | | |
| | | | | | | | L0763: 1, L0666: 1, | | | |
| | | | | | | | L0663: 1, L0743: 1, | | | |
| | | | | | | | L0745: 1 and L0601: 1. | | | |
| | | 914556 | 611 | 338-475 | 1224 | | | | | |
| 296 | HWLQX76 | 1152280 | 306 | 2-466 | 919 | Gly-1 to Pro-6, | AR089: 1, AR061: 1 | | | |
| | | | | | | His-18 to Ser-23, | H0553: 3, S0360: 1, | | | |
| | | | | | | Asn-45 to Thr-56, | H0561: 1, L0526: 1, | | | |
| | | | | | | Ala-65 to Arg-70, | H0519: 1, S0126: 1, | | | |
| | | | | | | Asp-84 to Ile-89, | H0543: 1 and L0697: 1. | | | |
| | | | | | | Glu-109 to Leu-114, | | | | |
| | | | | | | Lys-146 to Lys-155. | | | | |
| | | 894607 | 612 | 1-996 | 1225 | His-12 to Ser-17, | | | | |
| | | | | | | Asn-39 to Thr-50, | | | | |
| | | | | | | Ala-59 to Arg-64, | | | | |
| | | | | | | Asp-78 to Ile-83. | | | | |
| 297 | HATDD09 | 1165331 | 307 | 428-1027 | 920 | Ser-25 to Asp-40, | AR061: 4, AR089: 4 | | | |
| | | | | | | Pro-47 to Glu-54, | L0361: 2, H0662: 1, | | | |
| | | | | | | Pro-146 to Gly-153, | T0039: 1, H0156: 1, | | | |
| | | | | | | Pro-194 to Thr-200. | H0052: 1, H0194: 1, | | | |
| | | | | | | | H0179: 1, H0135: 1, | | | |
| | | | | | | | L0662: 1, L0364: 1, | | | |
| | | | | | | | L0790: 1, L0666: 1, | | | |
| | | | | | | | S0028: 1 and S0194: 1. | | | |
| | | 573794 | 613 | 2-184 | 1226 | | | | | |
| 298 | HBJGT03 | 1105484 | 308 | 352-89 | 921 | Ser-33 to Ala-47. | AR061: 5, AR089: 3 | | | |
| | | | | | | | L0769: 2, H0318: 1 | | | |
| | | | | | | | and L0787: 1. | | | |
| | | 923800 | 614 | 35-226 | 1227 | Ala-16 to Ser-22, | | | | |
| | | | | | | Pro-31 to Leu-38, | | | | |
| | | | | | | Ser-41 to Gly-48. | | | | |
| 299 | HMTMF45 | 1141737 | 309 | 33-401 | 922 | | AR061: 1, AR089: 1 | | | |
| | | | | | | | L0766: 3, L0777: 2, | | | |
| | | | | | | | S0116: 1, S0376: 1, | | | |
| | | | | | | | H0457: 1, L0771: 1, | | | |
| | | | | | | | L0803: 1, L0804: 1, | | | |
| | | | | | | | L0657: 1, L0659: 1, | | | |
| | | | | | | | H0525: 1 and L0750: 1. | | | |
| | | 553382 | 615 | 2-376 | 1228 | Arg-3 to Asp-14, | | | | |
| | | | | | | Glu-53 to Gly-59, | | | | |
| | | | | | | Asp-105 to Asn-113. | | | | |
| 300 | HHPDV86 | 522953 | 310 | 1-636 | 923 | Thr-6 to Asp-14, | AR061: 7, AR089: 3 | | | |
| | | | | | | Ser-36 to Glu-41, | L0809: 3, L0747: 3, | | | |
| | | | | | | Ala-159 to Trp-168, | S0360: 2, H0422: 2, | | | |
| | | | | | | Ser-176 to Lys-181. | H0556: 1, S0040: 1, | | | |
| | | | | | | | H0664: 1, S0358: 1, | | | |
| | | | | | | | T0048: 1, H0051: 1, | | | |
| | | | | | | | L0794: 1, L0791: 1, | | | |
| | | | | | | | L0664: 1, S0052: 1, | | | |
| | | | | | | | S0053: 1, H0701: 1, | | | |
| | | | | | | | H0689: 1, H0690: 1, | | | |
| | | | | | | | H0521: 1, H0626: 1 and | | | |
| | | | | | | | L0595: 1. | | | |
| 301 | HE8BT56 | 732602 | 311 | 45-377 | 924 | | AR061: 3, AR089: 2 | | | |
| | | | | | | | L0766: 7, L0439: 3, | | | |
| | | | | | | | L0749: 3, H0013: 2, | | | |
| | | | | | | | L0776: 2, L0740: 2, | | | |
| | | | | | | | L0746: 2, H0083: 1, | | | |
| | | | | | | | H0366: 1, S0422: 1, | | | |
| | | | | | | | L0787: 1, L0791: 1, | | | |
| | | | | | | | L0779: 1, L0780: 1 and | | | |
| | | | | | | | L0752: 1. | | | |
| 302 | HUJDH06 | 907613 | 312 | 304-672 | 925 | Pro-10 to Lys-22. | AR089: 1, AR061: 1 | | | |
| | | | | | | | H0650: 1, H0591: 1 | | | |
| | | | | | | | and S0390: 1. | | | |
| 303 | HOEJG61 | 907614 | 313 | 174-671 | 926 | Lys-31 to Ser-37, | AR061: 7, AR089: 2 | | | |
| | | | | | | Leu-112 to Ser-119. | L0769: 3, L0766: 2, | | | |
| | | | | | | | L0638: 1, S0126: 1, | | | |
| | | | | | | | H0683: 1, L0745: 1 and | | | |
| | | | | | | | H0506: 1. | | | |
| 304 | HE8PN24 | 907620 | 314 | 2-724 | 927 | Gly-59 to Glu-66, | AR061: 2, AR089: 0 | | | |
| | | | | | | Cys-87 to Asn-93, | H0013: 2, S0142: 2, | | | |
| | | | | | | Asn-122 to Trp-127, | L0740: 1 and L0747: 1. | | | |
| | | | | | | Arg-129 to Ser-134, | | | | |
| | | | | | | Ala-144 to Asp-149, | | | | |
| | | | | | | Asn-176 to Ala-182. | | | | |
| 305 | HGBHI37 | 909745 | 315 | 2-451 | 928 | Ala-1 to Gly-10. | AR089: 1, AR061: 1 | | | |
| | | | | | | | H0656: 1 and H0014: | | | |
| | | | | | | | 1. | | | |
| 306 | HCHOK82 | 909755 | 316 | 1-1089 | 929 | Leu-52 to Leu-66, | AR089: 4, AR061: 3 | | | |
| | | | | | | Trp-97 to Leu-103. | H0457: 3, H0271: 3, | | | |
| | | | | | | | H0543: 3, H0422: 2, | | | |
| | | | | | | | H0583: 1, H0650: 1, | | | |
| | | | | | | | H0484: 1, H0483: 1, | | | |
| | | | | | | | S0442: 1, H0580: 1, | | | |
| | | | | | | | S0140: 1, H0486: 1, | | | |
| | | | | | | | H0250: 1, H0050: 1, | | | |
| | | | | | | | H0630: 1, H0264: 1, | | | |
| | | | | | | | H0488: 1, H0487: 1, | | | |
| | | | | | | | S0002: 1, L0439: 1, | | | |
| | | | | | | | H0707: 1, H0136: 1 and | | | |
| | | | | | | | H0677: 1. | | | |
| 307 | HFPCH24 | 912608 | 317 | 2-352 | 930 | Thr-5 to Asn-13, | AR061: 3, AR089: 3 | | | |
| | | | | | | Pro-69 to Ala-76. | L0803: 3, S0222: 1, | | | |
| | | | | | | | L0021: 1, H0510: 1, | | | |
| | | | | | | | L0774: 1, L0777: 1, | | | |
| | | | | | | | L0731: 1, S0260: 1 and | | | |
| | | | | | | | S0434: 1. | | | |
| 308 | HTTKF86 | 912689 | 318 | 2-223 | 931 | Arg-9 to Pro-16. | AR061: 4, AR089: 3 | 22q13.1 | 103050, | |
| | | | | | | | H0634: 1 and H0522: | | 103050, | |
| | | | | | | | 1. | | 124030, | |
| | | | | | | | | | 124030, | |
| | | | | | | | | | 138981, | |
| | | | | | | | | | 182380, | |
| | | | | | | | | | 188826, | |
| | | | | | | | | | 190040, | |
| | | | | | | | | | 190040, | |
| | | | | | | | | | 190040 | |
| 309 | HCESA79 | 912709 | 319 | 25-315 | 932 | Glu-42 to Arg-55, | AR061: 6, AR089: 2 | 16p13.3 | 141750, | |
| | | | | | | Lys-63 to Gly-68. | H0194: 2, L0748: 2, | | 141800, | |
| | | | | | | | H0052: 1, T0010: 1, | | 141800, | |
| | | | | | | | H0658: 1, S0380: 1 and | | 141800, | |
| | | | | | | | L0366: 1. | | 141800, | |
| | | | | | | | | | 141850, | |
| | | | | | | | | | 141850, | |
| | | | | | | | | | 141850, | |
| | | | | | | | | | 141850, | |
| | | | | | | | | | 141850, | |
| | | | | | | | | | 156850, | |
| | | | | | | | | | 186580, | |
| | | | | | | | | | 191092, | |
| | | | | | | | | | 600140, | |
| | | | | | | | | | 600273, | |
| | | | | | | | | | 601313, | |
| | | | | | | | | | 601785 | |
| 310 | HDTBJ28 | 912714 | 320 | 533-243 | 933 | | AR089: 38, AR061: 25 | | | |
| | | | | | | | H0393: 1 and H0486: | | | |
| | | | | | | | 1. | | | |
| 311 | HDPBF48 | 912783 | 321 | 3-809 | 934 | Asp-52 to Thr-62, | AR089: 8, AR061: 3 | | | |
| | | | | | | Thr-101 to Trp-112, | L0758: 4, H0521: 3, | | | |
| | | | | | | Gly-131 to Asn-141, | L0163: 2, L0783: 2, | | | |
| | | | | | | Asp-173 to Ile-179. | L0749: 2, S0342: 1, | | | |
| | | | | | | | L0021: 1, H0318: 1, | | | |
| | | | | | | | H0373: 1, H0083: 1, | | | |
| | | | | | | | H0674: 1, H0494: 1, | | | |
| | | | | | | | H0529: 1, L0768: 1, | | | |
| | | | | | | | L0790: 1, H0519: 1, | | | |
| | | | | | | | S0126: 1, H0670: 1, | | | |
| | | | | | | | L0602: 1, L0748: 1, | | | |
| | | | | | | | L0777: 1, L0752: 1, | | | |
| | | | | | | | L0759: 1, L0588: 1, | | | |
| | | | | | | | H0542: 1 and H0422: 1. | | | |
| 312 | HTPFY55 | 912928 | 322 | 117-563 | 935 | Val-14 to Val-19, | AR089: 3, AR061: 2 | | | |
| | | | | | | | Ser-27 to Ser-32. | H0039: 1, H0622: 1 | | |
| | | | | | | | and H0644: 1. | | | |
| 313 | HMSCM47 | 923632 | 323 | 2-685 | 936 | Gln-13 to Lys-19, | AR089: 6, AR061: 3 | | | |
| | | | | | | Gln-59 to Tyr-69, | H0521: 3, L0794: 2, | | | |
| | | | | | | Asp-116 to His-126, | L0805: 2, H0520: 2, | | | |
| | | | | | | Gly-164 to Lys-170, | L0602: 2, L0756: 2, | | | |
| | | | | | | Gln-182 to Gly-187, | H0170: 1, H0556: 1, | | | |
| | | | | | | Tyr-207 to Gly-212. | S0134: 1, S0116: 1, | | | |
| | | | | | | | H0341: 1, H0662: 1, | | | |
| | | | | | | | S0354: 1, S0360: 1, | | | |
| | | | | | | | H0580: 1, H0619: 1, | | | |
| | | | | | | | S0278: 1, H0574: 1, | | | |
| | | | | | | | H0599: 1, H0590: 1, | | | |
| | | | | | | | H0596: 1, L0471: 1, | | | |
| | | | | | | | H0024: 1, H0014: 1, | | | |
| | | | | | | | L0163: 1, H0051: 1, | | | |
| | | | | | | | H0510: 1, H0615: 1, | | | |
| | | | | | | | H0644: 1, H0617: 1, | | | |
| | | | | | | | H0068: 1, L0060: 1, | | | |
| | | | | | | | H0551: 1, S0450: 1, | | | |
| | | | | | | | S0002: 1, L0369: 1, | | | |
| | | | | | | | L0763: 1, L0371: 1, | | | |
| | | | | | | | L0631: 1, L0637: 1, | | | |
| | | | | | | | L0800: 1, L0764: 1, | | | |
| | | | | | | | L0363: 1, L0767: 1, | | | |
| | | | | | | | L0549: 1, L0803: 1, | | | |
| | | | | | | | L0774: 1, L0776: 1, | | | |
| | | | | | | | L0809: 1, L0791: 1, | | | |
| | | | | | | | H0144: 1, H0658: 1, | | | |
| | | | | | | | H0522: 1, H0478: 1, | | | |
| | | | | | | | S3014: 1, S0028: 1, | | | |
| | | | | | | | L0747: 1, L0749: 1, | | | |
| | | | | | | | L0752: 1, L0753: 1, | | | |
| | | | | | | | L0731: 1, L0758: 1, | | | |
| | | | | | | | L0759: 1, L0601: 1, | | | |
| | | | | | | | L0366: 1 and H0506: 1. | | | |
| 314 | HEOQA56 | 925132 | 324 | 234-1 | 937 | Arg-5 to His-10, | AR089: 2, AR061: 2 | | | |
| | | | | | | Ser-40 to Gln-48. | H0521: 8, H0457: 6, | | | |
| | | | | | | | H0494: 4, L0439: 4, | | | |
| | | | | | | | S0152: 3, S0206: 3, | | | |
| | | | | | | | H0013: 2, H0551: 2, | | | |
| | | | | | | | H0623: 2, L0789: 2, | | | |
| | | | | | | | L0438: 2, S0027: 2, | | | |
| | | | | | | | L0601: 2, H0556: 1, | | | |
| | | | | | | | S0040: 1, H0675: 1, | | | |
| | | | | | | | H0645: 1, H0393: 1, | | | |
| | | | | | | | H0411: 1, H0549: 1, | | | |
| | | | | | | | H0592: 1, H0250: 1, | | | |
| | | | | | | | H0575: 1, H0581: 1, | | | |
| | | | | | | | H0266: 1, H0628: 1, | | | |
| | | | | | | | H0598: 1, H0038: 1, | | | |
| | | | | | | | H0413: 1, H0056: 1, | | | |
| | | | | | | | H0561: 1, S0150: 1, | | | |
| | | | | | | | H0633: 1, H0647: 1, | | | |
| | | | | | | | S0426: 1, H0529: 1, | | | |
| | | | | | | | L0369: 1, L0766: 1, | | | |
| | | | | | | | L0806: 1, H0703: 1, | | | |
| | | | | | | | H0519: 1, H0522: 1, | | | |
| | | | | | | | S0028: 1, L0740: 1, | | | |
| | | | | | | | L0750: 1, S0031: 1, | | | |
| | | | | | | | L0595: 1 and S0011: 1. | | | |
| 315 | HTPCQ24 | 925349 | 325 | 1-450 | 938 | Gly-1 to Leu-26, | AR061: 2, AR089: 1 | | | |
| | | | | | | Thr-28 to Leu-35. | H0046: 21, L0747: 10, | | | |
| | | | | | | | H0039: 3, H0024: 2, | | | |
| | | | | | | | L0766: 2, L0654: 2, | | | |
| | | | | | | | L0748: 2, L0439: 2, | | | |
| | | | | | | | L0779: 2, L0777: 2, | | | |
| | | | | | | | T0049: 1, S0212: 1, | | | |
| | | | | | | | H0662: 1, S0354: 1, | | | |
| | | | | | | | S0045: 1, H0393: 1, | | | |
| | | | | | | | H0107: 1, H0266: 1, | | | |
| | | | | | | | S0250: 1, H0615: 1, | | | |
| | | | | | | | H0688: 1, H0040: 1, | | | |
| | | | | | | | H0616: 1, H0551: 1, | | | |
| | | | | | | | H0641: 1, L0770: 1, | | | |
| | | | | | | | L0637: 1, L0764: 1, | | | |
| | | | | | | | L0767: 1, L0768: 1, | | | |
| | | | | | | | L0659: 1, L0647: 1, | | | |
| | | | | | | | L0666: 1, S0027: 1, | | | |
| | | | | | | | S0028: 1, L0743: 1, | | | |
| | | | | | | | L0749: 1, L0750: 1, | | | |
| | | | | | | | L0780: 1, L0755: 1, | | | |
| | | | | | | | L0758: 1 and L0759: 1. | | | |
| 316 | HWAEI37 | 929481 | 326 | 2-415 | 939 | | AR089: 5, AR061: 1 | | | |
| | | | | | | | H0581: 1 and H0519: | | | |
| | | | | | | | 1. | | | |
| 317 | HDPSF03 | 969536 | 327 | 1-1269 | 940 | | AR089: 9, AR061: 3 | | | |
| 318 | HLHST63 | 581528 | 328 | 28-423 | 941 | Ala-1 to Gly-15, | L0731: 28, L0740: 22, | | | |
| | | | | | | Arg-32 to Ser-38, | L0747: 21, L0748: 20, | | | |
| | | | | | | Thr-62 to His-68, | S0003: 18, L0754: 17, | | | |
| | | | | | | Ser-104 to Thr-110, | L0438: 12, L0439: 12, | | | |
| | | | | | | Gly-117 to Thr-122. | L0775: 11, L0752: 11, | | | |
| | | | | | | | S0026: 11, L0770: 10, | | | |
| | | | | | | | H0521: 10, L0749: 9, | | | |
| | | | | | | | S0358: 8, L0766: 8, | | | |
| | | | | | | | L0659: 8, L0591: 8, | | | |
| | | | | | | | S0192: 8, S0360: 7, | | | |
| | | | | | | | L0764: 7, H0522: 7, | | | |
| | | | | | | | S0010: 6, H0039: 6, | | | |
| | | | | | | | S0002: 6, L0666: 6, | | | |
| | | | | | | | L0665: 6, H0144: 6, | | | |
| | | | | | | | S0126: 6, L0750: 6, | | | |
| | | | | | | | L0755: 6, L0758: 6, | | | |
| | | | | | | | S0426: 5, L0662: 5, | | | |
| | | | | | | | L0663: 5, L0759: 5, | | | |
| | | | | | | | L0599: 5, T0049: 4, | | | |
| | | | | | | | S0282: 4, H0402: 4, | | | |
| | | | | | | | S0354: 4, H0619: 4, | | | |
| | | | | | | | H0620: 4, H0266: 4, | | | |
| | | | | | | | H0032: 4, H0641: 4, | | | |
| | | | | | | | S0422: 4, L0771: 4, | | | |
| | | | | | | | L0776: 4, L0526: 4, | | | |
| | | | | | | | L0664: 4, H0659: 4, | | | |
| | | | | | | | L0751: 4, L0590: 4, | | | |
| | | | | | | | L0608: 4, L0595: 4, | | | |
| | | | | | | | H0305: 3, S0420: 3, | | | |
| | | | | | | | S0376: 3, S0007: 3, | | | |
| | | | | | | | S0045: 3, S0222: 3, | | | |
| | | | | | | | H0441: 3, H0587: 3, | | | |
| | | | | | | | S0414: 3, T0039: 3, | | | |
| | | | | | | | H0013: 3, H0575: 3, | | | |
| | | | | | | | L0483: 3, H0644: 3, | | | |
| | | | | | | | H0124: 3, H0494: 3, | | | |
| | | | | | | | H0538: 3, L0769: 3, | | | |
| | | | | | | | L0372: 3, L0648: 3, | | | |
| | | | | | | | L0521: 3, L0519: 3, | | | |
| | | | | | | | S0374: 3, S0330: 3, | | | |
| | | | | | | | S3014: 3, L0744: 3, | | | |
| | | | | | | | L0757: 3, S0031: 3, | | | |
| | | | | | | | L0485: 3, L0593: 3, | | | |
| | | | | | | | L0362: 3, H0543: 3, | | | |
| | | | | | | | H0170: 2, H0556: 2, | | | |
| | | | | | | | H0657: 2, H0663: 2, | | | |
| | | | | | | | H0580: 2, S6022: 2, | | | |
| | | | | | | | H0369: 2, H0370: 2, | | | |
| | | | | | | | H0427: 2, S0280: 2, | | | |
| | | | | | | | H0036: 2, S0346: 2, | | | |
| | | | | | | | H0318: 2, H0052: 2, | | | |
| | | | | | | | H0309: 2, H0263: 2, | | | |
| | | | | | | | H0046: 2, S0050: 2, | | | |
| | | | | | | | S0022: 2, S0214: 2, | | | |
| | | | | | | | H0428: 2, H0622: 2, | | | |
| | | | | | | | H0031: 2, H0553: 2, | | | |
| | | | | | | | H0673: 2, H0169: 2, | | | |
| | | | | | | | S0036: 2, H0090: 2, | | | |
| | | | | | | | H0087: 2, H0264: 2, | | | |
| | | | | | | | H0413: 2, H0560: 2, | | | |
| | | | | | | | S0144: 2, L0598: 2, | | | |
| | | | | | | | L0369: 2, L0520: 2, | | | |
| | | | | | | | L0774: 2, L0806: 2, | | | |
| | | | | | | | L0517: 2, L0809: 2, | | | |
| | | | | | | | H0519: 2, H0658: 2, | | | |
| | | | | | | | H0648: 2, H0672: 2, | | | |
| | | | | | | | S0350: 2, S0044: 2, | | | |
| | | | | | | | S0027: 2, L0779: 2, | | | |
| | | | | | | | S0260: 2, H0445: 2, | | | |
| | | | | | | | L0596: 2, L0588: 2, | | | |
| | | | | | | | L0592: 2, L0581: 2, | | | |
| | | | | | | | L0601: 2, L0600: 2, | | | |
| | | | | | | | H0265: 1, H0686: 1, | | | |
| | | | | | | | H0685: 1, S0040: 1, | | | |
| | | | | | | | S0342: 1, S6024: 1, | | | |
| | | | | | | | S0134: 1, H0650: 1, | | | |
| | | | | | | | S0116: 1, H0341: 1, | | | |
| | | | | | | | H0661: 1, H0177: 1, | | | |
| | | | | | | | H0306: 1, S0418: 1, | | | |
| | | | | | | | S0356: 1, H0208: 1, | | | |
| | | | | | | | S0046: 1, H0645: 1, | | | |
| | | | | | | | H0393: 1, S0300: 1, | | | |
| | | | | | | | L0717: 1, S6014: 1, | | | |
| | | | | | | | H0438: 1, H0586: 1, | | | |
| | | | | | | | H0333: 1, H0331: 1, | | | |
| | | | | | | | H0632: 1, L0622: 1, | | | |
| | | | | | | | H0486: 1, T0040: 1, | | | |
| | | | | | | | L0586: 1, T0060: 1, | | | |
| | | | | | | | H0244: 1, H0599: 1, | | | |
| | | | | | | | H0098: 1, H0590: 1, | | | |
| | | | | | | | H0004: 1, H0581: 1, | | | |
| | | | | | | | H0421: 1, S0049: 1, | | | |
| | | | | | | | H0196: 1, L2250: 1, | | | |
| | | | | | | | H0235: 1, H0596: 1, | | | |
| | | | | | | | T0115: 1, T0110: 1, | | | |
| | | | | | | | H0597: 1, H0546: 1, | | | |
| | | | | | | | H0545: 1, H0150: 1, | | | |
| | | | | | | | H0009: 1, H0178: 1, | | | |
| | | | | | | | H0123: 1, L0471: 1, | | | |
| | | | | | | | H0012: 1, H0014: 1, | | | |
| | | | | | | | H0015: 1, H0373: 1, | | | |
| | | | | | | | S0388: 1, T0010: 1, | | | |
| | | | | | | | H0239: 1, H0510: 1, | | | |
| | | | | | | | H0594: 1, S6028: 1, | | | |
| | | | | | | | H0267: 1, H0179: 1, | | | |
| | | | | | | | H0188: 1, H0028: 1, | | | |
| | | | | | | | H0252: 1, H0615: 1, | | | |
| | | | | | | | H0092: 1, T0006: 1, | | | |
| | | | | | | | H0030: 1, L0142: 1, | | | |
| | | | | | | | H0628: 1, H0617: 1, | | | |
| | | | | | | | L0055: 1, H0383: 1, | | | |
| | | | | | | | H0674: 1, H0400: 1, | | | |
| | | | | | | | H0135: 1, H0163: 1, | | | |
| | | | | | | | H0591: 1, H0038: 1, | | | |
| | | | | | | | H0040: 1, H0551: 1, | | | |
| | | | | | | | H0488: 1, H0412: 1, | | | |
| | | | | | | | H0059: 1, H0100: 1, | | | |
| | | | | | | | H0429: 1, H0561: 1, | | | |
| | | | | | | | S0440: 1, H0509: 1, | | | |
| | | | | | | | S0150: 1, H0647: 1, | | | |
| | | | | | | | S0344: 1, S0210: 1, | | | |
| | | | | | | | L0763: 1, L0638: 1, | | | |
| | | | | | | | L0639: 1, L0637: 1, | | | |
| | | | | | | | L0772: 1, L0646: 1, | | | |
| | | | | | | | L0768: 1, L0794: 1, | | | |
| | | | | | | | L0803: 1, L0804: 1, | | | |
| | | | | | | | L0378: 1, L0652: 1, | | | |
| | | | | | | | L0653: 1, L0655: 1, | | | |
| | | | | | | | L0606: 1, L0657: 1, | | | |
| | | | | | | | L0493: 1, L0518: 1, | | | |
| | | | | | | | L0782: 1, L0545: 1, | | | |
| | | | | | | | L0529: 1, L0647: 1, | | | |
| | | | | | | | L0792: 1, L0532: 1, | | | |
| | | | | | | | S0148: 1, H0547: 1, | | | |
| | | | | | | | H0593: 1, H0365: 1, | | | |
| | | | | | | | H0689: 1, H0682: 1, | | | |
| | | | | | | | H0684: 1, H0435: 1, | | | |
| | | | | | | | H0670: 1, H0666: 1, | | | |
| | | | | | | | S0380: 1, L0602: 1, | | | |
| | | | | | | | S0152: 1, S0013: 1, | | | |
| | | | | | | | S0146: 1, H0555: 1, | | | |
| | | | | | | | H0478: 1, H0540: 1, | | | |
| | | | | | | | S3012: 1, S0037: 1, | | | |
| | | | | | | | S0206: 1, L0756: 1, | | | |
| | | | | | | | L0777: 1, H0444: 1, | | | |
| | | | | | | | H0595: 1, L0589: 1, | | | |
| | | | | | | | S0011: 1, H0668: 1, | | | |
| | | | | | | | H0665: 1, H0667: 1, | | | |
| | | | | | | | S0194: 1, S0276: 1, | | | |
| | | | | | | | H0542: 1, S0384: 1, | | | |
| | | | | | | | H0506: 1 and H0352: 1. | | | |
| | | 646715 | 616 | 151-20 | 1229 | Cys-11 to His-18. | | | | |
| | | 744764 | 617 | 39-221 | 1230 | | | | | |
| 319 | HFAAJ44 | 489201 | 329 | 3-299 | 942 | | AR089: 4, AR061: 4 | | | |
| | | | | | | | S6024: 1 and S0196: 1. | | | |
| 320 | HSLEM44 | 506604 | 330 | 2-349 | 943 | Gln-1 to Gly-11. | AR061: 1, AR089: 0 | | | |
| | | | | | | | T0074: 1 and S0028: 1. | | | |
| 321 | HETCL79 | 522826 | 331 | 478-152 | 944 | | AR089: 7, AR061: 6 | 1q21 | 104770, | |
| | | | | | | | H0046: 2, L0744: 2, | | 107670, | |
| | | | | | | | H0581: 1 and H0547: 1. | | 110700, | |
| | | | | | | | | | 135940, | |
| | | | | | | | | | 145001, | |
| | | | | | | | | | 146790, | |
| | | | | | | | | | 152445, | |
| | | | | | | | | | 152445, | |
| | | | | | | | | | 159001, | |
| | | | | | | | | | 174000, | |
| | | | | | | | | | 179755, | |
| | | | | | | | | | 182860, | |
| | | | | | | | | | 182860, | |
| | | | | | | | | | 182860, | |
| | | | | | | | | | 191315, | |
| | | | | | | | | | 230800, | |
| | | | | | | | | | 230800, | |
| | | | | | | | | | 266200, | |
| | | | | | | | | | 600897, | |
| | | | | | | | | | 601105, | |
| | | | | | | | | | 601412, | |
| | | | | | | | | | 601652, | |
| | | | | | | | | | 602491 | |
| 322 | HFTAR20 | 670041 | 332 | 3-443 | 945 | | AR089: 6, AR061: 4 | | | |
| | | | | | | | L0749: 6, L0794: 4, | | | |
| | | | | | | | H0123: 1, L0768: 1 and | | | |
| | | | | | | | S0194: 1. | | | |
| 323 | HCUFD32 | 699379 | 333 | 1-498 | 946 | Thr-1 to Leu-11, | AR089: 7, AR061: 3 | | | |
| | | | | | | Lys-24 to Ile-29, | L0754: 6, L0439: 2, | | | |
| | | | | | | Gln-134 to Asn-144, | L0751: 2, L0747: 2, | | | |
| | | | | | | Gln-150 to Thr-165. | H0661: 1, H0402: 1, | | | |
| | | | | | | | H0272: 1, L0438: 1, | | | |
| | | | | | | | H0696: 1 and L0779: 1. | | | |
| 324 | HKAEO39 | 705332 | 334 | 2-463 | 947 | Lys-20 to Ser-28, | AR089: 0, AR061: 0 | | | |
| | | | | | | Arg-44 to Ala-52, | L0792: 2, S0420: 1, | | | |
| | | | | | | Leu-83 to Glu-89. | H0645: 1, H0494: 1, | | | |
| | | | | | | | L0806: 1, L0807: 1, | | | |
| | | | | | | | L0740: 1 and L0752: 1. | | | |
| 325 | HLWBR95 | 734474 | 335 | 3-476 | 948 | | AR089: 3, AR061: 1 | 10q23 | 174900, | |
| | | | | | | | S0420: 1, H0550: 1, | | 236730, | |
| | | | | | | | H0587: 1, H0485: 1, | | 601493 | |
| | | | | | | | H0150: 1, H0553: 1, | | | |
| | | | | | | | T0042: 1, L0530: 1 and | | | |
| | | | | | | | S0152: 1. | | | |
| 326 | HPWCJ63 | 772553 | 336 | 148-807 | 949 | Lys-213 to Gly-220. | AR054: 2, AR051: 1, | | | |
| | | | | | | | AR061: 0, AR089: | 0, | | |
| | | | | | | | AR050: 0 | | | |
| | | | | | | | S0001: 1, H0191: 1 and | | | |
| | | | | | | | S0044: 1. | | | |
| | | 957495 | 618 | 1239-580 | 1231 | Lys-2l3 to Gly-220. | | | | |
| 327 | HBXCM35 | 782911 | 337 | 592-98 | 950 | | AR089: 8, ARO61: 4 | | | |
| | | | | | | | L0743: 2, S0040: 1, | | | |
| | | | | | | | H0663: 1, H0427: 1, | | | |
| | | | | | | | H0545: 1, S0250: 1, | | | |
| | | | | | | | H0087: 1, S0038: 1, | | | |
| | | | | | | | L0804: 1 and L0783: 1. | | | |
| 328 | HULBN83 | 857836 | 338 | 1-636 | 951 | | AR089: 1, ARO61: 1 | | | |
| | | | | | | | H0619: 2, L0779: 2, | | | |
| | | | | | | | S0222: 1, H0530: 1, | | | |
| | | | | | | | H0433: 1, L0766: 1 and | | | |
| | | | | | | | L0753: 1. | | | |
| 329 | HAGET77 | 885265 | 339 | 86-850 | 952 | Lys-26 to Gln-36, | AR061: 4, AR089: 2 | | | |
| | | | | | | Leu-50 to Glu-56, | S0010: 3, S0036: 3, | | | |
| | | | | | | Gly-93 to Thr-106, | L0766: 3, S0222: 2, | | | |
| | | | | | | Gln-108 to Gly-122, | S0346: 2, H0310: 2, | | | |
| | | | | | | Gly-132 to Gln-138, | H0327: 2, H0457: 2, | | | |
| | | | | | | Ser-144 to Trp-153, | H0656: 1, S0282: 1, | | | |
| | | | | | | Glu-155 to Glu-171, | S6016: 1, S0665: 1, | | | |
| | | | | | | Lys-178 to Pro-198, | L2250: 1, H0051: 1, | | | |
| | | | | | | Val-207 to Asn-230, | S0386: 1, H0342: 1, | | | |
| | | | | | | Arg-235 to Asp-247. | S0031: 1, L0366: 1 and | | | |
| | | | | | | | H0543: 1. | | | |
| 330 | HMSOZ55 | 910911 | 340 | 3-503 | 953 | Lys-22 to Gly-27. | AR089: 6, AR061: 3 | | | |
| | | | | | | | S0282: 1, T0040: 1, | | | |
| | | | | | | | H0013: 1, S0182: 1, | | | |
| | | | | | | | S0426: 1, H0670: 1, | | | |
| | | | | | | | H0667: 1 and H0542: 1. | | | |
| 331 | HAPOR42 | 911292 | 341 6-701 | 954 | | AR089: 21, AR061: 10 | | | | |
| | | | | | | | H0156: 1, H0575: 1, | | | |
| | | | | | | | H0590: 1, H0263: 1 and | | | |
| | | | | | | | L0362: 1. | | | |
| 332 | HMVAU10 | 911449 | 342 | 2-538 | 955 | | AR089: 1, AR061: 1 | | | |
| | | | | | | | S0212: 1 and H0040: 1. | | | |
| 333 | HTTFY29 | 911454 | 343 | 3-644 | 956 | Arg-37 to Arg-44, | AR054: 16, AR051: | | | |
| | | | | | | Asn-47 to Glu-56, | 13, AR061: 8, AR089: | | | |
| | | | | | | Lys-65 to Glu-70, | 3, AR050: 1 | | | |
| | | | | | | Arg-78 to Pro-83, | H0040: 1, H0022: 1, | | | |
| | | | | | | Gln-98 to Asp-106, | S0152: 1 and H0521: 1. | | | |
| | | | | | | Pro-142 to Ile-151, | | | | |
| | | | | | | Ala-154 to Thr-180. | | | | |
| 334 | HHFJY06 | 911456 | 344 | 81-584 | 957 | Glu-11 to Ser-21, | AR089: 10, AR061: 6 | | | |
| | | | | | | Asn-52 to Ser-57, | H0619: 1, S0036: 1, | | | |
| | | | | | | Arg-81 to Met-88, | H0135: 1 and H0520: 1. | | | |
| | | | | | | Glu-139 to Tyr-146, | | | | |
| | | | | | | Glu-153 to Leu-159. | | | | |
| 335 | HPCIK72 | 911459 | 345 | 283-2 | 958 | | AR089: 1, AR061: 0 | | | |
| | | | | | | | S0358: 1, H0642: 1 and | | | |
| | | | | | | | H0264: 1. | | | |
| 336 | HFIDT84 | 919878 | 346 | 64-2151 | 959 | Asp-51 to His-60, | AR089: 9, AR061: 5 | | | |
| | | | | | | Thr-105 to Pro-117, | S0192: 2, S0222: 1, | | | |
| | | | | | | Asp-143 to Ala-151, | H0562: 1, H0373: 1 and | | | |
| | | | | | | Asp-167 to Ile-192, | S0242: 1. | | | |
| | | | | | | Ala-212 to Thr-223, | | | | |
| | | | | | | Arg-325 to Asp-346, | | | | |
| | | | | | | Lys-354 to Glu-359, | | | | |
| | | | | | | Gln-390 to Asp-395, | | | | |
| | | | | | | Arg-406 to Ser-412, | | | | |
| | | | | | | Gln-431 to Asp-438, | | | | |
| | | | | | | Ser-447 to Leu-465, | | | | |
| | | | | | | Arg-516 to Thr-522, | | | | |
| | | | | | | Lys-561 to Ser-570, | | | | |
| | | | | | | Pro-583 to Pro-589, | | | | |
| | | | | | | Tyr-625 to Asn-631, | | | | |
| | | | | | | Pro-644 to Arg-650. | | | | |
| 337 | HMCAV88 | 924874 | 347 | 40-516 | 960 | Glu-19 to Asp-28, | AR089: 11, AR061: 6 | | | |
| | | | | | | Tyr-37 to Ala-42, | L0748: 10, L0751: 9, | | | |
| | | | | | | Pro-53 to Leu-59, | L0769: 7, L0779: 7, | | | |
| | | | | | | Ile-67 to Gly-74, | S0126: 5, S0022: 4, | | | |
| | | | | | | Arg-152 to Val-158. | L0775: 4, L0740: 4, | | | |
| | | | | | | | L0747: 4, L0752: 4, | | | |
| | | | | | | | L0731: 4, L0596: 4, | | | |
| | | | | | | | S0142: 3, L0771: 3, | | | |
| | | | | | | | L0757: 3, L0599: 3, | | | |
| | | | | | | | T0039: 2, H0013: 2, | | | |
| | | | | | | | S0346: 2, S0003: 2, | | | |
| | | | | | | | T0041: 2, S0344: 2, | | | |
| | | | | | | | L0770: 2, L0773: 2, | | | |
| | | | | | | | L0766: 2, L0776: 2, | | | |
| | | | | | | | L0663: 2, L0565: 2, | | | |
| | | | | | | | S0027: 2, L0742: 2, | | | |
| | | | | | | | L0754: 2, L0750: 2, | | | |
| | | | | | | | L0753: 2, L0759: 2, | | | |
| | | | | | | | L0588: 2, L0362: 2, | | | |
| | | | | | | | H0624: 1, L0002: 1, | | | |
| | | | | | | | H0656: 1, S0212: 1, | | | |
| | | | | | | | S0420: 1, S0356: 1, | | | |
| | | | | | | | H0441: 1, L0034: 1, | | | |
| | | | | | | | L0738: 1, H0546: 1, | | | |
| | | | | | | | H0012: 1, H0620: 1, | | | |
| | | | | | | | H0024: 1, H0014: 1, | | | |
| | | | | | | | H0083: 1, H0622: 1, | | | |
| | | | | | | | T0006: 1, H0617: 1, | | | |
| | | | | | | | H0068: 1, H0090: 1, | | | |
| | | | | | | | H0063: 1, H0334: 1, | | | |
| | | | | | | | H0561: 1, S0150: 1, | | | |
| | | | | | | | H0633: 1, L0372: 1, | | | |
| | | | | | | | L0662: 1, L0804: 1, | | | |
| | | | | | | | L0774: 1, L0656: 1, | | | |
| | | | | | | | L0636: 1, L0635: 1, | | | |
| | | | | | | | L0783: 1, L0384: 1, | | | |
| | | | | | | | L0809: 1, L0528: 1, | | | |
| | | | | | | | L0666: 1, L0664: 1, | | | |
| | | | | | | | H0144: 1, H0547: 1, | | | |
| | | | | | | | H0670: 1, H0648: 1, | | | |
| | | | | | | | H0539: 1, S0152: 1, | | | |
| | | | | | | | S0406: 1, H0540: 1, | | | |
| | | | | | | | S3014: 1, L0745: 1, | | | |
| | | | | | | | L0777: 1, L0755: 1, | | | |
| | | | | | | | L0758: 1, H0445: 1, | | | |
| | | | | | | | L0592: 1, H0667: 1, | | | |
| | | | | | | | S0194: 1 and H0423: 1. | | | |
| 338 | HKAIP73 | 928809 | 348 | 1455-487 | 961 | Ser-3 to Asp-8, | AR089: 3, AR061: 2 | | | |
| | | | | | | Ser-39 to Pro-61, | H0031: 9, L0659: 7, | | | |
| | | | | | | Ser-63 to Ser-69, | S0358: 5, H0622: 5, | | | |
| | | | | | | Lys-144 to Thr-150, | H0494: 5, L0438: 4, | | | |
| | | | | | | Asp-187 to Gly-193. | L0743: 4, S0132: 3, | | | |
| | | | | | | | H0040: 3, L0800: 3, | | | |
| | | | | | | | L0771: 3, S0354: 2, | | | |
| | | | | | | | H0014: 2, L0483: 2, | | | |
| | | | | | | | L0764: 2, L0783: 2, | | | |
| | | | | | | | L0587: 2, L0601: 2, | | | |
| | | | | | | | S0114: 1, H0661: 1, | | | |
| | | | | | | | S0356: 1, S0442: 1, | | | |
| | | | | | | | S0360: 1, H0592: 1, | | | |
| | | | | | | | H0587: 1, H0036: 1, | | | |
| | | | | | | | H0590: 1, H0024: 1, | | | |
| | | | | | | | H0510: 1, H0252: 1, | | | |
| | | | | | | | H0039: 1, H0553: 1, | | | |
| | | | | | | | S0440: 1, L0772: 1, | | | |
| | | | | | | | L0646: 1, L0374: 1, | | | |
| | | | | | | | L0773: 1, L0766: 1, | | | |
| | | | | | | | L0803: 1, L0804: 1, | | | |
| | | | | | | | L0774: 1, L0784: 1, | | | |
| | | | | | | | L0806: 1, L0653: 1, | | | |
| | | | | | | | L0655: 1, S0374: 1, | | | |
| | | | | | | | S0328: 1, S3012: 1, | | | |
| | | | | | | | L0749: 1, L0731: 1, | | | |
| | | | | | | | L0758: 1 and H0677: 1. | | | |
| 339 | HFVHV40 | 945849 | 349 | 6-680 | 962 | Pro-8 to Arg-29, | AR061: 5, AR089: 3 | | | |
| | | | | | | Tyr-156 to Asp-161, | S0152: 3, H0619: 2, | | | |
| | | | | | | Glu-172 to Pro-184, | S6024: 1, H0341: 1, | | | |
| | | | | | | Arg-194 to Asn-203. | S0212: 1, H0393: 1, | | | |
| | | | | | | | H0592: 1, H0575: 1, | | | |
| | | | | | | | H0036: 1, H0052: 1, | | | |
| | | | | | | | N0006: 1, H0083: 1, | | | |
| | | | | | | | L0483: 1, H0100: 1, | | | |
| | | | | | | | H0494: 1, S0144: 1, | | | |
| | | | | | | | S0002: 1, H0703: 1, | | | |
| | | | | | | | H0522: 1, H0134: 1, | | | |
| | | | | | | | H0436: 1 and H0653: 1. | | | |
| 340 | HTJNI80 | 952231 | 350 | 2-598 | 963 | | AR089: 10, AR061: 4 | | | |
| | | | | | | | H0650: 2, S3014: 2, | | | |
| | | | | | | | H0265: 1, H0581: 1, | | | |
| | | | | | | | L0034: 1, H0488: 1, | | | |
| | | | | | | | H0547: 1, H0518: 1, | | | |
| | | | | | | | S0152: 1, S0260: 1 and | | | |
| | | | | | | | L0366: 1. | | | |
| 341 | HEAAE08 | 959970 | 351 | 133-621 | 964 | Pro-1 to Pro-12, | AR061: 10, AR089: 4 | | | |
| | | | | | | Pro-53 to Gly-58, | L0789: 6, L0809: 2, | | | |
| | | | | | | Gly-65 to Ser-71, | H0669: 1, H0369: 1, | | | |
| | | | | | | Gly-106 to Lys-111, | H0252: 1, L0055: 1, | | | |
| | | | | | | Lys-143 to Gly-163. | L0763: 1, L0770: 1, | | | |
| | | | | | | | L0638: 1, L0803: 1, | | | |
| | | | | | | | L0805: 1, L0776: 1, | | | |
| | | | | | | | L0753: 1, L0758: 1, | | | |
| | | | | | | | L0592: 1 and H0543: 1. | | | |
| 342 | HDPLU91 | 963199 | 352 | 2-748 | 965 | Pro-53 to Val-58, | AR089: 16, AR061: 5 | | | |
| | | | | | | Pro-85 to Ser-95, | L0439: 10, L0526: 6, | | | |
| | | | | | | Gln-132 to Gly-138. | L0005: 5, L0740: 5, | | | |
| | | | | | | | S0422: 4, L0438: 4, | | | |
| | | | | | | | L0758: 4, L0581: 4, | | | |
| | | | | | | | H0370: 3, H0486: 3, | | | |
| | | | | | | | S0003: 3, H0144: 3, | | | |
| | | | | | | | H0659: 3, H0672: 3, | | | |
| | | | | | | | L0744: 3, L0754: 3, | | | |
| | | | | | | | L0731: 3, L0595: 3, | | | |
| | | | | | | | H0657: 2, H0664: 2, | | | |
| | | | | | | | S0418: 2, S0376: 2, | | | |
| | | | | | | | H0431: 2, H0050: 2, | | | |
| | | | | | | | L0471: 2, H0083: 2, | | | |
| | | | | | | | H0266: 2, H0090: 2, | | | |
| | | | | | | | H0616: 2, L0770: 2, | | | |
| | | | | | | | L0769: 2, L0761: 2, | | | |
| | | | | | | | L0766: 2, L0655: 2, | | | |
| | | | | | | | L0657: 2, L0659: 2, | | | |
| | | | | | | | L0783: 2, L0519: 2, | | | |
| | | | | | | | L0666: 2, L0756: 2, | | | |
| | | | | | | | L0759: 2, S0260: 2, | | | |
| | | | | | | | H0595: 2, L0588: 2, | | | |
| | | | | | | | L0589: 2, L0590: 2, | | | |
| | | | | | | | L0608: 2, S0192: 2, | | | |
| | | | | | | | H0265: 1, T0049: 1, | | | |
| | | | | | | | H0650: 1, L0481: 1, | | | |
| | | | | | | | H0638: 1, S0356: 1, | | | |
| | | | | | | | T0008: 1, H0208: 1, | | | |
| | | | | | | | S0045: 1, L0010: 1, | | | |
| | | | | | | | H0611: 1, H0455: 1, | | | |
| | | | | | | | H0574: 1, H0492: 1, | | | |
| | | | | | | | H0635: 1, L0021: 1, | | | |
| | | | | | | | H0575: 1, S0010: 1, | | | |
| | | | | | | | H0318: 1, H0581: 1, | | | |
| | | | | | | | H0052: 1, H0251: 1, | | | |
| | | | | | | | H0597: 1, H0046: 1, | | | |
| | | | | | | | L0157: 1, H0051: 1, | | | |
| | | | | | | | S0048: 1, H0188: 1, | | | |
| | | | | | | | L0483: 1, H0644: 1, | | | |
| | | | | | | | L0455: 1, S0036: 1, | | | |
| | | | | | | | H0591: 1, H0038: 1, | | | |
| | | | | | | | H0372: 1, H0040: 1, | | | |
| | | | | | | | H0063: 1, H0412: 1, | | | |
| | | | | | | | H0623: 1, L0564: 1, | | | |
| | | | | | | | H0022: 1, S0440: 1, | | | |
| | | | | | | | H0509: 1, H0130: 1, | | | |
| | | | | | | | H0641: 1, H0517: 1, | | | |
| | | | | | | | L0638: 1, L0771: 1, | | | |
| | | | | | | | L0768: 1, L0375: 1, | | | |
| | | | | | | | L0776: 1, L0809: 1, | | | |
| | | | | | | | L0528: 1, L0663: 1, | | | |
| | | | | | | | L0664: 1, H0691: 1, | | | |
| | | | | | | | H0670: 1, H0660: 1, | | | |
| | | | | | | | H0666: 1, H0648: 1, | | | |
| | | | | | | | S0328: 1, S0380: 1, | | | |
| | | | | | | | H0521: 1, H0522: 1, | | | |
| | | | | | | | S0392: 1, S0027: 1, | | | |
| | | | | | | | L0742: 1, L0749: 1, | | | |
| | | | | | | | L0777: 1, L0757: 1, | | | |
| | | | | | | | S0031: 1, L0592: 1, | | | |
| | | | | | | | L0599: 1, H0653: 1, | | | |
| | | | | | | | H0665: 1, S0196: 1 and | | | |
| | | | | | | | H0543: 1. | | | |
| 343 | HAPRM21 | 963200 | 353 | 1-630 | 966 | Gln-8 to Gly-14, | AR089: 25, AR061: 5 | | | |
| | | | | | | | Thr-164 to Gly-183, | H0123: 2, L0754: 2, | | |
| | | | | | | | Pro-197 to Asp-210. | H0650: 1, H0550: 1, | | |
| | | | | | | | H0244: 1, H0427: 1, | | | |
| | | | | | | | H0575: 1, S0010: 1 and | | | |
| | | | | | | | L0698: 1. | | | |
| 344 | HTDAB30 | 965320 | 354 | 3-944 | 967 | | AR089: 5, AR061: 4 | | | |
| | | | | | | | S0152: 7, L0748: 7, | | | |
| | | | | | | | L0779: 6, L0766: 5, | | | |
| | | | | | | | H0591: 4, L0771: 4, | | | |
| | | | | | | | L0749: 4, L0777: 4, | | | |
| | | | | | | | L0759: 4, H0556: 3, | | | |
| | | | | | | | L0803: 3, L0783: 3, | | | |
| | | | | | | | H0521: 3, L0754: 3, | | | |
| | | | | | | | L0731: 3, L0595: 3, | | | |
| | | | | | | | H0423: 3, H0170: 2, | | | |
| | | | | | | | H0657: 2, H0341: 2, | | | |
| | | | | | | | H0013: 2, H0598: 2, | | | |
| | | | | | | | H0412: 2, H0494: 2, | | | |
| | | | | | | | L0768: 2, L0526: 2, | | | |
| | | | | | | | L0663: 2, S0328: 2, | | | |
| | | | | | | | L0755: 2, L0757: 2, | | | |
| | | | | | | | H0542: 2, S0420: 1, | | | |
| | | | | | | | S0358: 1, S0408: 1, | | | |
| | | | | | | | H0619: 1, H0587: 1, | | | |
| | | | | | | | H0486: 1, T0060: 1, | | | |
| | | | | | | | H0575: 1, H0036: 1, | | | |
| | | | | | | | H0318: 1, H0581: 1, | | | |
| | | | | | | | H0434: 1, H0544: 1, | | | |
| | | | | | | | H0014: 1, H0687: 1, | | | |
| | | | | | | | H0644: 1, H0163: 1, | | | |
| | | | | | | | H0090: 1, H0551: 1, | | | |
| | | | | | | | H0477: 1, H0264: 1, | | | |
| | | | | | | | H0268: 1, H0623: 1, | | | |
| | | | | | | | H0560: 1, S0370: 1, | | | |
| | | | | | | | S0002: 1, H0529: 1, | | | |
| | | | | | | | L0520: 1, L0769: 1, | | | |
| | | | | | | | L0774: 1, L0606: 1, | | | |
| | | | | | | | L0807: 1, L0659: 1, | | | |
| | | | | | | | L0384: 1, L0790: 1, | | | |
| | | | | | | | L0664: 1, S0052: 1, | | | |
| | | | | | | | H0702: 1, H0547: 1, | | | |
| | | | | | | | H0519: 1, H0684: 1, | | | |
| | | | | | | | H0518: 1, H0696: 1, | | | |
| | | | | | | | S0432: 1, L0780: 1, | | | |
| | | | | | | | L0752: 1, L0758: 1, | | | |
| | | | | | | | L0596: 1, L0608: 1, | | | |
| | | | | | | | H0667: 1, H0543: 1 and | | | |
| | | | | | | | S0446: 1. | | | |
| 345 | H2CBN90 | 966919 | 355 | 3-821 | 968 | | AR061: 4, AR089: 4 | | | |
| | | | | | | | L0794: 6, S0360: 3, | | | |
| | | | | | | | T0110: 2, L0455: 2, | | | |
| | | | | | | | L0649: 2, L0498: 2, | | | |
| | | | | | | | L0659: 2, L0791: 2, | | | |
| | | | | | | | L0748: 2, L0731: 2, | | | |
| | | | | | | | H0485: 1, L0105: 1, | | | |
| | | | | | | | L0738: 1, H0545: 1, | | | |
| | | | | | | | H0633: 1, L0646: 1, | | | |
| | | | | | | | L0662: 1, L0768: 1, | | | |
| | | | | | | | L0803: 1, L0774: 1, | | | |
| | | | | | | | L0806: 1, L0790: 1, | | | |
| | | | | | | | H0144: 1, H0690: 1, | | | |
| | | | | | | | H0435: 1, S0032: 1, | | | |
| | | | | | | | L0740: 1, L0747: 1, | | | |
| | | | | | | | L0779: 1 and L0758: 1. | | | |
| 346 | HETFJ47 | 971305 | 356 | 3-1328 | 969 | | AR061: 2, AR089: 1 | | | |
| | | | | | | | L0596: 7, H0622: 5, | | | |
| | | | | | | | L0747: 5, H0046: 4, | | | |
| | | | | | | | L0372: 4, L0764: 3, | | | |
| | | | | | | | L0662: 3, L0657: 3, | | | |
| | | | | | | | L0783: 3, L0663: 3, | | | |
| | | | | | | | L0752: 3, H0662: 2, | | | |
| | | | | | | | S0356: 2, H0040: 2, | | | |
| | | | | | | | H0538: 2, L0646: 2, | | | |
| | | | | | | | L0771: 2, L0774: 2, | | | |
| | | | | | | | L0805: 2, L0809: 2, | | | |
| | | | | | | | L0666: 2, L0665: 2, | | | |
| | | | | | | | H0435: 2, L0751: 2, | | | |
| | | | | | | | L0777: 2, L0608: 2, | | | |
| | | | | | | | H0624: 1, H0686: 1, | | | |
| | | | | | | | H0295: 1, H0241: 1, | | | |
| | | | | | | | S0418: 1, S0358: 1, | | | |
| | | | | | | | S0376: 1, S0360: 1, | | | |
| | | | | | | | S0132: 1, H0642: 1, | | | |
| | | | | | | | H0590: 1, H0150: 1, | | | |
| | | | | | | | H0620: 1, H0023: 1, | | | |
| | | | | | | | H0356: 1, H0424: 1, | | | |
| | | | | | | | H0213: 1, H0617: 1, | | | |
| | | | | | | | H0169: 1, H0634: 1, | | | |
| | | | | | | | H0063: 1, T0067: 1, | | | |
| | | | | | | | H0488: 1, H0334: 1, | | | |
| | | | | | | | S0370: 1, H0652: 1, | | | |
| | | | | | | | L0645: 1, L0773: 1, | | | |
| | | | | | | | L0648: 1, L0806: 1, | | | |
| | | | | | | | L0776: 1, L0541: 1, | | | |
| | | | | | | | L0789: 1, L0790: 1, | | | |
| | | | | | | | L0664: 1, S0374: 1, | | | |
| | | | | | | | H0689: 1, H0666: 1, | | | |
| | | | | | | | H0672: 1, H0478: 1, | | | |
| | | | | | | | L0748: 1, L0779: 1, | | | |
| | | | | | | | S0436: 1 and H0506: 1. | | | |
| 347 | HADEX52 | 971351 | 357 | 38-1354 | 970 | Arg-11 to Arg-18, | AR054: 40, AR050: | | | |
| | | | | | | Glu-23 to Glu-28, | 30, AR051: 28, AR089: | | | |
| | | | | | | Asn-40 to Leu-45, | 1, AR061: 1 | | | |
| | | | | | | Thr-53 to Asp-58, | S0270: 8, S0268: 7, | | | |
| | | | | | | Lys-74 to Asp-82, | L0731: 4, L0471: 3, | | | |
| | | | | | | Val-92 to Glu-97, | H0201: 2, H0547: 2, | | | |
| | | | | | | Ser-104 to Asn-109, | S0274: 2, L0754: 2, | | | |
| | | | | | | Asp-127 to Phe-133, | L0604: 2, S0202: 1, | | | |
| | | | | | | Gln-158 to Asp-170, | S0252: 1, S0360: 1, | | | |
| | | | | | | Asn-177 to Ala-207. | H0550: 1, H0600: 1, | | | |
| | | | | | | | H0333: 1, H0486: 1, | | | |
| | | | | | | | H0013: 1, H0427: 1, | | | |
| | | | | | | | H0599: 1, H0575: 1, | | | |
| | | | | | | | S0010: 1, H0194: 1, | | | |
| | | | | | | | H0327: 1, H0569: 1, | | | |
| | | | | | | | H0594: 1, S6028: 1, | | | |
| | | | | | | | S0250: 1, H0622: 1, | | | |
| | | | | | | | L0544: 1, H0144: 1, | | | |
| | | | | | | | L0438: 1, H0519: 1, | | | |
| | | | | | | | S0126: 1, L0744: 1, | | | |
| | | | | | | | L0747: 1, L0777: 1, | | | |
| | | | | | | | S0242: 1 and S0196: 1. | | | |
| 348 | HTADZ74 | 811489 | 358 | 23-586 | 971 | Ile-5 to Lys-10, | AR050: 18, AR089: 2, | | | |
| | | | | | | Arg-78 to Asp-92. | AR061: 2, AR051: 2, | | | |
| | | | | | | | AR054: 1 | | | |
| | | | | | | | S0114: 1, H0069: 1, | | | |
| | | | | | | | H0014: 1, L0667: 1, | | | |
| | | | | | | | L0804: 1, L0659: 1, | | | |
| | | | | | | | S0052: 1 and H0422: 1. | | | |
| 349 | HAPNZ77 | 887072 | 359 | 1-483 | 972 | Lys-82 to Gln-87, | AR089: 70, AR061: | | | |
| | | | | | | Asp-103 to Ala-108, | 14, AR050: 9, AR051: | | | |
| | | | | | | Glu-122 to Lys-127. | 1, AR054: 1 | | | |
| | | | | | | | L0766: 2, H0575: 1, | | | |
| | | | | | | | H0264: 1, L0761: 1 and | | | |
| | | | | | | | L0804: 1. | | | |
| 350 | HELDR74 | 963001 | 360 | 3-1223 | 973 | His-14 to Gln-19. | AR089: 1, AR061: 0 | | | |
| | | | | | | | H0305: 4, L0731: 3, | | | |
| | | | | | | | L0581: 3, H0622: 2, | | | |
| | | | | | | | H0059: 2, L0764: 2, | | | |
| | | | | | | | L0766: 2, L0741: 2, | | | |
| | | | | | | | L0740: 2, L0749: 2, | | | |
| | | | | | | | H0423: 2, H0149: 1, | | | |
| | | | | | | | H0159: 1, S0114: 1, | | | |
| | | | | | | | H0656: 1, H0255: 1, | | | |
| | | | | | | | H0306: 1, H0402: 1, | | | |
| | | | | | | | S0045: 1, H0351: 1, | | | |
| | | | | | | | H0550: 1, H0441: 1, | | | |
| | | | | | | | H0036: 1, T0048: 1, | | | |
| | | | | | | | H0318: 1, H0581: 1, | | | |
| | | | | | | | H0024: 1, H0051: 1, | | | |
| | | | | | | | H0083: 1, H0510: 1, | | | |
| | | | | | | | H0617: 1, H0412: 1, | | | |
| | | | | | | | H0280: 1, H0647: 1, | | | |
| | | | | | | | L0646: 1, L0374: 1, | | | |
| | | | | | | | L0385: 1, L0662: 1, | | | |
| | | | | | | | L0767: 1, L0794: 1, | | | |
| | | | | | | | L0649: 1, L0774: 1, | | | |
| | | | | | | | L0806: 1, L0653: 1, | | | |
| | | | | | | | L0657: 1, L0659: 1, | | | |
| | | | | | | | L0783: 1, S0126: 1, | | | |
| | | | | | | | H0690: 1, H0670: 1, | | | |
| | | | | | | | H0672: 1, S0328: 1, | | | |
| | | | | | | | S0380: 1, H0555: 1, | | | |
| | | | | | | | L0748: 1, L0752: 1, | | | |
| | | | | | | | L0758: 1, S0194: 1, | | | |
| | | | | | | | H0542: 1 and H0422: 1. | | | |
| 351 | HDPLJ22 | 859915 | 361 | 2-547 | 974 | Phe-20 to Lys-37, | AR089: 1, AR061: 0 | | | |
| | | | | | | Asn-108 to Arg-116. | L0591: 20, L0748: 13, | | | |
| | | | | | | | H0090: 5, H0521: 4, | | | |
| | | | | | | | L0758: 4, H0556: 3, | | | |
| | | | | | | | H0656: 3, S0358: 3, | | | |
| | | | | | | | H0038: 3, S0002: 3, | | | |
| | | | | | | | L0794: 3, L0766: 3, | | | |
| | | | | | | | L0803: 3, L0805: 3, | | | |
| | | | | | | | L0791: 3, L0665: 3, | | | |
| | | | | | | | H0547: 3, S0328: 3, | | | |
| | | | | | | | L0747: 3, H0423: 3, | | | |
| | | | | | | | H0624: 2, S0420: 2, | | | |
| | | | | | | | S0046: 2, H0427: 2, | | | |
| | | | | | | | H0156: 2, H0046: 2, | | | |
| | | | | | | | L0471: 2, H0510: 2, | | | |
| | | | | | | | H0424: 2, H0181: 2, | | | |
| | | | | | | | H0264: 2, H0100: 2, | | | |
| | | | | | | | S0426: 2, L0631: 2, | | | |
| | | | | | | | H0539: 2, S0380: 2, | | | |
| | | | | | | | S0152: 2, H0555: 2, | | | |
| | | | | | | | S3014: 2, S0206: 2, | | | |
| | | | | | | | L0777: 2, L0731: 2, | | | |
| | | | | | | | H0422: 2, H0686: 1, | | | |
| | | | | | | | L0002: 1, H0657: 1, | | | |
| | | | | | | | H0663: 1, H0662: 1, | | | |
| | | | | | | | S0348: 1, S0360: 1, | | | |
| | | | | | | | S0007: 1, S0278: 1, | | | |
| | | | | | | | H0600: 1, H0497: 1, | | | |
| | | | | | | | H0559: 1, T0039: 1, | | | |
| | | | | | | | H0013: 1, H0599: 1, | | | |
| | | | | | | | H0575: 1, H0004: 1, | | | |
| | | | | | | | H0318: 1, H0581: 1, | | | |
| | | | | | | | H0421: 1, H0263: 1, | | | |
| | | | | | | | H0050: 1, H0082: 1, | | | |
| | | | | | | | H0373: 1, H0071: 1, | | | |
| | | | | | | | H0629: 1, S0003: 1, | | | |
| | | | | | | | H0328: 1, H0031: 1, | | | |
| | | | | | | | H0553: 1, H0111: 1, | | | |
| | | | | | | | H0628: 1, H0617: 1, | | | |
| | | | | | | | H0673: 1, S0364: 1, | | | |
| | | | | | | | H0135: 1, H0163: 1, | | | |
| | | | | | | | T0067: 1, H0561: 1, | | | |
| | | | | | | | S0440: 1, S0344: 1, | | | |
| | | | | | | | L0761: 1, L0764: 1, | | | |
| | | | | | | | L0771: 1, L0773: 1, | | | |
| | | | | | | | L0650: 1, L0776: 1, | | | |
| | | | | | | | L0655: 1, L0606: 1, | | | |
| | | | | | | | L0629: 1, L0659: 1, | | | |
| | | | | | | | L0809: 1, L0792: 1, | | | |
| | | | | | | | L0666: 1, H0520: 1, | | | |
| | | | | | | | H0593: 1, H0689: 1, | | | |
| | | | | | | | H0659: 1, S0330: 1, | | | |
| | | | | | | | H0522: 1, H0627: 1, | | | |
| | | | | | | | L0742: 1, L0439: 1, | | | |
| | | | | | | | L0740: 1, L0749: 1, | | | |
| | | | | | | | L0779: 1, L0752: 1, | | | |
| | | | | | | | L0757: 1, L0759: 1, | | | |
| | | | | | | | H0445: 1, L0485: 1, | | | |
| | | | | | | | H0653: 1, S0196: 1, | | | |
| | | | | | | | H0542: 1 and H0506: 1. | | | |
| 352 | HPMLD11 | 890204 | 362 | 562-2 | 975 | Gln-11 to Trp-22, | AR054: 115, AR050: | | | |
| | | | | | | Arg-27 to Gly-32, | 108, AR051: 87, | | | |
| | | | | | | Pro-47 to Gly-53. | AR061: 4, AR089: 2 | | | |
| | | | | | | | H0644: 3, S0408: 1, | | | |
| | | | | | | | S0280: 1, H0620: 1, | | | |
| | | | | | | | S0364: 1, L0637: 1, | | | |
| | | | | | | | L0764: 1, S0044: 1, | | | |
| | | | | | | | L0611: 1, L0777: 1, | | | |
| | | | | | | | L0755: 1, L0731: 1 and | | | |
| | | | | | | | S0194: 1. | | | |
| 353 | HMVDZ78 | 938574 | 363 | 2-250 | 976 | | AR089: 2, AR061: 2 | | | |
| | | | | | | | L0659: 8, L0666: 8, | | | |
| | | | | | | | L0751: 7, L0665: 6, | | | |
| | | | | | | | L0528: 5, L0743: 5, | | | |
| | | | | | | | L0663: 4, H0052: 3, | | | |
| | | | | | | | L0638: 3, L0646: 3, | | | |
| | | | | | | | L0764: 3, L0662: 3, | | | |
| | | | | | | | L0774: 3, L0747: 3, | | | |
| | | | | | | | H0668: 3, S0192: 3, | | | |
| | | | | | | | H0150: 2, H0620: 2, | | | |
| | | | | | | | H0413: 2, H0649: 2, | | | |
| | | | | | | | S0426: 2, L0763: 2, | | | |
| | | | | | | | L0769: 2, L0648: 2, | | | |
| | | | | | | | L0766: 2, L0653: 2, | | | |
| | | | | | | | L0657: 2, S0126: 2, | | | |
| | | | | | | | H0670: 2, L0754: 2, | | | |
| | | | | | | | L0749: 2, H0685: 1, | | | |
| | | | | | | | S0040: 1, H0650: 1, | | | |
| | | | | | | | S0212: 1, H0255: 1, | | | |
| | | | | | | | S0420: 1, S0045: 1, | | | |
| | | | | | | | H0261: 1, H0391: 1, | | | |
| | | | | | | | L0022: 1, H0581: 1, | | | |
| | | | | | | | H0597: 1, H0544: 1, | | | |
| | | | | | | | H0545: 1, H0123: 1, | | | |
| | | | | | | | H0012: 1, H0024: 1, | | | |
| | | | | | | | H0188: 1, S0250: 1, | | | |
| | | | | | | | L0483: 1, H0617: 1, | | | |
| | | | | | | | H0551: 1, H0494: 1, | | | |
| | | | | | | | S0210: 1, L0372: 1, | | | |
| | | | | | | | L0643: 1, L0773: 1, | | | |
| | | | | | | | L0803: 1, L0650: 1, | | | |
| | | | | | | | L0775: 1, L0375: 1, | | | |
| | | | | | | | L0651: 1, L0525: 1, | | | |
| | | | | | | | L0776: 1, L0661: 1, | | | |
| | | | | | | | L0629: 1, L0664: 1, | | | |
| | | | | | | | S0053: 1, L0565: 1, | | | |
| | | | | | | | H0690: 1, H0682: 1, | | | |
| | | | | | | | H0658: 1, H0648: 1, | | | |
| | | | | | | | H0672: 1, H0539: 1, | | | |
| | | | | | | | H0521: 1, S0044: 1, | | | |
| | | | | | | | S0188: 1, H0555: 1, | | | |
| | | | | | | | S3012: 1, L0752: 1, | | | |
| | | | | | | | L0753: 1, L0757: 1, | | | |
| | | | | | | | L0758: 1, L0592: 1, | | | |
| | | | | | | | L0601: 1, L0603: 1 and | | | |
| | | | | | | | H0352: 1. | | | |
| | | 956924 | 619 | 425-126 | 1232 | Gln-56 to Pro-70, | | | | |
| | | | | | | Gly-78 to Gly-87. | | | | |
| 354 | HTSFJ40 | 722406 | 364 | 3-392 | 977 | Leu-7 to Ala-13. | AR089: 30, AR061: 6 | | | |
| | | | | | | | H0081: 1, H0087: 1, | | | |
| | | | | | | | S0144: 1 and H0538: 1. | | | |
| 355 | HEMBZ62 | 742551 | 365 | 2-454 | 978 | | AR089: 6, AR061: 2 | | | |
| | | | | | | | H0663: 2, S0328: 2, | | | |
| | | | | | | | S0420: 1, S0046: 1, | | | |
| | | | | | | | H0559: 1, T0082: 1, | | | |
| | | | | | | | H0050: 1, H0100: 1, | | | |
| | | | | | | | H0494: 1, L0640: 1, | | | |
| | | | | | | | L0789: 1, H0436: 1 and | | | |
| | | | | | | | L0439: 1. | | | |
| 356 | HHFGZ38 | 785591 | 366 | 302-1165 | 979 | | AR089: 8, AR061: 2 | | | |
| | | | | | | | H0556: 1, S0040: 1, | | | |
| | | | | | | | H0657: 1, H0306: 1, | | | |
| | | | | | | | H0393: 1, H0050: 1, | | | |
| | | | | | | | H0266: 1, H0112: 1, | | | |
| | | | | | | | H0063: 1, S0142: 1, | | | |
| | | | | | | | S0002: 1, L0794: 1, | | | |
| | | | | | | | L0378: 1, L0655: 1, | | | |
| | | | | | | | L0791: 1, L0665: 1, | | | |
| | | | | | | | H0539: 1, H0521: 1, | | | |
| | | | | | | | L0596: 1, L0593: 1, | | | |
| | | | | | | | L0595: 1 and H0653: 1. | | | |
| 357 | HDPLN70 | 854010 | 367 | 40-828 | 980 | Pro-1 to Gly-7, | AR089: 2, AR061: 1 | | | |
| | | | | | | Arg-15 to Trp-21, | L0766: 26, L0439: 11, | | | |
| | | | | | | Pro-58 to Asn-63, | L0757: 8, H0521: 5, | | | |
| | | | | | | Arg-82 to Gly-88. | L0748: 5, H0462: 4, | | | |
| | | | | | | | L0745: 4, L0777: 4, | | | |
| | | | | | | | H0013: 3, H0123: 3, | | | |
| | | | | | | | L0774: 3, H0522: 3, | | | |
| | | | | | | | L0752: 3, S0356: 2, | | | |
| | | | | | | | H0261: 2, S0222: 2, | | | |
| | | | | | | | H0431: 2, H0427: 2, | | | |
| | | | | | | | H0052: 2, H0545: 2, | | | |
| | | | | | | | L0770: 2, L0769: 2, | | | |
| | | | | | | | L0768: 2, L0806: 2, | | | |
| | | | | | | | L0659: 2, H0144: 2, | | | |
| | | | | | | | L0751: 2, L0756: 2, | | | |
| | | | | | | | L0779: 2, L0591: 2, | | | |
| | | | | | | | L0593: 2, H0667: 2, | | | |
| | | | | | | | H0677: 2, H0656: 1, | | | |
| | | | | | | | H0661: 1, S0358: 1, | | | |
| | | | | | | | H0580: 1, S0045: 1, | | | |
| | | | | | | | H0370: 1, H0486: 1, | | | |
| | | | | | | | H0546: 1, S0022: 1, | | | |
| | | | | | | | S0214: 1, H0328: 1, | | | |
| | | | | | | | H0615: 1, H0428: 1, | | | |
| | | | | | | | T0023: 1, H0628: 1, | | | |
| | | | | | | | L0055: 1, H0032: 1, | | | |
| | | | | | | | H0090: 1, H0059: 1, | | | |
| | | | | | | | H0100: 1, L0351: 1, | | | |
| | | | | | | | S0144: 1, S0002: 1, | | | |
| | | | | | | | L0598: 1, L0764: 1, | | | |
| | | | | | | | L0771: 1, L0662: 1, | | | |
| | | | | | | | L0794: 1, L0775: 1, | | | |
| | | | | | | | L0805: 1, L0545: 1, | | | |
| | | | | | | | L0543: 1, L0789: 1, | | | |
| | | | | | | | L0790: 1, L0791: 1, | | | |
| | | | | | | | L0792: 1, L0663: 1, | | | |
| | | | | | | | H0520: 1, H0547: 1, | | | |
| | | | | | | | H0519: 1, H0648: 1, | | | |
| | | | | | | | L0740: 1, L0746: 1, | | | |
| | | | | | | | L0747: 1, L0750: 1, | | | |
| | | | | | | | L0759: 1, L0608: 1, | | | |
| | | | | | | | L0601: 1, S0026: 1, | | | |
| | | | | | | | H0665: 1, H0136: 1 and | | | |
| | | | | | | | S0242: 1. | | | |
| 358 | HSDJHI2 | 876344 | 368 | 3-623 | 981 | Thr-1 to Asp-19, | AR089: 24, AR061: 6 | | | |
| | | | | | | Cys-23 to Cys-34, | S0134: 1, L0749: 1, | | | |
| | | | | | | Gln-36 to Gln-58, | L0759: 1, S0260: 1 and | | | |
| | | | | | | Leu-78 to Gly-87, | L0596: 1. | | | |
| | | | | | | Asp-164 to His-169. | | | | |
| 359 | HNBUT01 | 913838 | 369 | 3-827 | 982 | Arg-1 to Gly-10. | AR089: 15, AR061: 5 | | | |
| | | | | | | | S0360: 2, L0766: 2, | | | |
| | | | | | | | L0747: 2, T0002: 1, | | | |
| | | | | | | | H0686: 1, H0662: 1, | | | |
| | | | | | | | S0046: 1, H0023: 1, | | | |
| | | | | | | | H0560: 1, H0647: 1, | | | |
| | | | | | | | L0662: 1, L0666: 1, | | | |
| | | | | | | | H0576: 1, L0779: 1, | | | |
| | | | | | | | L0596: 1, L0590: 1, | | | |
| | | | | | | | L0601: 1 and H0667: 1. | | | |
| 360 | HEOQN14 | 923752 | 370 | 1044-520 | 983 | | AR089: 15, AR061: 7 | | | |
| 361 | HTXKL86 | 928194 | 371 | 1-762 | 984 | | AR061: 1, AR089: 1 | | | |
| | | | | | | | L0438: 12, L0439: 11, | | | |
| | | | | | | | H0617: 5, H0556: 4, | | | |
| | | | | | | | H0618: 3, H0253: 3, | | | |
| | | | | | | | L0769: 3, L0761: 3, | | | |
| | | | | | | | L0759: 3, H0544: 2, | | | |
| | | | | | | | H0031: 2, H0135: 2, | | | |
| | | | | | | | H0038: 2, H0641: 2, | | | |
| | | | | | | | L0764: 2, L0783: 2, | | | |
| | | | | | | | L0809: 2, L0790: 2, | | | |
| | | | | | | | L0666: 2, L0663: 2, | | | |
| | | | | | | | L0665: 2, H0144: 2, | | | |
| | | | | | | | S0330: 2, L0751: 2, | | | |
| | | | | | | | L0779: 2, H0543: 2, | | | |
| | | | | | | | H0265: 1, H0685: 1, | | | |
| | | | | | | | H0657: 1, H0306: 1, | | | |
| | | | | | | | S0420: 1, S0354: 1, | | | |
| | | | | | | | S0360: 1, S0046: 1, | | | |
| | | | | | | | L0717: 1, H0550: 1, | | | |
| | | | | | | | H0592: 1, H0333: 1, | | | |
| | | | | | | | H0331: 1, H0559: 1, | | | |
| | | | | | | | H0486: 1, H0013: 1, | | | |
| | | | | | | | H0244: 1, H0635: 1, | | | |
| | | | | | | | H0575: 1, H0596: 1, | | | |
| | | | | | | | T0110: 1, H0123: 1, | | | |
| | | | | | | | H0615: 1, H0033: 1, | | | |
| | | | | | | | H0553: 1, H0212: 1, | | | |
| | | | | | | | H0124: 1, H0040: 1, | | | |
| | | | | | | | H0616: 1, H0264: 1, | | | |
| | | | | | | | H0488: 1, H0100: 1, | | | |
| | | | | | | | H0494: 1, H0131: 1, | | | |
| | | | | | | | H0529: 1, L0637: 1, | | | |
| | | | | | | | L0772: 1, L0766: 1, | | | |
| | | | | | | | L0775: 1, L0375: 1, | | | |
| | | | | | | | L0776: 1, L0628: 1, | | | |
| | | | | | | | L0657: 1, L0664: 1, | | | |
| | | | | | | | S0374: 1, H0547: 1, | | | |
| | | | | | | | H0593: 1, S3014: 1, | | | |
| | | | | | | | S0027: 1, L0748: 1, | | | |
| | | | | | | | L0750: 1, L0731: 1, | | | |
| | | | | | | | L0758: 1, H0595: 1, | | | |
| | | | | | | | S0276: 1 and H0423: 1. | | | |
| 362 | HDQGV77 | 937546 | 372 | 12-1379 | 985 | Gln-24 to Gly-30, | AR089: 4, AR061: 2 | | | |
| | | | | | | Asp-57 to Lys-62, | H0521: 17, S0007: 11, | | | |
| | | | | | | Leu-109 to Thr-115, | L0747: 11, H0543: 8, | | | |
| | | | | | | Asn-153 to Gln-166, | S0278: 7, H0581: 7, | | | |
| | | | | | | Gly-168 to Glu-173, | S0344: 7, L0766: 7, | | | |
| | | | | | | Gln-184 to Ala-199, | L0745: 7, H0556: 6, | | | |
| | | | | | | Gly-221 to Pro-232, | L0769: 6, L0748: 6, | | | |
| | | | | | | Pro-234 to Pro-243, | L0731: 6, L0601: 6, | | | |
| | | | | | | Gln-251 to Ser-259, | H0584: 5, L0157: 5, | | | |
| | | | | | | Arg-273 to Gly-302, | H0424: 5, L0758: 5, | | | |
| | | | | | | Lys-317 to Thr-349, | H0542: 5, S0049: 4, | | | |
| | | | | | | Ala-351 to Arg-368. | H0150: 4, H0050: 4, | | | |
| | | | | | | | H0135: 4, L0666: 4, | | | |
| | | | | | | | H0522: 4, H0436: 4, | | | |
| | | | | | | | L0439: 4, L0750: 4, | | | |
| | | | | | | | H0423: 4, T0002: 3, | | | |
| | | | | | | | H0656: 3, S0001: 3, | | | |
| | | | | | | | H0619: 3, H0617: 3, | | | |
| | | | | | | | T0042: 3, S0142: 3, | | | |
| | | | | | | | S0002: 3, L0770: 3, | | | |
| | | | | | | | L0761: 3, L0378: 3, | | | |
| | | | | | | | L0659: 3, L0665: 3, | | | |
| | | | | | | | H0422: 3, H0171: 2, | | | |
| | | | | | | | H0650: 2, L0005: 2, | | | |
| | | | | | | | H0645: 2, H0455: 2, | | | |
| | | | | | | | H0156: 2, H0575: 2, | | | |
| | | | | | | | H0309: 2, H0457: 2, | | | |
| | | | | | | | H0178: 2, H0620: 2, | | | |
| | | | | | | | T0010: 2, H0083: 2, | | | |
| | | | | | | | S6028: 2, T0006: 2, | | | |
| | | | | | | | H0604: 2, H0180: 2, | | | |
| | | | | | | | H0598: 2, H0090: 2, | | | |
| | | | | | | | H0264: 2, L0775: 2, | | | |
| | | | | | | | L0375: 2, L0655: 2, | | | |
| | | | | | | | L0635: 2, L0663: 2, | | | |
| | | | | | | | H0697: 2, H0658: 2, | | | |
| | | | | | | | S0027: 2, L0740: 2, | | | |
| | | | | | | | L0756: 2, L0759: 2, | | | |
| | | | | | | | H0445: 2, L0589: 2, | | | |
| | | | | | | | L0599: 2, H0170: 1, | | | |
| | | | | | | | H0265: 1, H0295: 1, | | | |
| | | | | | | | H0583: 1, H0341: 1, | | | |
| | | | | | | | H0255: 1, H0459: 1, | | | |
| | | | | | | | H0638: 1, H0637: 1, | | | |
| | | | | | | | S0045: 1, S6026: 1, | | | |
| | | | | | | | H0351: 1, S6016: 1, | | | |
| | | | | | | | S0222: 1, H0392: 1, | | | |
| | | | | | | | H0574: 1, H0486: 1, | | | |
| | | | | | | | H0013: 1, H0250: 1, | | | |
| | | | | | | | H0069: 1, H0075: 1, | | | |
| | | | | | | | H0427: 1, H0042: 1, | | | |
| | | | | | | | H0036: 1, H0004: 1, | | | |
| | | | | | | | S0010: 1, T0048: 1, | | | |
| | | | | | | | H0318: 1, H0434: 1, | | | |
| | | | | | | | H0052: 1, H0086: 1, | | | |
| | | | | | | | H0572: 1, H0123: 1, | | | |
| | | | | | | | H0012: 1, H0024: 1, | | | |
| | | | | | | | S0051: 1, H0594: 1, | | | |
| | | | | | | | H0428: 1, H0031: 1, | | | |
| | | | | | | | H0165: 1, L0456: 1, | | | |
| | | | | | | | H0038: 1, H0634: 1, | | | |
| | | | | | | | H0616: 1, H0063: 1, | | | |
| | | | | | | | H0551: 1, H0488: 1, | | | |
| | | | | | | | S0038: 1, H0130: 1, | | | |
| | | | | | | | H0695: 1, L0520: 1, | | | |
| | | | | | | | L0640: 1, L0667: 1, | | | |
| | | | | | | | L0772: 1, L0764: 1, | | | |
| | | | | | | | L0771: 1, L0662: 1, | | | |
| | | | | | | | L0363: 1, L0767: 1, | | | |
| | | | | | | | L0768: 1, L0803: 1, | | | |
| | | | | | | | L0804: 1, L0650: 1, | | | |
| | | | | | | | L0805: 1, L0809: 1, | | | |
| | | | | | | | H0144: 1, S0310: 1, | | | |
| | | | | | | | L0438: 1, L0352: 1, | | | |
| | | | | | | | H0660: 1, H0648: 1, | | | |
| | | | | | | | H0672: 1, S0330: 1, | | | |
| | | | | | | | H0518: 1, H0696: 1, | | | |
| | | | | | | | H0187: 1, S3014: 1, | | | |
| | | | | | | | S0028: 1, S0032: 1, | | | |
| | | | | | | | L0743: 1, L0754: 1, | | | |
| | | | | | | | L0746: 1, L0749: 1, | | | |
| | | | | | | | L0779: 1, H0343: 1, | | | |
| | | | | | | | H0595: 1, L0591: 1, | | | |
| | | | | | | | L0592: 1, L0608: 1, | | | |
| | | | | | | | L0595: 1, L0366: 1, | | | |
| | | | | | | | S0106: 1 and H0352: 1. | | | |
| 363 | HE8TM80 | 955022 | 373 | 358-696 | 986 | Arg-1 to Asn-7, | AR089: 9, AR061: 7 | | | |
| | | | | | | Leu-56 to Met-61. | H0040: 5, H0547: 5, | | | |
| | | | | | | | S0152: 5, L0593: 5, | | | |
| | | | | | | | L0595: 5, HO551: 4, | | | |
| | | | | | | | H0529: 4, H0519: 4, | | | |
| | | | | | | | H0560: 3, H0561: 3, | | | |
| | | | | | | | H0657: 2, S0360: 2, | | | |
| | | | | | | | S0007: 2, H0586: 2, | | | |
| | | | | | | | H0013: 2, H0494: 2, | | | |
| | | | | | | | L0809: 2, H0435: 2, | | | |
| | | | | | | | S0028: 2, L0748: 2, | | | |
| | | | | | | | L0439: 2, L0731: 2, | | | |
| | | | | | | | L0759: 2, H0445: 2, | | | |
| | | | | | | | L0592: 2, H0542: 2, | | | |
| | | | | | | | H0624: 1, H0170: 1, | | | |
| | | | | | | | H0556: 1, S0212: 1, | | | |
| | | | | | | | H0663: 1, S0418: 1, | | | |
| | | | | | | | S0356: 1, S0046: 1, | | | |
| | | | | | | | H0393: 1, H0486: 1, | | | |
| | | | | | | | H0427: 1, H0156: 1, | | | |
| | | | | | | | H0036: 1, H0318: 1, | | | |
| | | | | | | | T0110: 1, H0545: 1, | | | |
| | | | | | | | H0014: 1, H0266: 1, | | | |
| | | | | | | | H0188: 1, S0022: 1, | | | |
| | | | | | | | H0328: 1, H0688: 1, | | | |
| | | | | | | | T0023: 1, H0032: 1, | | | |
| | | | | | | | H0038: 1, H0268: 1, | | | |
| | | | | | | | S0142: 1, S0422: 1, | | | |
| | | | | | | | S0426: 1, L0761: 1, | | | |
| | | | | | | | L0646: 1, L0765: 1, | | | |
| | | | | | | | L0773: 1, L0794: 1, | | | |
| | | | | | | | L0766: 1, L0804: 1, | | | |
| | | | | | | | L0776: 1, L0655: 1, | | | |
| | | | | | | | L0659: 1, L0791: 1, | | | |
| | | | | | | | L0792: 1, L0663: 1, | | | |
| | | | | | | | L0664: 1, H0666: 1, | | | |
| | | | | | | | H0672: 1, H0539: 1, | | | |
| | | | | | | | H0555: 1, L0743: 1, | | | |
| | | | | | | | L0740: 1, L0749: 1, | | | |
| | | | | | | | L0779: 1, L0752: 1, | | | |
| | | | | | | | S0026: 1, S0194: 1, | | | |
| | | | | | | | H0543: 1, H0423: 1 and | | | |
| | | | | | | | S0424: 1. | | | |
| 364 | HWLEY40 | 957875 | 374 | 3-881 | 987 | Glu-6 to Gly-11, | AR089: 2, AR061: 2 | | | |
| | | | | | | Gly-64 to Ser-70, | L0438: 12, L0439: 11, | | | |
| | | | | | | Val-140 to Val-145, | H0617: 5, H0556: 4, | | | |
| | | | | | | His-163 to Leu-168, | H0618: 3, H0253: 3, | | | |
| | | | | | | Leu-189 to Lys-198, | L0769: 3, L0761: 3, | | | |
| | | | | | | Ser-221 to Thr-227, | L0759: 3, H0544: 2, | | | |
| | | | | | | His-261 to Pro-270. | H0031: 2, H0135: 2, | | | |
| | | | | | | | H0038: 2, H0641: 2, | | | |
| | | | | | | | L0764: 2, L0783: 2, | | | |
| | | | | | | | L0809: 2, L0790: 2, | | | |
| | | | | | | | L0666: 2, L0663: 2, | | | |
| | | | | | | | L0665: 2, H0144: 2, | | | |
| | | | | | | | S0330: 2, L0751: 2, | | | |
| | | | | | | | L0779: 2, H0543: 2, | | | |
| | | | | | | | H0265: 1, H0685: 1, | | | |
| | | | | | | | H0657: 1, H0306: 1, | | | |
| | | | | | | | S0420: 1, S0354: 1, | | | |
| | | | | | | | S0360: 1, S0046: 1, | | | |
| | | | | | | | L0717: 1, H0550: 1, | | | |
| | | | | | | | H0592: 1, H0333: 1, | | | |
| | | | | | | | H0331: 1, H0559: 1, | | | |
| | | | | | | | H0486: 1, H0013: 1, | | | |
| | | | | | | | H0244: 1, H0635: 1, | | | |
| | | | | | | | H0575: 1, H0596: 1, | | | |
| | | | | | | | T0110: 1, H0123: 1, | | | |
| | | | | | | | H0615: 1, H0033: 1, | | | |
| | | | | | | | H0553: 1, H0212: 1, | | | |
| | | | | | | | H0124: 1, H0040: 1, | | | |
| | | | | | | | H0616: 1, H0264: 1, | | | |
| | | | | | | | H0488: 1, H0100: 1, | | | |
| | | | | | | | H0494: 1, H0131: 1, | | | |
| | | | | | | | H0529: 1, L0637: 1, | | | |
| | | | | | | | L0772: 1, L0766: 1, | | | |
| | | | | | | | L0775: 1, L0375: 1, | | | |
| | | | | | | | L0776: 1, L0628: 1, | | | |
| | | | | | | | L0657: 1, L0664: 1, | | | |
| | | | | | | | S0374: 1, H0547: 1, | | | |
| | | | | | | | H0593: 1, S3014: 1, | | | |
| | | | | | | | S0027: 1, L0748: 1, | | | |
| | | | | | | | L0750: 1, L0731: 1, | | | |
| | | | | | | | L0758: 1, H0595: 1, | | | |
| | | | | | | | S0276: 1 and H0423: 1. | | | |
| 365 | HDPPD36 | 493820 | 375 | 403-272 | 988 | Trp-22 to Glu-35. | AR089: 1, AR061: 0 | | | |
| | | | | | | | H0522: 2, L0439: 2, | | | |
| | | | | | | | L0777: 2, H0591: 1, | | | |
| | | | | | | | H0144: 1, H0521: 1, | | | |
| | | | | | | | L0758: 1 and L0605: 1. | | | |
| | | 964320 | 620 | 2-436 | 1233 | Met-1 to Tyr-14, | | | | |
| | | | | | | Arg-24 to Gly-30, | | | | |
| | | | | | | His-49 to Cys-55, | | | | |
| | | | | | | Ile-94 to Phe-99, | | | | |
| | | | | | | Pro-128 to Gly-136. | | | | |
| 366 | HOUBZ94 | 527876 | 376 | 1-153 | 989 | Glu-1 to Thr-6. | AR061: 7, AR089: 3 | 19p13.3 | 108725, | |
| | | | | | | | H0161: 1 and S0040: 1. | | 120700, | |
| | | | | | | | | | 133171, | |
| | | | | | | | | | 136836, | |
| | | | | | | | | | 145981, | |
| | | | | | | | | | 147141, | |
| | | | | | | | | | 164953, | |
| | | | | | | | | | 188070, | |
| | | | | | | | | | 600957, | |
| | | | | | | | | | 601238, | |
| | | | | | | | | | 601846, | |
| | | | | | | | | | 602216, | |
| | | | | | | | | | 602477 | |
| 367 | HMIAH32 | 550977 | 377 | 49-702 | 990 | His-15 to Ser-21, | AR061: 7, AR089: 2 | 7 | | |
| | | | | | | Asp-44 to Val-65, | S6028: 2, L0766: 2, | | | |
| | | | | | | Glu-95 to Thr-101, | L0777: 2, L0752: 2, | | | |
| | | | | | | Ala-131 to Asp-142. | H0663: 1, H0696: 1 and | | | |
| | | | | | | | L0779: 1. | | | |
| 368 | HDPTH43 | 573418 | 378 | 1-432 | 991 | Ser-28 to Glu-34, | AR061: 2, AR089: 1 | | | |
| | | | | | | Ser-77 to Arg-82, | S0116: 2, H0586: 1 and | | | |
| | | | | | | Trp-127 to Arg-135. | H0521: 1. | | | |
| 369 | HCE3W04 | 615501 | 379 | 94-873 | 992 | | AR089: 1, AR061: 0 | | | |
| | | | | | | | L0789: 4, L0731: 4, | | | |
| | | | | | | | H0539: 3, L0779: 3, | | | |
| | | | | | | | S0007: 2, H0052: 2, | | | |
| | | | | | | | L0157: 2, H0123: 2, | | | |
| | | | | | | | H0233: 2, L0637: 2, | | | |
| | | | | | | | S0356: 1, S0360: 1, | | | |
| | | | | | | | H0550: 1, H0253: 1, | | | |
| | | | | | | | H0620: 1, H0408: 1, | | | |
| | | | | | | | H0188: 1, S0250: 1, | | | |
| | | | | | | | L0193: 1, L0455: 1, | | | |
| | | | | | | | H0135: 1, H0551: 1, | | | |
| | | | | | | | L0770: 1, L0794: 1, | | | |
| | | | | | | | L0776: 1, L0665: 1, | | | |
| | | | | | | | S0392: 1, L0750: 1 and | | | |
| | | | | | | | L0777: 1. | | | |
| 370 | HMUBZ20 | 670393 | 380 | 2-184 | 993 | Gly-42 to Ser-48. | AR089: 13, AR061: 3 | 5q23 | 121050, | |
| | | | | | | | H0529: 1 and H0693: | | 126150, | |
| | | | | | | | 1. | | 159000, | |
| | | | | | | | | | 179095, | |
| | | | | | | | | | 192974, | |
| | | | | | | | | | 192974, | |
| | | | | | | | | | 601596 | |
| 371 | HDPAB51 | 685665 | 381 | 288-953 | 994 | Ser-18 to Ile-27, | AR089: 2, AR061: 2 | | | |
| | | | | | | Asp-124 to Gln-138. | H0521: 2, L0759: 2, | | | |
| | | | | | | | H0341: 1, H0620: 1, | | | |
| | | | | | | | H0266: 1 and L0766: 1. | | | |
| 372 | HPJAP28 | 686349 | 382 | 2-415 | 995 | Pro-25 to Ala-34, | AR061: 6, AR089: 3 | | | |
| | | | | | | Ser-69 to Ala-74, | H0622: 2, H0253: 1 | | | |
| | | | | | | Glu-92 to Gly-98. | and S0152: 1. | | | |
| 373 | HIBEC79 | 703000 | 383 | 338-3 | 996 | Ser-7 to Asp-13. | AR089: 1, AR061: 0 | | | |
| | | | | | | | L0766: 5, L0806: 3, | | | |
| | | | | | | | T0010: 2, L0761: 2, | | | |
| | | | | | | | H0521: 2, L0752: 2, | | | |
| | | | | | | | H0677: 2, S0278: 1, | | | |
| | | | | | | | H0559: 1, H0486: 1, | | | |
| | | | | | | | H0427: 1, S0038: 1, | | | |
| | | | | | | | L0796: 1, L0644: 1, | | | |
| | | | | | | | L0771: 1, L0659: 1, | | | |
| | | | | | | | L0666: 1, L0664: 1, | | | |
| | | | | | | | L0779: 1, H0445: 1 and | | | |
| | | | | | | | L0595: 1. | | | |
| 374 | HOQBF64 | 703177 | 384 | 48-401 | 997 | | AR089: 23, AR061: 14 | 17q23-q24 | 106180, | |
| | | | | | | | H0208: 1 and H0290: | | 115660, | |
| | | | | | | | 1. | | 138700, | |
| | | | | | | | | | 139250, | |
| | | | | | | | | | 148500, | |
| | | | | | | | | | 150200, | |
| | | | | | | | | | 154275, | |
| | | | | | | | | | 162100, | |
| | | | | | | | | | 170500, | |
| | | | | | | | | | 170500, | |
| | | | | | | | | | 170500, | |
| | | | | | | | | | 176960, | |
| | | | | | | | | | 182452, | |
| | | | | | | | | | 230200, | |
| | | | | | | | | | 249000, | |
| | | | | | | | | | 253250 | |
| 375 | HTEDL38 | 761609 | 385 | 133-534 | 998 | Pro-38 to Pro-46. | AR061: 3, AR089: 2 | | | |
| | | | | | | | H0038: 4, L0748: 4, | | | |
| | | | | | | | S0222: 2, L0598: 2, | | | |
| | | | | | | | L0776: 2, L0439: 2, | | | |
| | | | | | | | L0780: 2, L0752: 2, | | | |
| | | | | | | | H0050: 1, T0006: 1, | | | |
| | | | | | | | H0111: 1, S0036: 1, | | | |
| | | | | | | | H0616: 1, T0067: 1, | | | |
| | | | | | | | S0038: 1, L0770: 1, | | | |
| | | | | | | | L0766: 1, L0774: 1, | | | |
| | | | | | | | L0805: 1, L0655: 1, | | | |
| | | | | | | | L0526: 1, L0666: 1, | | | |
| | | | | | | | L0438: 1, S0028: 1, | | | |
| | | | | | | | L0777: 1, L0595: 1 and | | | |
| | | | | | | | L0366: 1. | | | |
| 376 | HE9HI71 | 779375 | 386 | 2-682 | 999 | | AR089: 1, AR061: 1 | | | |
| | | | | | | | H0013: 3, T0010: 1, | | | |
| | | | | | | | L0435: 1, H0144: 1, | | | |
| | | | | | | | L0438: 1 and L0439: 1. | | | |
| 377 | HNFHS82 | 779946 | 387 | 2-415 | 1000 | | AR061: 4, AR089: 2 | | | |
| | | | | | | | S0278: 1, H0620: 1 and | | | |
| | | | | | | | H0271: 1. | | | |
| 378 | HOUHO89 | 786548 | 388 | 367-909 | 1001 | Ser-1 to Gly-7, | AR089: 1, AR061: 1 | | | |
| | | | | | | Asp-24 to Leu-31, | S0342: 1 and H0521: 1. | | | |
| | | | | | | Lys-50 to Arg-58, | | | | |
| | | | | | | Glu-65 to Arg-73, | | | | |
| | | | | | | Thr-102 to His-109, | | | | |
| | | | | | | Arg-116 to Ile-122. | | | | |
| 379 | HFPBB28 | 844526 | 389 | 3-335 | 1002 | Ala-11 to Gln-16, | AR054: 10, AR051: 2, | | | |
| | | | | | | Leu-46 to Ala-52, | AR050: 2, AR061: 1, | | | |
| | | | | | | Gln-84 to Glu-89, | AR089: 0 | | | |
| | | | | | | Phe-105 to Ser-111. | S0031: 2, S0001: 1, | | | |
| | | | | | | | S0045: 1, S0222: 1, | | | |
| | | | | | | | H0271: 1, S0144: 1, | | | |
| | | | | | | | L0368: 1, S0052: 1, | | | |
| | | | | | | | S0146: 1, S0390: 1, | | | |
| | | | | | | | S0028: 1 and S0260: 1. | | | |
| 380 | HHEWQ61 | 876063 | 390 | 3-497 | 1003 | Thr-6 to Tyr-13, | AR061: 1, AR089: 0 | | | |
| | | | | | | Ala-23 to Asp-30, | L0439: 4, H0543: 3, | | | |
| | | | | | | Phe-66 to Arg-71, | S0360: 2, L0662: 2, | | | |
| | | | | | | Pro-92 to Glu-102, | L0742: 2, L0481: 1, | | | |
| | | | | | | Arg-108 to Leu-116, | H0619: 1, H0486: 1, | | | |
| | | | | | | Tyr-159 to Thr-164. | L0586: 1, L0021: 1, | | | |
| | | | | | | | S0051: 1, H0424: 1, | | | |
| | | | | | | | L0789: 1, S0374: 1, | | | |
| | | | | | | | H0539: 1, L0744: 1, | | | |
| | | | | | | | L0754: 1, L0777: 1, | | | |
| | | | | | | | L0752: 1 and H0506: 1. | | | |
| 381 | HUFGH09 | 877078 | 391 | 3-647 | 1004 | Leu-8 to Pro-14, | AR089: 3, AR061: 1 | | | |
| | | | | | | Pro-59 to Asn-64, | H0624: 2, S0356: 1, | | | |
| | | | | | | Pro-80 to Glu-91, | H0607: 1, L0060: 1 and | | | |
| | | | | | | Gly-127 to Lys-134, | H0506: 1. | | | |
| | | | | | | Arg-146 to Glu-152, | | | | |
| | | | | | | Thr-156 to Asp-165, | | | | |
| | | | | | | Pro-184 to Asp-203. | | | | |
| 382 | HLICA79 | 880881 | 392 | 1-1197 | 1005 | Arg-1 to Gly-8, | AR051: 10, AR054: | | | |
| | | | | | | Gly-10 to Leu-17, | 10, AR050: 9, AR089: | | | |
| | | | | | | Lys-41 to Pro-51, | 5, AR061: 3 | | | |
| | | | | | | Lys-67 to Thr-74, | L0775: 4, H0046: 3, | | | |
| | | | | | | Glu-94 to Lys-99, | H0622: 3, H0660: 3, | | | |
| | | | | | | Phe-107 to Gly-112, | H0438: 2, L0663: 2, | | | |
| | | | | | | Arg-125 to Glu-131, | L0665: 2, L0777: 2, | | | |
| | | | | | | Leu-141 to Arg-153, | S0026: 2, H0583: 1, | | | |
| | | | | | | Gly-168 to Ala-176, | S0282: 1, S0356: 1, | | | |
| | | | | | | Asn-210 to Arg-215, | H0051: 1, H0071: 1, | | | |
| | | | | | | Asn-222 to Ser-234, | H0355: 1, H0510: 1, | | | |
| | | | | | | Leu-238 to Thr-249. | H0615: 1, H0428: 1, | | | |
| | | | | | | | H0644: 1, L0142: 1, | | | |
| | | | | | | | S0364: 1, H0059: 1, | | | |
| | | | | | | | L0763: 1, L0803: 1, | | | |
| | | | | | | | L0804: 1, L0657: 1, | | | |
| | | | | | | | L0809: 1, L0664: 1, | | | |
| | | | | | | | H0690: 1, H0670: 1, | | | |
| | | | | | | | H0672: 1, H0479: 1, | | | |
| | | | | | | | S0028. 1, L0751: 1, | | | |
| | | | | | | | S0031: 1, L0604: 1, | | | |
| | | | | | | | L0366: 1, S0192: 1 and | | | |
| | | | | | | | S0424: 1. | | | |
| 383 | HSLIH01 | 884251 | 393 | 11-649 | 1006 | Arg-14 to Glu-20, | AR089: 3, AR061: 2, | | | |
| | | | | | | Leu-30 to Arg-42, | AR051: 2, AR050: 1, | | | |
| | | | | | | Gly-57 to Ala-65, | AR054: 1 | | | |
| | | | | | | Asn-99 to Arg-104, | L0775: 4, H0046: 3, | | | |
| | | | | | | Asn-111 to Ser-117. | H0622: 3, H0660: 3, | | | |
| | | | | | | | H0402: 2, H0438: 2, | | | |
| | | | | | | | L0663: 2, L0665: 2, | | | |
| | | | | | | | L0777: 2, S0026: 2, | | | |
| | | | | | | | H0583: 1, S0282: 1, | | | |
| | | | | | | | S0356: 1, H0051: 1, | | | |
| | | | | | | | H0071: 1, H0355: 1, | | | |
| | | | | | | | H0510: 1, H0615: 1, | | | |
| | | | | | | | H0428: 1, H0644: 1, | | | |
| | | | | | | | L0142: 1, S0364: 1, | | | |
| | | | | | | | H0059: 1, L0763: 1, | | | |
| | | | | | | | L0803: 1, L0804: 1, | | | |
| | | | | | | | L0657: 1, L0809: 1, | | | |
| | | | | | | | L0666: 1, L0664: 1, | | | |
| | | | | | | | H0144: 1, H0690: 1, | | | |
| | | | | | | | H0670: 1, H0672: 1, | | | |
| | | | | | | | H0479: 1, S0028: 1, | | | |
| | | | | | | | L0751: 1, S0031: 1, | | | |
| | | | | | | | L0604: 1, L0366: 1, | | | |
| | | | | | | | S0192: 1 and S0424: 1. | | | |
| 384 | HE9OV91 | 887364 | 394 | 34-723 | 1007 | AR054: 2, AR051: 2, | | | | |
| | | | | | | | AR050: 1, AR089: 0, | | | |
| | | | | | | | AR061: 0 | | | |
| | | | | | | | S0116: 1, H0619: 1, | | | |
| | | | | | | | H0421: 1, H0144: 1, | | | |
| | | | | | | | L0748: 1 and L0758: 1. | | | |
| 385 | HHEDS85 | 894602 | 395 | 2-457 | 1008 | Ser-12 to Ser-19, | AR061: 2, AR089: 1 | | | |
| | | | | | | Ser-34 to Lys-47. | T0039: 1, H0144: 1 | | | |
| | | | | | | | and H0542: 1. | | | |
| 386 | HNTDJ68 | 899624 | 396 | 667-1599 | 1009 | Phe-40 to Tyr-47, | AR051: 25, AR050: | | | |
| | | | | | | Ile-119 to Arg-125, | 13, AR089: 3, AR061: | | | |
| | | | | | | Ser-141 to Arg-200, | 2 | | | |
| | | | | | | Arg-217 to Lys-223, | L0731: 4, L0596: 4, | | | |
| | | | | | | Ala-303 to Leu-311. | H0615: 3, L0777: 3, | | | |
| | | | | | | | H0625: 2, L0803: 2, | | | |
| | | | | | | | L0740: 2, H0657: 1, | | | |
| | | | | | | | H0393: 1, H0441: 1, | | | |
| | | | | | | | T0109: 1, H0318: 1, | | | |
| | | | | | | | H0581: 1, H0566: 1, | | | |
| | | | | | | | H0551: 1, L0761: 1, | | | |
| | | | | | | | L0641: 1, L0766: 1, | | | |
| | | | | | | | L0650: 1, L0784: 1, | | | |
| | | | | | | | H0144: 1, H0547: 1, | | | |
| | | | | | | | H0539: 1, H0696: 1, | | | |
| | | | | | | | S3014: 1, L0744: 1, | | | |
| | | | | | | | L0779: 1 and L0780: 1. | | | |
| 387 | HKAHO77 | 906671 | 397 | 712-398 | 1010 | | AR089: 19, AR061: 7 | | | |
| | | | | | | | L0771: 4, L0764: 3, | | | |
| | | | | | | | H0282: 2, H0494: 2, | | | |
| | | | | | | | L0518: 2, L0617: 1, | | | |
| | | | | | | | L0794: 1, L0774: 1, | | | |
| | | | | | | | L0806: 1, L0657: 1, | | | |
| | | | | | | | L0663: 1, S0374: 1, | | | |
| | | | | | | | H0672: 1, L0752: 1 and | | | |
| | | | | | | | L0755: 1. | | | |
| 388 | HTFNP84 | 909687 | 398 | 70-1227 | 1011 | Tyr-11 to Val-16, | AR089: 0, AR061: 0 | | | |
| | | | | | | Glu-37 to Arg-42, | L0766: 15, L0646: 7, | | | |
| | | | | | | Asn-50 to Arg-58, | H0659: 5, L0749: 5, | | | |
| | | | | | | Leu-82 to Leu-96, | L0759: 5, S0374: 4, | | | |
| | | | | | | Glu-112 to Gln-120. | L0804: 3, H0547: 3, | | | |
| | | | | | | | H0658: 3, H0170: 2, | | | |
| | | | | | | | H0650: 2, S0418: 2, | | | |
| | | | | | | | S0280: 2, H0598: 2, | | | |
| | | | | | | | L0763: 2, L0803: 2, | | | |
| | | | | | | | L0666: 2, L0663: 2, | | | |
| | | | | | | | H0435: 2, H0660: 2, | | | |
| | | | | | | | L0748: 2, L0757: 2, | | | |
| | | | | | | | S0026: 2, S0424: 2, | | | |
| | | | | | | | H0686: 1, H0657: 1, | | | |
| | | | | | | | H0662: 1, S0420: 1, | | | |
| | | | | | | | S0358: 1, S0376: 1, | | | |
| | | | | | | | L0717: 1, H0574: 1, | | | |
| | | | | | | | H0486: 1, H0596: 1, | | | |
| | | | | | | | L0471: 1, H0024: 1, | | | |
| | | | | | | | H0014: 1, H0083: 1, | | | |
| | | | | | | | H0510: 1, H0266: 1, | | | |
| | | | | | | | S0250: 1, S0003: 1, | | | |
| | | | | | | | H0428: 1, H0032: 1, | | | |
| | | | | | | | H0591: 1, H0040: 1, | | | |
| | | | | | | | H0634: 1, H0616: 1, | | | |
| | | | | | | | H0560: 1, S0440: 1, | | | |
| | | | | | | | H0641: 1, H0529: 1, | | | |
| | | | | | | | L0520: 1, L0769: 1, | | | |
| | | | | | | | L0761: 1, L0764: 1, | | | |
| | | | | | | | L0521: 1, L0662: 1, | | | |
| | | | | | | | L0774: 1, L0375: 1, | | | |
| | | | | | | | L0805: 1, L0776: 1, | | | |
| | | | | | | | L0655: 1, L0606: 1, | | | |
| | | | | | | | L0659: 1, L0635: 1, | | | |
| | | | | | | | L0367: 1, L0789: 1, | | | |
| | | | | | | | L0665: 1, H0684: 1, | | | |
| | | | | | | | H0670: 1, H0666: 1, | | | |
| | | | | | | | H0672: 1, H0521: 1, | | | |
| | | | | | | | H0704: 1, S0406: 1, | | | |
| | | | | | | | L0439: 1, L0750: 1, | | | |
| | | | | | | | L0756: 1, L0779: 1, | | | |
| | | | | | | | L0777: 1, L0752: 1, | | | |
| | | | | | | | L0755: 1, L0758: 1, | | | |
| | | | | | | | L0608: 1, L0362: 1, | | | |
| | | | | | | | H0667: 1, S0196: 1, | | | |
| | | | | | | | H0543: 1, H0423: 1, | | | |
| | | | | | | | H0422: 1 and H0352: 1. | | | |
| 389 | HDQGZ78 | 909735 | 399 | 5-442 | 1012 | Met-15 to Pro-20, | AR061: 0, AR089: 0 | | | |
| | | | | | | Pro-47 to Arg-53, | H0521: 2, L0758: 2, | | | |
| | | | | | | Tyr-61 to Asp-71. | H0038: 1, L0644: 1, | | | |
| | | | | | | | L0645: 1, L0764: 1, | | | |
| | | | | | | | L0662: 1, L0794: 1, | | | |
| | | | | | | | L0557: 1, L0747: 1 and | | | |
| | | | | | | | L0779: 1. | | | |
| 390 | HHEMD52 | 909742 | 400 | 623-1618 | 1013 | Trp-3 to Thr-14, | AR089: 4, AR061: 3 | | | |
| | | | | | | Ala-21 to Arg-30, | H0457: 3, H0271: 3, | | | |
| | | | | | | Glu-66 to Pro-74, | H0543: 3, H0422: 2, | | | |
| | | | | | | Pro-103 to Gly-108, | H0583: 1, H0650: 1, | | | |
| | | | | | | Ile-135 to Ile-142. | H0484: 1, H0483: 1, | | | |
| | | | | | | | S0442: 1, H0580: 1, | | | |
| | | | | | | | S0140: 1, H0486: 1, | | | |
| | | | | | | | H0250: 1, HO050: 1, | | | |
| | | | | | | | H0630: 1, H0264: 1, | | | |
| | | | | | | | H0488: 1, H0487: 1, | | | |
| | | | | | | | S0002: 1, L0439: 1, | | | |
| | | | | | | | H0707: 1, H0136: 1 and | | | |
| | | | | | | | H0677: 1. | | | |
| 391 | HSIDQ38 | 909854 | 401 | 3-764 | 1014 | Ala-18 to Arg-23, | AR061: 3, AR089: 3 | | | |
| | | | | | | Gly-28 to Trp-35, | L0766: 5, H0587: 2, | | | |
| | | | | | | Gln-53 to Arg-61, | H0036: 2, L0745: 2, | | | |
| | | | | | | Asp-122 to Glu-127, | L0747: 2, H0556: 1, | | | |
| | | | | | | Gln-163 to Cys-171. | S0114: 1, H0590: 1, | | | |
| | | | | | | | H0052: 1, L0640: 1, | | | |
| | | | | | | | L0770: 1, L0771: 1, | | | |
| | | | | | | | L0659: 1 and L0665: 1. | | | |
| 392 | HSKBF02 | 909855 | 402 | 3-395 | 1015 | Gly-35 to Asp-41. | AR089: 53, AR061: 14 | | | |
| | | | | | | | L0438: 6, L0751: 6, | | | |
| | | | | | | | L0439: 5, L0770: 4, | | | |
| | | | | | | | H0052: 2, H0620: 2, | | | |
| | | | | | | | H0521: 2, L0756: 2, | | | |
| | | | | | | | L0731: 2, L0758: 2, | | | |
| | | | | | | | L0588: 2, H0556: 1, | | | |
| | | | | | | | S0282: 1, H0662: 1, | | | |
| | | | | | | | H0402: 1, S0418: 1, | | | |
| | | | | | | | T0008: 1, S0222: 1, | | | |
| | | | | | | | H0392: 1, H0333: 1, | | | |
| | | | | | | | L0021: 1, H0581: 1, | | | |
| | | | | | | | S0049: 1, L0471: 1, | | | |
| | | | | | | | H0266: 1, L0351: 1, | | | |
| | | | | | | | L0772: 1, L0766: 1, | | | |
| | | | | | | | L0776: 1, L0659: 1, | | | |
| | | | | | | | L0792: 1, H0522: 1, | | | |
| | | | | | | | S0027: 1, L0779: 1 and | | | |
| | | | | | | | S0011: 1. | | | |
| 393 | HIBDE74 | 766011 | 403 | 99-362 | 1016 | | AR089: 1, AR061: 1 | | | |
| | | | | | | | L0759: 2, H0171: 1, | | | |
| | | | | | | | T0010: 1, H0090: 1, | | | |
| | | | | | | | L0761: 1, L0766: 1, | | | |
| | | | | | | | S3014: 1, L0745: 1, | | | |
| | | | | | | | L0747: 1 and H0506: 1. | | | |
| | | 909876 | 621 | 2-751 | 1234 | | | | | |
| 394 | HWMAE53 | 909877 | 404 | 1-438 | 1017 | Glu-7 to Gln-17, | AR089: 3, AR061: 1 | | | |
| | | | | | | Tyr-27 to Cys-32, | S0354: 1 and H0030: 1. | | | |
| | | | | | | Thr-63 to Lys-70, | | | | |
| | | | | | | Glu-89 to Lys-94, | | | | |
| | | | | | | Tyr-100 to Ser-107, | | | | |
| | | | | | | Lys-122 to Val-127. | | | | |
| 395 | HFXCG28 | 909961 | 405 | 3-608 | 1018 | | AR061: 3, AR089: 0 | | | |
| | | | | | | | S0001: 1, H0619: 1 and | | | |
| | | | | | | | H0521: 1. | | | |
| 396 | HFTCU45 | 910053 | 406 | 1-504 | 1019 | Glu-47 to Asp-56, | AR089: 1, AR061: 0 | | | |
| | | | | | | Tyr-131 to Gly-136. | L0789: 4, H0539: 4, | | | |
| | | | | | | | L0731: 4, H0052: 3, | | | |
| | | | | | | | L0779: 3, S0007: 2, | | | |
| | | | | | | | L0157: 2, H0123: 2, | | | |
| | | | | | | | H0233: 2, L0637: 2, | | | |
| | | | | | | | S0356: 1, S0360: 1, | | | |
| | | | | | | | H0550: 1, H0486: 1, | | | |
| | | | | | | | H0013: 1, H0253: 1, | | | |
| | | | | | | | H0620: 1, H0408: 1, | | | |
| | | | | | | | H0188: 1, S0250: 1, | | | |
| | | | | | | | L0193: 1, L0455: 1, | | | |
| | | | | | | | H0135: 1, H0551: 1, | | | |
| | | | | | | | L0770: 1, L0794: 1, | | | |
| | | | | | | | L0776: 1, L0665: 1, | | | |
| | | | | | | | S0392: 1, L0750: 1 and | | | |
| | | | | | | | L0777: 1. | | | |
| 397 | HFTBL33 | 910055 | 407 | 1-1122 | 1020 | Glu-48 to Asp-57. | AR089: 16, AR061: 11 | | | |
| | | | | | | | L0789: 4, L0731: 4, | | | |
| | | | | | | | H0539: 3, L0779: 3, | | | |
| | | | | | | | S0007: 2, H0052: 2, | | | |
| | | | | | | | L0157: 2, H0123: 2, | | | |
| | | | | | | | H0233: 2, L0637: 2, | | | |
| | | | | | | | S0356: 1, S0360: 1, | | | |
| | | | | | | | H0550: 1, H0253: 1, | | | |
| | | | | | | | H0620: 1, H0408: 1, | | | |
| | | | | | | | H0188: 1, S0250: 1, | | | |
| | | | | | | | L0193: 1, L0455: 1, | | | |
| | | | | | | | H0135: 1, H0551: 1, | | | |
| | | | | | | | L0770: 1, L0794: 1, | | | |
| | | | | | | | L0776: 1, L0665: 1, | | | |
| | | | | | | | S0392: 1, L0750: 1 and | | | |
| | | | | | | | L0777: 1. | | | |
| 398 | HTXJA84 | 911387 | 408 | 2-628 | 1021 | Arg-1 to Ser-6, | AR061: 5, AR089: 2 | | | |
| | | | | | | Asn-55 to Phe-64, | H0521: 4, H0457: 3, | | | |
| | | | | | | Ser-86 to Gly-92, | H0580: 2, L0749: 2, | | | |
| | | | | | | Leu-124 to Glu-146. | L0588: 2, H0556: 1, | | | |
| | | | | | | | H0485: 1, H0635: 1, | | | |
| | | | | | | | H0581: 1, H0251: 1, | | | |
| | | | | | | | H0124: 1, H0551: 1, | | | |
| | | | | | | | H0529: 1, L0667: 1, | | | |
| | | | | | | | L0773: 1, L0803: 1, | | | |
| | | | | | | | S0052: 1, H0593: 1 and | | | |
| | | | | | | | S0424: 1. | | | |
| 399 | HKAAW89 | 911389 | 409 | 1-447 | 1022 | Gln-12 to Pro-20, | AR089: 0, AR061: 0 | | | |
| | | | | | | Thr-37 to Glu-42, | H0494: 1, H0520: 1, | | | |
| | | | | | | Ile-49 to Arg-56, | H0435: 1 and H0423: 1. | | | |
| | | | | | | Leu-75 to Arg-88, | | | | |
| | | | | | | Ala-111 to Leu-118. | | | | |
| 400 | HSXDD55 | 911460 | 410 | 312-737 | 1023 | Arg-75 to Lys-83, | AR061: 2, AR089: 2 | | | |
| | | | | | | Ser-89 to Arg-102, | L0439: 2, L0617: 1, | | | |
| | | | | | | Met-136 to Arg-142. | S0356: 1, H0457: 1, | | | |
| | | | | | | | S0036: 1, H0547: 1, | | | |
| | | | | | | | L0758: 1 and L0608: 1. | | | |
| 401 | HUFCI64 | 911558 | 411 | 3-773 | 1024 | Ala-89 to Glu-98, | AR089: 14, AR061: 4 | 19p13.3 | 108725, | |
| | | | | | | Leu-117 to Ala-123, | H0436: 11, H0255: 7, | | 120700, | |
| | | | | | | Glu-139 to Gly-147, | H0559: 7, H0521: 7, | | 133171, | |
| | | | | | | Leu-158 to Thr-163, | H0254: 4, H0423: 4, | | 136836, | |
| | | | | | | Glu-195 to Arg-211. | H0265: 3, H0486: 3, | | 145981, | |
| | | | | | | | H0250: 3, H0581: 3, | | 147141, | |
| | | | | | | | H0271: 3, H0124: 3, | | 164953, | |
| | | | | | | | H0264: 3, H0555: 3, | | 188070, | |
| | | | | | | | H0341: 2, S0354: 2, | | 600957, | |
| | | | | | | | H0580: 2, H0370: 2, | | 601238, | |
| | | | | | | | H0586: 2, H0257: 2, | | 601846, | |
| | | | | | | | H0069: 2, H0083: 2, | | 602216, | |
| | | | | | | | H0031: 2, H0634: 2, | | 602477 | |
| | | | | | | | H0488: 2, S0422: 2, | | | |
| | | | | | | | S0426: 2, L0766: 2, | | | |
| | | | | | | | L0649: 2, L0805: 2, | | | |
| | | | | | | | L0653: 2, L0776: 2, | | | |
| | | | | | | | L0655: 2, L0731: 2, | | | |
| | | | | | | | H0445: 2, H0543: 2, | | | |
| | | | | | | | H0677: 2, H0556: 1, | | | |
| | | | | | | | H0584: 1, H0140: 1, | | | |
| | | | | | | | H0583: 1, H0656: 1, | | | |
| | | | | | | | H0402: 1, H0305: 1, | | | |
| | | | | | | | H0458: 1, S0140: 1, | | | |
| | | | | | | | H0550: 1, H0497: 1, | | | |
| | | | | | | | H0575: 1, S0474: 1, | | | |
| | | | | | | | H0421: 1, H0024: 1, | | | |
| | | | | | | | H0213: 1, H0087: 1, | | | |
| | | | | | | | H0272: 1, H0641: 1, | | | |
| | | | | | | | S0144: 1, L0763: 1, | | | |
| | | | | | | | L0761: 1, L0662: 1, | | | |
| | | | | | | | L0794: 1, L0803: 1, | | | |
| | | | | | | | L0804: 1, L0659: 1, | | | |
| | | | | | | | L0787: 1, L0666: 1, | | | |
| | | | | | | | L0663: 1, H0518: 1, | | | |
| | | | | | | | S0044: 1, H0576: 1, | | | |
| | | | | | | | L0756: 1, H0422: 1, | | | |
| | | | | | | | S0452: 1 and H0506: 1. | | | |
| 402 | HWAFT84 | 911559 | 412 | 1-702 | 1025 | | AR061: 2, AR089: 1 | 19p13.3 | 108725, | |
| | | | | | | | | | 120700, | |
| | | | | | | | | | 133171, | |
| | | | | | | | | | 136836, | |
| | | | | | | | | | 145981, | |
| | | | | | | | | | 147141, | |
| | | | | | | | | | 164953, | |
| | | | | | | | | | 188070, | |
| | | | | | | | | | 600957, | |
| | | | | | | | | | 601238, | |
| | | | | | | | | | 601846, | |
| | | | | | | | | | 602216, | |
| | | | | | | | | | 602477 | |
| 403 | HETCL18 | 914535 | 413 | 1-684 | 1026 | Lys-12 to Pro-22, | AR054: 8, AR061: 5, | | | |
| | | | | | | Lys-38 to Thr-45, | AR089: 5, AR050: 1, | | | |
| | | | | | | Glu-65 to Lys-70, | AR051: 1 | | | |
| | | | | | | Phe-78 to Gly-83, | L0754: 45, L0747: 8, | | | |
| | | | | | | Arg-96 to Glu-102, | H0553: 7, L0775: 5, | | | |
| | | | | | | Leu-112 to Arg-124, | L0755: 5, L0659: 4, | | | |
| | | | | | | Gly-139 to Ala-147, | H0046: 3, H0622: 3, | | | |
| | | | | | | Asn-181 to Arg-186, | H0124: 3, L0665: 3, | | | |
| | | | | | | Asn-193 to Ser-205, | H0660: 3, L0748: 3, | | | |
| | | | | | | Leu-209 to Thr-220. | L0751: 3, H0402: 2, | | | |
| | | | | | | | H0438: 2, H0586: 2, | | | |
| | | | | | | | H0427: 2, H0599: 2, | | | |
| | | | | | | | H0575: 2, H0050: 2, | | | |
| | | | | | | | L0471: 2, H0644: 2, | | | |
| | | | | | | | H0616: 2, H0056: 2, | | | |
| | | | | | | | L0764: 2, L0662: 2, | | | |
| | | | | | | | L0794: 2, L0803: 2, | | | |
| | | | | | | | L0804: 2, L0666: 2, | | | |
| | | | | | | | L0663: 2, H0144: 2, | | | |
| | | | | | | | L0749: 2, L0750: 2, | | | |
| | | | | | | | L0777: 2, S0026: 2, | | | |
| | | | | | | | H0583: 1, S0282: 1, | | | |
| | | | | | | | H0305: 1, S0356: 1, | | | |
| | | | | | | | S0358: 1, S0045: 1, | | | |
| | | | | | | | S0046: 1, H0619: 1, | | | |
| | | | | | | | H0485: 1, S0280: 1, | | | |
| | | | | | | | H0042: 1, H0569: 1, | | | |
| | | | | | | | H0024: 1, H0051: 1, | | | |
| | | | | | | | H0071: 1, H0355: 1, | | | |
| | | | | | | | H0510: 1, H0328: 1, | | | |
| | | | | | | | H0615: 1, H0428: 1, | | | |
| | | | | | | | H0030: 1, L0142: 1, | | | |
| | | | | | | | S0364: 1, H0361: 1, | | | |
| | | | | | | | H0040: 1, H0413: 1, | | | |
| | | | | | | | H0059: 1, S0038: 1, | | | |
| | | | | | | | L0763: 1, L0770: 1, | | | |
| | | | | | | | L0769: 1, L0800: 1, | | | |
| | | | | | | | L0644: 1, L0363: 1, | | | |
| | | | | | | | L0806: 1, L0657: 1, | | | |
| | | | | | | | L0783: 1, L0809: 1, | | | |
| | | | | | | | L0664: 1, H0519: 1, | | | |
| | | | | | | | H0690: 1, H0670: 1, | | | |
| | | | | | | | H0672: 1, S0146: 1, | | | |
| | | | | | | | H0555: 1, H0479: 1, | | | |
| | | | | | | | S3012: 1, S0028: 1, | | | |
| | | | | | | | L0779: 1, L0731: 1, | | | |
| | | | | | | | S0031: 1, L0605: 1, | | | |
| | | | | | | | L0599: 1, L0604: 1, | | | |
| | | | | | | | L0603: 1, L0366: 1, | | | |
| | | | | | | | S0192: 1, H0543: 1, | | | |
| | | | | | | | S0424: 1 and H0506: 1. | | | |
| 404 | HCRNK75 | 914536 | 414 | 2156-912 | 1027 | Pro-1 to Met-7, | AR061: 124, AR089: | | | |
| | | | | | | Ala-16 to Gly-24, | 6 | | | |
| | | | | | | Gly-26 to Leu-33, | L0775: 4, H0046: 3, | | | |
| | | | | | | Lys-57 to Pro-67, | H0622: 3, H0660: 3, | | | |
| | | | | | | Lys-83 to Thr-90, | H0438: 2, L0663: 2, | | | |
| | | | | | | Glu-110 to Lys-115, | L0665: 2, L0777: 2, | | | |
| | | | | | | Phe-123 to Gly-128, | S0026: 2, H0583: 1, | | | |
| | | | | | | Arg-141 to Glu-147, | S0282: 1, S0356: 1, | | | |
| | | | | | | Leu-157 to Arg-169, | H0051: 1, H0071: 1, | | | |
| | | | | | | Gly-184 to Ala-192, | H0355: 1, H0510: 1, | | | |
| | | | | | | Asn-226 to Arg-231, | H0615: 1, H0428: 1, | | | |
| | | | | | | Asn-238 to Ser-250, | H0644: 1, L0142: 1, | | | |
| | | | | | | Leu-254 to Thr-265. | S0364: 1, H0059: 1, | | | |
| | | | | | | | L0763: 1, L0803: 1, | | | |
| | | | | | | | L0804: 1, L0657: 1, | | | |
| | | | | | | | L0809: 1, L0664: 1, | | | |
| | | | | | | | H0690: 1, H0670: 1, | | | |
| | | | | | | | H0672: 1, H0479: 1, | | | |
| | | | | | | | S0028: 1, L0751: 1, | | | |
| | | | | | | | S0031: 1, L0604: 1, | | | |
| | | | | | | | L0366: 1, S0192: 1 and | | | |
| | | | | | | | S0424: 1. | | | |
| 405 | HTPFA03 | 922765 | 415 | 2-328 | 1028 | | AR061: 4, AR089: 2 | | | |
| | | | | | | | H0622: 2, S0212: 1, | | | |
| | | | | | | | H0253: 1, S0152: 1, | | | |
| | | | | | | | L0748: 1, L0603: 1 and | | | |
| | | | | | | | H0668: 1. | | | |
| 406 | HWADR60 | 926487 | 416 | 3-1289 | 1029 | Gln-15 to Asp-21, | AR089: 104, AR061: | | | |
| | | | | | | Leu-40 to Asp-47, | 11 | | | |
| | | | | | | Gly-70 to Leu-84, | S0278: 4, H0581: 4, | | | |
| | | | | | | Leu-88 to Arg-93, | L0751: 4, H0620: 3, | | | |
| | | | | | | Lys-98 to Asp-105, | L0764: 3, L0662: 3, | | | |
| | | | | | | Glu-136 to Arg-148, | L0659: 3, L0439: 3, | | | |
| | | | | | | Thr-197 to Ala-204, | L0754: 3, H0542: 3, | | | |
| | | | | | | Asp-222 to Glu-232, | H0170: 2, H0402: 2, | | | |
| | | | | | | Glu-261 to Gln-269, | H0580: 2, H0550: 2, | | | |
| | | | | | | Arg-295 to Trp-300, | H0333: 2, H0012: 2, | | | |
| | | | | | | Asn-306 to Pro-314, | T0010: 2, H0252: 2, | | | |
| | | | | | | Lys-395 to Lys-415. | H0063: 2, H0059: 2, | | | |
| | | | | | | | S0002: 2, L0775: 2, | | | |
| | | | | | | | L0655: 2, L0663: 2, | | | |
| | | | | | | | L0665: 2, H0593: 2, | | | |
| | | | | | | | H0658: 2, H0539: 2, | | | |
| | | | | | | | H0555: 2, L0743: 2, | | | |
| | | | | | | | L0744: 2, L0752: 2, | | | |
| | | | | | | | L0731: 2, H0543: 2, | | | |
| | | | | | | | H0624: 1, H0265: 1, | | | |
| | | | | | | | H0650: 1, H0656: 1, | | | |
| | | | | | | | S0212: 1, H0306: 1, | | | |
| | | | | | | | H0305: 1, S0360: 1, | | | |
| | | | | | | | S0046: 1, H0619: 1, | | | |
| | | | | | | | S0222: 1, S6014: 1, | | | |
| | | | | | | | H0613: 1, H0492: 1, | | | |
| | | | | | | | H0250: 1, H0635: 1, | | | |
| | | | | | | | H0427: 1, L0021: 1, | | | |
| | | | | | | | H0036: 1, H0421: 1, | | | |
| | | | | | | | H0399: 1, H0416: 1, | | | |
| | | | | | | | H0188: 1, S0250: 1, | | | |
| | | | | | | | L0143: 1, H0617: 1, | | | |
| | | | | | | | H0673: 1, H0124: 1, | | | |
| | | | | | | | H0163: 1, H0634: 1, | | | |
| | | | | | | | H0087: 1, T0067: 1, | | | |
| | | | | | | | H0264: 1, H0272: 1, | | | |
| | | | | | | | H0412: 1, H0413: 1, | | | |
| | | | | | | | H0100: 1, S0344: 1, | | | |
| | | | | | | | S0426: 1, L0770: 1, | | | |
| | | | | | | | L0638: 1, L0761: 1, | | | |
| | | | | | | | L0794: 1, L0650: 1, | | | |
| | | | | | | | L0661: 1, L0546: 1, | | | |
| | | | | | | | S0053: 1, H0689: 1, | | | |
| | | | | | | | H0521: 1, S3014: 1, | | | |
| | | | | | | | L0748: 1, L0740: 1, | | | |
| | | | | | | | L0779: 1, L0780: 1, | | | |
| | | | | | | | L0753: 1, L0759: 1, | | | |
| | | | | | | | H0445: 1, H0595: 1, | | | |
| | | | | | | | L0362: 1, H0653: 1 and | | | |
| | | | | | | | H0506: 1. | | | |
| 407 | HWLFJ01 | 928017 | 417 | 1-780 | 1030 | Arg-11 to Arg-19, | AR061: 3, AR089: 2 | | | |
| | | | | | | Ser-36 to Thr-61, | L0741: 12, L0744: 6, | | | |
| | | | | | | Glu-79 to Glu-84, | H0052: 5, H0040: 5, | | | |
| | | | | | | Ala-100 to Gln-106, | L0742: 5, L0748: 5, | | | |
| | | | | | | Ser-155 to Leu-161. | H0620: 4, L0794: 4, | | | |
| | | | | | | | H0486: 3, H0622: 3, | | | |
| | | | | | | | L0439: 3, L0749: 3, | | | |
| | | | | | | | L0777: 3, S0354: 2, | | | |
| | | | | | | | H0046: 2, H0031: 2, | | | |
| | | | | | | | H0617: 2, L0770: 2, | | | |
| | | | | | | | L0761: 2, L0806: 2, | | | |
| | | | | | | | S0126: 2, H0539: 2, | | | |
| | | | | | | | H0518: 2, H0521: 2, | | | |
| | | | | | | | L0751: 2, L0747: 2, | | | |
| | | | | | | | L0758: 2, L0593: 2, | | | |
| | | | | | | | H0624: 1, H0171: 1, | | | |
| | | | | | | | S0114: 1, H0650: 1, | | | |
| | | | | | | | S0418: 1, S0420: 1, | | | |
| | | | | | | | H0645: 1, H0351: 1, | | | |
| | | | | | | | H0370: 1, H0600: 1, | | | |
| | | | | | | | H0592: 1, L0622: 1, | | | |
| | | | | | | | T0082: 1, S0474: 1, | | | |
| | | | | | | | H0085: 1, H0235: 1, | | | |
| | | | | | | | H0545: 1, H0012: 1, | | | |
| | | | | | | | H0644: 1, H0124: 1, | | | |
| | | | | | | | H0634: 1, H0494: 1, | | | |
| | | | | | | | S0144: 1, S0142: 1, | | | |
| | | | | | | | L0638: 1, L0642: 1, | | | |
| | | | | | | | L0764: 1, L0771: 1, | | | |
| | | | | | | | L0773: 1, L0768: 1, | | | |
| | | | | | | | L0649: 1, L0774: 1, | | | |
| | | | | | | | L0775: 1, L0651. 1, | | | |
| | | | | | | | L0653: 1, L0776: 1, | | | |
| | | | | | | | L0659: 1, L0809: 1, | | | |
| | | | | | | | S0374: 1, H0690: 1, | | | |
| | | | | | | | H0522: 1, H0696: 1, | | | |
| | | | | | | | L0740: 1, L0754: 1, | | | |
| | | | | | | | L0755: 1, L0731: 1, | | | |
| | | | | | | | L0757: 1, H0707: 1, | | | |
| | | | | | | | L0601: 1 and H0543: 1. | | | |
| 408 | HTXNG95 | 928577 | 418 | 13-594 | 1031 | Arg-41 to Thr-53, | AR054: 26, AR051: | | | |
| | | | | | | Ser-89 to Glu-95, | 12, AR050: 10, AR061: | | | |
| | | | | | | Leu-109 to Lys-114, | 7, AR089: 4 | | | |
| | | | | | | Pro-189 to Glu-194. | H0556: 4, L0770: 4, | | | |
| | | | | | | | L0794: 4, L0758: 4, | | | |
| | | | | | | | L0731: 3, H0038: 2, | | | |
| | | | | | | | L0766: 2, L0659: 2, | | | |
| | | | | | | | S0212: 1, S0132: 1, | | | |
| | | | | | | | H0632: 1, H0618: 1, | | | |
| | | | | | | | H0271: 1, S0368: 1, | | | |
| | | | | | | | H0673: 1, L0667: 1, | | | |
| | | | | | | | L0662: 1, L0767: 1, | | | |
| | | | | | | | L0768: 1, L0381: 1, | | | |
| | | | | | | | L0789: 1, L0790: 1, | | | |
| | | | | | | | L0664: 1, L0665: 1, | | | |
| | | | | | | | H0659: 1, H0658: 1, | | | |
| | | | | | | | S0328: 1, S0454: 1, | | | |
| | | | | | | | L0749: 1, L0777: 1, | | | |
| | | | | | | | H0542: 1 and H0677: 1. | | | |
| 409 | HPCIG66 | 930886 | 419 | 30-653 | 1032 | Asn-48 to Gly-54, | AR089: 1, AR061: 0 | | | |
| | | | | | | Thr-56 to Lys-69. | H0642: 2 and S0053: 1. | | | |
| 410 | HCRPU72 | 931140 | 420 | 2-799 | 1033 | Gly-1 to Val-11, | AR089: 16, AR061: 6 | | | |
| | | | | | | Gly-50 to Thr-62, | H0144: 6, H0013: 2 | | | |
| | | | | | | Asn-125 to Gly-132, | and S0356: 1. | | | |
| | | | | | | Leu-172 to Asn-178, | | | | |
| | | | | | | Ser-210 to Ser-217, | | | | |
| | | | | | | Ser-232 to Lys-245. | | | | |
| 411 | HE9RT95 | 934556 | 421 | 1-714 | 1034 | Leu-21 to Asp-33. | AR089: 17, AR061: 13 | | | |
| | | | | | | | S0049: 1, H0144: 1 and | | | |
| | | | | | | | L0439: 1. | | | |
| 412 | HFXJM13 | 935725 | 422 | 16-438 | 1035 | Gln-36 to Thr-42, | AR061: 1, AR089: 0 | | | |
| | | | | | | Glu-99 to Leu-104. | L0748: 7, L0766: 6, | | | |
| | | | | | | | L0756: 5, H0580: 4, | | | |
| | | | | | | | L0777: 3, H0052: 2, | | | |
| | | | | | | | S0051: 2, H0644: 2, | | | |
| | | | | | | | H0551: 2, L0769: 2, | | | |
| | | | | | | | H0144: 2, L0743: 2, | | | |
| | | | | | | | L0754: 2, L0779: 2, | | | |
| | | | | | | | L0755: 2, L0759: 2, | | | |
| | | | | | | | H0657: 1, H0656: 1, | | | |
| | | | | | | | S0116: 1, H0341: 1, | | | |
| | | | | | | | S0212: 1, S0282: 1, | | | |
| | | | | | | | H0125: 1, L0005: 1, | | | |
| | | | | | | | S0222: 1, H0431: 1, | | | |
| | | | | | | | H0438: 1, H0586: 1, | | | |
| | | | | | | | H0069: 1, H0635: 1, | | | |
| | | | | | | | L0157: 1, H0050: 1, | | | |
| | | | | | | | L0471: 1, H0051: 1, | | | |
| | | | | | | | H0399: 1, H0375: 1, | | | |
| | | | | | | | S0318: 1, S0316: 1, | | | |
| | | | | | | | H0687: 1, S0250: 1, | | | |
| | | | | | | | H0031: 1, H0553: 1, | | | |
| | | | | | | | H0090: 1, H0634: 1, | | | |
| | | | | | | | H0616: 1, H0623: 1, | | | |
| | | | | | | | S0038: 1, H0100: 1, | | | |
| | | | | | | | L0371: 1, L0667: 1, | | | |
| | | | | | | | L0800: 1, L0794: 1, | | | |
| | | | | | | | L0804: 1, L0775: 1, | | | |
| | | | | | | | L0805: 1, L0776: 1, | | | |
| | | | | | | | L0659: 1, L0526: 1, | | | |
| | | | | | | | L0792: 1, L0663: 1, | | | |
| | | | | | | | L0438: 1, H0547: 1, | | | |
| | | | | | | | S0126: 1, L0439: 1, | | | |
| | | | | | | | L0740: 1, L0749: 1, | | | |
| | | | | | | | L0752: 1, S0031: 1, | | | |
| | | | | | | | H0445: 1, L0480: 1, | | | |
| | | | | | | | L0604: 1, S0026: 1, | | | |
| | | | | | | | H0542: 1, S0412: 1 and | | | |
| | | | | | | | H0352: 1. | | | |
| 413 | HDPWU37 | 940705 | 423 | 3-536 | 1036 | Glu-8 to Pro-17, | AR089: 12, AR061: 6 | 22q13.1 | 103050, | |
| | | | | | | Pro-31 to Asp-37. | H0575: 1, H0271: 1 | | 103050, | |
| | | | | | | | and H0521: 1. | | 124030, | |
| | | | | | | | | | 124030, | |
| | | | | | | | | | 138981, | |
| | | | | | | | | | 182380, | |
| | | | | | | | | | 188826, | |
| | | | | | | | | | 190040, | |
| | | | | | | | | | 190040, | |
| | | | | | | | | | 190040 | |
| 414 | HHSDL85 | 942246 | 424 | 2-502 | 1037 | Ser-12 to Gln-25, | AR061: 3, AR089: 2 | | | |
| | | | | | | Pro-29 to Phe-39, | S0007: 3, S0001: 1, | | | |
| | | | | | | Gly-81 to Gly-89, | H0618: 1, H0009: 1, | | | |
| | | | | | | Glu-143 to Trp-156. | S0051: 1, L0763: 1, | | | |
| | | | | | | | L0439: 1 and L0758: 1. | | | |
| | | 951168 | 622 | 356-42 | 1235 | Arg-82 to Trp-88. | | | | |
| 415 | HTJMD31 | 942848 | 425 | 1-462 | 1038 | Pro-17 to Asn-23. | AR089: 14, AR061: 6 | | | |
| | | | | | | | S0300: 2, L0439: 2, | | | |
| | | | | | | | H0438: 1, H0618: 1, | | | |
| | | | | | | | H0052: 1, H0616: 1, | | | |
| | | | | | | | H0488: 1, L0772: 1, | | | |
| | | | | | | | L0806: 1, L0384: 1, | | | |
| | | | | | | | L0666: 1, L0758: 1 and | | | |
| | | | | | | | H0423: 1. | | | |
| 416 | HWADD57 | 943039 | 426 | 2-1009 | 1039 | Asp-2 to Pro-7, | AR089: 1, AR061: 0 | | | |
| | | | | | | Leu-18 to Arg-27, | H0255: 2, H0486: 1, | | | |
| | | | | | | Glu-52 to Ser-59, | H0581: 1, H0529: 1 and | | | |
| | | | | | | Pro-90 to Pro-97, | H0543: 1. | | | |
| | | | | | | Pro-116 to Glu-121. | | | | |
| 417 | HLWAH05 | 944904 | 427 | 356-1351 | 1040 | Ala-1 to Arg-9, | AR061: 2, AR089: 1 | | | |
| | | | | | | Leu-11 to Pro-18. | H0586: 5, L0751: 2, | | | |
| | | | | | | | H0170: 1, H0638: 1, | | | |
| | | | | | | | H0553: 1, H0477: 1, | | | |
| | | | | | | | S0002: 1, H0529: 1, | | | |
| | | | | | | | L0766: 1, L0803: 1, | | | |
| | | | | | | | H0672: 1 and H0543: 1. | | | |
| 418 | HDPCI84 | 945527 | 428 | 25-1047 | 1041 | Arg-9 to Arg-18, | AR089: 2, AR061: 1 | | | |
| | | | | | | Leu-107 to Gln-113, | H0521: 4, L0803: 3, | | | |
| | | | | | | Asp-126 to Thr-131. | S0358: 2, H0489: 2, | | | |
| | | | | | | | H0046: 2, L0794: 2, | | | |
| | | | | | | | L0666: 2, H0144: 2, | | | |
| | | | | | | | S0126: 2, S0342: 1, | | | |
| | | | | | | | H0663: 1, S0356: 1, | | | |
| | | | | | | | H0013: 1, L0021: 1, | | | |
| | | | | | | | H0705: 1, H0150: 1, | | | |
| | | | | | | | H0266: 1, H0039: 1, | | | |
| | | | | | | | H0622: 1, H0038: 1, | | | |
| | | | | | | | H0551: 1, S0422: 1, | | | |
| | | | | | | | L0598: 1, L0646: 1, | | | |
| | | | | | | | L0766: 1, L0653: 1, | | | |
| | | | | | | | L0656: 1, L0789: 1, | | | |
| | | | | | | | L0532: 1, L0663: 1, | | | |
| | | | | | | | H0658: 1, L0748: 1, | | | |
| | | | | | | | L0759: 1, S0434: 1, | | | |
| | | | | | | | L0596: 1 and H0506: 1. | | | |
| 419 | HBXDJ07 | 946830 | 429 | 125-652 | 1042 | Glu-62 to Lys-68, | AR061: 2, AR089: 2 | | | |
| | | | | | | Asn-105 to Gly-113. | L0439: 11, L0794: 5, | | | |
| | | | | | | | L0666: 5, S0222: 4, | | | |
| | | | | | | | H0052: 3, L0756: 3, | | | |
| | | | | | | | H0624: 2, S6028: 2, | | | |
| | | | | | | | S0038: 2, L0638: 2, | | | |
| | | | | | | | L0805: 2, L0664: 2, | | | |
| | | | | | | | L0438: 2, L0740: 2, | | | |
| | | | | | | | H0171: 1, S6024: 1, | | | |
| | | | | | | | H0013: 1, H0374: 1, | | | |
| | | | | | | | H0050: 1, S0050: 1, | | | |
| | | | | | | | H0051: 1, S0386: 1, | | | |
| | | | | | | | L0769: 1, L0768: 1, | | | |
| | | | | | | | L0776: 1, L0659: 1, | | | |
| | | | | | | | L0789: 1, H0144: 1, | | | |
| | | | | | | | L0745: 1 and L0746: 1. | | | |
| 420 | HAMFD12 | 952438 | 430 | 3-539 | 1043 | Tyr-41 to Leu-52, | AR089: 3, AR061: 1 | | | |
| | | | | | | Leu-64 to Cys-72, | H0271: 10, H0052: 8, | | | |
| | | | | | | Pro-92 to Arg-98, | H0556: 7, L0439: 7, | | | |
| | | | | | | Ser-110 to Glu-116. | L0754: 7, H0622: 6, | | | |
| | | | | | | | L0776: 5, L0769: 4, | | | |
| | | | | | | | H0265: 3, H0295: 3, | | | |
| | | | | | | | H0580: 3, S0222: 3, | | | |
| | | | | | | | H0013: 3, H0156: 3, | | | |
| | | | | | | | H0051: 3, H0494: 3, | | | |
| | | | | | | | L0659: 3, S0356: 2, | | | |
| | | | | | | | H0208: 2, S6014: 2, | | | |
| | | | | | | | H0135: 2, H0634: 2, | | | |
| | | | | | | | S0002: 2, S0426: 2, | | | |
| | | | | | | | L0770: 2, L0796: 2, | | | |
| | | | | | | | L0373: 2, L0803: 2, | | | |
| | | | | | | | L0375: 2, L0655: 2, | | | |
| | | | | | | | L0666: 2, L0438: 2, | | | |
| | | | | | | | H0672: 2, H0521: 2, | | | |
| | | | | | | | L0747: 2, L0750: 2, | | | |
| | | | | | | | L0756: 2, L0588: 2, | | | |
| | | | | | | | H0542: 2, H0543: 2, | | | |
| | | | | | | | H0170: 1, S0212: 1, | | | |
| | | | | | | | S0282: 1, S0030: 1, | | | |
| | | | | | | | H0305: 1, H0589: 1, | | | |
| | | | | | | | L0619: 1, H0619: 1, | | | |
| | | | | | | | S6026: 1, H0550: 1, | | | |
| | | | | | | | H0370: 1, H0600: 1, | | | |
| | | | | | | | H0592: 1, H0486: 1, | | | |
| | | | | | | | T0040: 1, H0635: 1, | | | |
| | | | | | | | H0002: 1, S0010: 1, | | | |
| | | | | | | | H0390: 1, H0581: 1, | | | |
| | | | | | | | H0421: 1, H0085: 1, | | | |
| | | | | | | | T0110: 1, H0041: 1, | | | |
| | | | | | | | N0006: 1, H0050: 1, | | | |
| | | | | | | | H0012: 1, H0620: 1, | | | |
| | | | | | | | T0003: 1, H0024: 1, | | | |
| | | | | | | | H0687: 1, H0252: 1, | | | |
| | | | | | | | H0604: 1, H0031: 1, | | | |
| | | | | | | | H0644: 1, H0628: 1, | | | |
| | | | | | | | H0598: 1, H0087: 1, | | | |
| | | | | | | | H0264: 1, S0112: 1, | | | |
| | | | | | | | T0041: 1, H0560: 1, | | | |
| | | | | | | | S0150: 1, H0529: 1, | | | |
| | | | | | | | L0640: 1, L0761: 1, | | | |
| | | | | | | | L0643: 1, L0806: 1, | | | |
| | | | | | | | L0658: 1, L0809: 1, | | | |
| | | | | | | | L0544: 1, L0788: 1, | | | |
| | | | | | | | L0663: 1, L0664: 1, | | | |
| | | | | | | | L0665: 1, S0428: 1, | | | |
| | | | | | | | S0053: 1, H0144: 1, | | | |
| | | | | | | | H0690: 1, H0518: 1, | | | |
| | | | | | | | H0696: 1, H0436: 1, | | | |
| | | | | | | | H0576: 1, S0392: 1, | | | |
| | | | | | | | L0740: 1, L0731: 1, | | | |
| | | | | | | | L0759: 1, S0031: 1, | | | |
| | | | | | | | L0596: 1, S0011: 1, | | | |
| | | | | | | | H0667: 1 and S0192: 1. | | | |
| 421 | HFKHR40 | 952470 | 431 | 641-1756 | 1044 | Gly-18 to His-25. | AR089: 1, AR061: 0 | | | |
| | | | | | | | H0457: 7, H0521: 2, | | | |
| | | | | | | | H0656: 1, H0458: 1, | | | |
| | | | | | | | S0278: 1, H0069: 1, | | | |
| | | | | | | | H0620: 1, H0179: 1, | | | |
| | | | | | | | H0271: 1, H0416: 1, | | | |
| | | | | | | | S0144: 1, H0703: 1, | | | |
| | | | | | | | H0593: 1 and H0522: 1. | | | |
| 422 | HDTAI08 | 953265 | 432 | 316-567 | 1045 | Leu-13 to Val-25, | AR061: 1, AR089: 1 | | | |
| | | | | | | His-32 to Arg-39. | H0521: 4, H0580: 2, | | | |
| | | | | | | | H0583: 1, H0486: 1, | | | |
| | | | | | | | H0625: 1, S0466: 1, | | | |
| | | | | | | | L0666: 1, S0242: 1, | | | |
| | | | | | | | H0542: 1 and H0543: 1. | | | |
| 423 | HMKCX80 | 956254 | 433 | 194-616 | 1046 | Gln-7 to Asp-19, | AR089: 7, AR061: 3 | | | |
| | | | | | | Leu-34 to Ser-42. | H0392: 1, H0427: 1, | | | |
| | | | | | | | H0318: 1, L0663: 1, | | | |
| | | | | | | | H0345: 1 and L0596: 1. | | | |
| 424 | HCEMF69 | 961308 | 434 | 2-637 | 1047 | | AR061: 1, AR089: 1 | | | |
| | | | | | | | S0136: 3, L0779: 3, | | | |
| | | | | | | | H0171: 1, H0052: 1, | | | |
| | | | | | | | H0038: 1, L0766: 1, | | | |
| | | | | | | | H0547: 1, S0031: 1 and | | | |
| | | | | | | | S0242: 1. | | | |
| 425 | HWLHF10 | 963422 | 435 | 115-978 | 1048 | Ile-44 to Gln-50. | AR089: 26, AR061: 4 | | | |
| | | | | | | | S0354: 1, H0561: 1 and | | | |
| | | | | | | | L0603: 1. | | | |
| 426 | HOEMG82 | 963855 | 436 | 2-991 | 1049 | Asp-1 to Pro-12. | AR061: 49, AR089: 19 | | | |
| 427 | HFXDR37 | 965915 | 437 | 1485-556 | 1050 | Glu-18 to Thr-23. | ARO61: 2, AR089: 1 | | | |
| | | | | | | | L0766: 2, S0001: 1, | | | |
| | | | | | | | H0592: 1, H0575: 1, | | | |
| | | | | | | | H0644: 1, H0038: 1 and | | | |
| | | | | | | | H0144: 1. | | | |
| 428 | HNNAS46 | 969470 | 438 | 1-834 | 1051 | | AR089: 1, AR061: 0 | | | |
| | | | | | | | H0638: 2, H0521: 2, | | | |
| | | | | | | | L0752: 2, H0677: 2, | | | |
| | | | | | | | H0650: 1, H0484: 1, | | | |
| | | | | | | | H0458: 1, H0580: 1, | | | |
| | | | | | | | H0586: 1, H0575: 1, | | | |
| | | | | | | | H0081: 1, S0036: 1, | | | |
| | | | | | | | H0063: 1, H0560: 1, | | | |
| | | | | | | | L0809: 1, S0126: 1, | | | |
| | | | | | | | S0328: 1, L0744: 1, | | | |
| | | | | | | | L0740: 1, L0754: 1 and | | | |
| | | | | | | | H0543: 1. | | | |
| 429 | HRAAS26 | 971219 | 439 | 17-535 | 1052 | Glu-25 to Arg-31, | AR054: 23, AR050: | | | |
| | | | | | | Glu-71 to His-76, | 18, AR051: 12, AR061: | | | |
| | | | | | | Leu-85 to Leu-92, | 12, AR089: 8 | | | |
| | | | | | | Gly-129 to Ser-143. | L0803: 7, L0794: 4, | | | |
| | | | | | | | L0748: 4, L0591: 4, | | | |
| | | | | | | | L0770: 3, L0804: 3, | | | |
| | | | | | | | S0142: 2, L0789: 2, | | | |
| | | | | | | | L0743: 2, L0747: 2, | | | |
| | | | | | | | L0749: 2, L0752: 2, | | | |
| | | | | | | | S0360: 1, S0046: 1, | | | |
| | | | | | | | H0549: 1, H0309: 1, | | | |
| | | | | | | | H0327: 1, H0012: 1, | | | |
| | | | | | | | L0769: 1, L0773: 1, | | | |
| | | | | | | | L0767: 1, L0774: 1, | | | |
| | | | | | | | L0775: 1, L0776: 1, | | | |
| | | | | | | | L0790: 1, L0791: 1, | | | |
| | | | | | | | H0435: 1, H0660: 1, | | | |
| | | | | | | | H0648: 1, H0521: 1, | | | |
| | | | | | | | H0555: 1, L0750: 1, | | | |
| | | | | | | | L0779: 1, L0777: 1, | | | |
| | | | | | | | L0755: 1, L0758: 1 and | | | |
| | | | | | | | S0434: 1. | | | |
| 430 | HHEEL28 | 973096 | 440 | 1-378 | 1053 | | AR089: 1, AR061: 0 | | | |
| | | | | | | | L0766: 7, H0486: 4, | | | |
| | | | | | | | L0794: 4, H0520: 4, | | | |
| | | | | | | | L0754: 4, L0777: 4, | | | |
| | | | | | | | L0755: 4, L0599: 4, | | | |
| | | | | | | | L0803: 3, L0779: 3, | | | |
| | | | | | | | H0542: 3, H0624: 2, | | | |
| | | | | | | | S0418: 2, S0360: 2, | | | |
| | | | | | | | H0551: 2, L0770: 2, | | | |
| | | | | | | | L0662: 2, L0558: 2, | | | |
| | | | | | | | L0665: 2, H0144: 2, | | | |
| | | | | | | | H0547: 2, H0519: 2, | | | |
| | | | | | | | H0522: 2, L0756: 2, | | | |
| | | | | | | | L0758: 2, L0588: 2, | | | |
| | | | | | | | H0170: 1, H0556: 1, | | | |
| | | | | | | | H0657: 1, H0580: 1, | | | |
| | | | | | | | L0717: 1, S0222: 1, | | | |
| | | | | | | | H0574: 1, H0599: 1, | | | |
| | | | | | | | S0474: 1, H0544: 1, | | | |
| | | | | | | | H0266: 1, H0252: 1, | | | |
| | | | | | | | T0023: 1, H0553: 1, | | | |
| | | | | | | | T0042: 1, S0422: 1, | | | |
| | | | | | | | L0369: 1, L0763: 1, | | | |
| | | | | | | | L0761: 1, L0772: 1, | | | |
| | | | | | | | L0521: 1, L0387: 1, | | | |
| | | | | | | | L0650: 1, L0806: 1, | | | |
| | | | | | | | L0653: 1, L0655: 1, | | | |
| | | | | | | | L0789: 1, L0790: 1, | | | |
| | | | | | | | L0663: 1, S0053: 1, | | | |
| | | | | | | | S0374: 1, H0435: 1, | | | |
| | | | | | | | H0670: 1, H0651: 1, | | | |
| | | | | | | | H0521: 1, H0436: 1, | | | |
| | | | | | | | H0345: 1, L0439: 1, | | | |
| | | | | | | | L0745: 1, L0749: 1, | | | |
| | | | | | | | L0750: 1, L0759: 1, | | | |
| | | | | | | | L0485: 1, L0593: 1, | | | |
| | | | | | | | S0026: 1, H0665: 1, | | | |
| | | | | | | | H0543: 1, H0423: 1, | | | |
| | | | | | | | H0422: 1 and S0458: 1. | | | |
| 431 | HCETF22 | 973324 | 441 | 112-1863 | 1054 | Asn-1 to Gly-9, | AR061: 11, AR089: 4 | | | |
| | | | | | | Gln-30 to Glu-35. | L0741: 8, L0766: 7, | | | |
| | | | | | | | L0794: 6, H0306: 4, | | | |
| | | | | | | | H0052: 4, L0768: 3, | | | |
| | | | | | | | L0803: 3, H0542: 3, | | | |
| | | | | | | | S0360: 2, H0457: 2, | | | |
| | | | | | | | H0617: 2, H0606: 2, | | | |
| | | | | | | | S0036: 2, H0100: 2, | | | |
| | | | | | | | L0800: 2, H0672: 2, | | | |
| | | | | | | | H0436: 2, L0777: 2, | | | |
| | | | | | | | H0543: 2, H0650: 1, | | | |
| | | | | | | | L0785: 1, H0341: 1, | | | |
| | | | | | | | H0254: 1, H0402: 1, | | | |
| | | | | | | | S0420: 1, H0580: 1, | | | |
| | | | | | | | S0045: 1, H0645: 1, | | | |
| | | | | | | | H0550: 1, S0222: 1, | | | |
| | | | | | | | S6014: 1, H0592: 1, | | | |
| | | | | | | | N0009: 1, S0280: 1, | | | |
| | | | | | | | H0599: 1, H0618: 1, | | | |
| | | | | | | | S0182: 1, H0581: 1, | | | |
| | | | | | | | S0049: 1, H0194: 1, | | | |
| | | | | | | | N0007: 1, H0271: 1, | | | |
| | | | | | | | H0252: 1, H0063: 1, | | | |
| | | | | | | | H0488: 1, H0412: 1, | | | |
| | | | | | | | H0079: 1, T0041: 1, | | | |
| | | | | | | | H0646: 1, S0144: 1, | | | |
| | | | | | | | L0763: 1, L0770: 1, | | | |
| | | | | | | | L0769: 1, L0761: 1, | | | |
| | | | | | | | L0372: 1, L0646: 1, | | | |
| | | | | | | | L0645: 1, L0764: 1, | | | |
| | | | | | | | L0774: 1, L0792: 1, | | | |
| | | | | | | | L0666: 1, L0665: 1, | | | |
| | | | | | | | H0519: 1, H0435: 1, | | | |
| | | | | | | | H0539: 1, H0518: 1, | | | |
| | | | | | | | L0747: 1, L0755: 1, | | | |
| | | | | | | | H0653: 1, H0136: 1, | | | |
| | | | | | | | H0677: 1 and S0446: 1. | | | |
| 432 | HCMSF55 | 912284 | 442 | 657-361 | 1055 | | AR089: 2, AR061: 2 | | | |
| | | | | | | | L0604: 16, S0366: 9, | | | |
| | | | | | | | L0485: 7, L0622: 6, | | | |
| | | | | | | | L0623: 6, H0599: 6, | | | |
| | | | | | | | H0373: 6, H0196: 4, | | | |
| | | | | | | | L0163: 4, L0777: 4, | | | |
| | | | | | | | L0520: 3, H0002: 2, | | | |
| | | | | | | | S0364: 2, S0330: 2, | | | |
| | | | | | | | L0747: 2, H0171: 1, | | | |
| | | | | | | | H0549: 1, H0486: 1, | | | |
| | | | | | | | H0013: 1, H0253: 1, | | | |
| | | | | | | | H0318: 1, S0049: 1, | | | |
| | | | | | | | H0251: 1, L0471: 1, | | | |
| | | | | | | | S0051: 1, H0616: 1, | | | |
| | | | | | | | S0038: 1, H0100: 1, | | | |
| | | | | | | | H0561: 1, L0803: 1, | | | |
| | | | | | | | L0782: 1, L0809: 1, | | | |
| | | | | | | | L0779: 1, L0759: 1 and | | | |
| | | | | | | | L0584: 1. | | | |
| | | 975280 | 623 | 52-705 | 1236 | His-10 to Gly-16, | | | | |
| | | | | | | Pro-65 to Ala-70, | | | | |
| | | | | | | Ala-96 to Lys-101. | | | | |

[0059] The first column in Table 1A provides the gene number in the application corresponding to the clone identifier. The second column in Table 1A provides a unique “Clone ID NO:Z” for a cDNA clone related to each contig sequence disclosed in Table 1A. This clone ID references the cDNA clone which contains at least the 5′ most sequence of the assembled contig and at least a portion of SEQ ID NO:X was determined by directly sequencing the referenced clone. The reference clone may have more sequence than described in the sequence listing or the clone may have less. In the vast majority of cases, however, the clone is believed to encode a full-length polypeptide. In the case where a clone is not full-length, a full-length cDNA can be obtained by methods described elsewhere herein.

[0060] The third column in Table 1A provides a unique “Contig ID” identification for each contig sequence. The fourth column provides the “SEQ ID NO:” identifier for each of the contig polynucleotide sequences disclosed in Table 1A. The fifth column, “ORF (From-To)”, provides the location (i.e., nucleotide position numbers) within the polynucleotide sequence “SEQ ID NO:X” that delineate the preferred open reading frame (ORF) shown in the sequence listing and referenced in Table 1A, column 6, as SEQ ID NO:Y. Where the nucleotide position number “To” is lower than the nucleotide position number “From”, the preferred ORF is the reverse complement of the referenced polynucleotide sequence.

[0061] The sixth column in Table 1A provides the corresponding SEQ ID NO:Y for the polypeptide sequence encoded by the preferred ORF delineated in column 5. In one embodiment, the invention provides an amino acid sequence comprising, or alternatively consisting of, a polypeptide encoded by the portion of SEQ ID NO:X delineated by “ORF (From-To)”. Also provided are polynucleotides encoding such amino acid sequences and the complementary strand thereto.

[0062] Column 7 in Table 1A lists residues comprising epitopes contained in the polypeptides encoded by the preferred ORF (SEQ ID NO:Y), as predicted using the algorithm of Jameson and Wolf, (1988) Comp. Appl. Biosci. 4:181-186. The Jameson-Wolf antigenic analysis was performed using the computer program PROTEAN (Version 3.11 for the Power MacIntosh, DNASTAR, Inc., 1228 South Park Street Madison, Wis.). In specific embodiments, polypeptides of the invention comprise, or alternatively consist of, at least one, two, three, four, five or more of the predicted epitopes as described in Table 1A. It will be appreciated that depending on the analytical criteria used to predict antigenic determinants, the exact address of the determinant may vary slightly.

[0063] Column 8 in Table 1A provides an expression profile and library code: count for each of the contig sequences (SEQ ID NO:X) disclosed in Table 1A, which can routinely be combined with the information provided in Table 4 and used to determine the tissues, cells, and/or cell line libraries which predominantly express the polynucleotides of the invention. The first number in column 8 (preceding the colon), represents the tissue/cell source identifier code corresponding to the code and description provided in Table 4. For those identifier codes in which the first two letters are not “AR”, the second number in column 8 (following the colon) represents the number of times a sequence corresponding to the reference polynucleotide sequence was identified in the tissue/cell source. Those tissue/cell source identifier codes in which the first two letters are “AR” designate information generated using DNA array technology. Utilizing this technology, cDNAs were amplified by PCR and then transferred, in duplicate, onto the array. Gene expression was assayed through hybridization of first strand cDNA probes to the DNA array. cDNA probes were generated from total RNA extracted from a variety of different tissues and cell lines. Probe synthesis was performed in the presence of ³³P dCTP, using oligo(dT) to prime reverse transcription. After hybridization, high stringency washing conditions were employed to remove non-specific hybrids from the array. The remaining signal, emanating from each gene target, was measured using a Phosphorimager. Gene expression was reported as Phosphor Stimulating Luminescence (PSL) which reflects the level of phosphor signal generated from the probe hybridized to each of the gene targets represented on the array. A local background signal subtraction was performed before the total signal generated from each array was used to normalize gene expression between the different hybridizations. The value presented after “[array code]:” represents the mean of the duplicate values, following background subtraction and probe normalization. One of skill in the art could routinely use this information to identify normal and/or diseased tissue(s) which show a predominant expression pattern of the corresponding polynucleotide of the invention or to identify polynucleotides which show predominant and/or specific tissue and/or cell expression.

[0064] Column 9 in Table 1A provides a chromosomal map location for certain polynucleotides of the invention. Chromosomal location was determined by finding exact matches to EST and cDNA sequences contained in the NCBI (National Center for Biotechnology Information) UniGene database. Each sequence in the UniGene database is assigned to a “cluster”; all of the ESTs, cDNAs, and STSs in a cluster are believed to be derived from a single gene. Chromosomal mapping data is often available for one or more sequence(s) in a UniGene cluster; this data (if consistent) is then applied to the cluster as a whole. Thus, it is possible to infer the chromosomal location of a new polynucleotide sequence by determining its identity with a mapped UniGene cluster.

[0065] A modified version of the computer program BLASTN (Altshul et al., J. Mol. Biol. 215:403-410 (1990); and Gish and States, Nat. Genet. 3:266-272 (1993)) was used to search the UniGene database for EST or cDNA sequences that contain exact or near-exact matches to a polynucleotide sequence of the invention (the ‘Query’). A sequence from the UniGene database (the ‘Subject’) was said to be an exact match if it contained a segment of 50 nucleotides in length such that 48 of those nucleotides were in the same order as found in the Query sequence. If all of the matches that met this criteria were in the same UniGene cluster, and mapping data was available for this cluster, it is indicated in Table 1A under the heading “Cytologic Band”. Where a cluster had been further localized to a distinct cytologic band, that band is disclosed; where no banding information was available, but the gene had been localized to a single chromosome, the chromosome is disclosed.

[0066] Once a presumptive chromosomal location was determined for a polynucleotide of the invention, an associated disease locus was identified by comparison with a database of diseases which have been experimentally associated with genetic loci. The database used was the Morbid Map, derived from OMIM™ (supra). If the putative chromosomal location of a polynucleotide of the invention (Query sequence) was associated with a disease in the Morbid Map database, an OMIM reference identification number was noted in column 10, Table 1A, labelled “OMIM Disease Reference(s)”. Table 5 is a key to the OMIM reference identification numbers (column 1), and provides a description of the associated disease in Column 2.

TABLE 1B

| Clone ID | SEQ ID | CONTIG | BAC | SEQ ID | EXON |
|---|---|---|---|---|---|
| NO: Z | NO: X | ID: | ID: A | NO: B | From-To |
| HPCBB56 | 24 | 910073 | AC068296 | 1268 | 1-225 |
| HIBBF63 | 75 | 912715 | AC009065 | 1269 | 1-70 |
| | | | | | 850-1112 |
| | | | | | 1169-1622 |
| | | | | | 1707-1779 |
| | | | | | 1874-1924 |
| | | | | | 2836-2908 |
| | | | | | 3006-4160 |
| HIBBF63 | 75 | 912715 | AC012171 | 1270 | 1-64 |
| | | | | | 159-209 |
| | | | | | 1122-1194 |
| | | | | | 1292-1527 |
| | | | | | 1593-2446 |
| HIBBF63 | 75 | 912715 | AC005346 | 1271 | 1-70 |
| | | | | | 874-1136 |
| | | | | | 1193-1646 |
| | | | | | 1731-1803 |
| | | | | | 1898-1948 |
| | | | | | 2861-2933 |
| | | | | | 3031-4185 |
| HIBBF63 | 75 | 912715 | AC009065 | 1272 | 1-547 |
| HIBBF63 | 75 | 912715 | AC012171 | 1273 | 1-547 |
| HIBBF63 | 75 | 912715 | AC009065 | 1274 | 1-424 |
| HIBBF63 | 75 | 912715 | AC005346 | 1275 | 1-547 |
| HIBBF63 | 75 | 912715 | AC012171 | 1276 | 1-419 |
| HIBBF63 | 75 | 912715 | AC005346 | 1277 | 1-424 |
| H2CBH45 | 90 | 963811 | AC068243 | 1278 | 1-267 |
| | | | | | 1540-1640 |
| | | | | | 3095-3380 |
| | | | | | 3393-3556 |
| | | | | | 3901-3967 |
| | | | | | 4137-4639 |
| | | | | | 5287-5856 |
| | | | | | 5916-6588 |
| | | | | | 7029-7876 |
| | | | | | 8324-8414 |
| H2CBH45 | 90 | 963811 | AC068243 | 1279 | 1-309 |
| HBGQT03 | 93 | 908173 | AC024045 | 1280 | 1-218 |
| | | | | | 457-549 |
| | | | | | 660-819 |
| | | | | | 2039-2238 |
| | | | | | 2529-2763 |
| | | | | | 2876-3033 |
| | | | | | 3631-3810 |
| | | | | | 3941-4058 |
| | | | | | 4184-4322 |
| | | | | | 4727-4851 |
| | | | | | 5161-6181 |
| HBGQT03 | 93 | 908173 | AC024045 | 1281 | 1-176 |
| HBGQT03 | 93 | 908173 | AC024045 | 1282 | 1-461 |
| | | | | | 960-1030 |
| | | | | | 1194-1959 |
| | | | | | 2041-2516 |
| | | | | | 3037-3122 |
| | | | | | 3396-3455 |
| | | | | | 4055-4366 |
| | | | | | 4547-4599 |
| | | | | | 4967-5216 |
| | | | | | 5321-5461 |
| | | | | | 6521-7174 |
| | | | | | 7564-7841 |
| | | | | | 8311-8758 |
| | | | | | 8829-8969 |
| | | | | | 8997-10118 |
| | | | | | 10257-10910 |
| | | | | | 12058-12385 |
| | | | | | 12438-12953 |
| | | | | | 13729-13873 |
| HCEPH71 | 97 | 522739 | AL365319 | 1283 | 1-494 |
| HCEPH71 | 97 | 522739 | AL390715 | 1284 | 1-494 |
| HCOOZ11 | 100 | 965306 | AL022238 | 1285 | 1-121 |
| | | | | | 899-983 |
| | | | | | 1445-1513 |
| | | | | | 2166-3430 |
| | | | | | 3550-3763 |
| | | | | | 3859-3972 |
| | | | | | 4449-4595 |
| | | | | | 4960-5152 |
| | | | | | 5385-5529 |
| | | | | | 5744-5972 |
| | | | | | 6327-7067 |
| | | | | | 7097-7152 |
| | | | | | 7210-8073 |
| | | | | | 8079-8680 |
| | | | | | 8772-11399 |
| | | | | | 12956-13517 |
| | | | | | 13736-14155 |
| | | | | | 14311-14753 |
| | | | | | 16294-16357 |
| | | | | | 16648-16806 |
| | | | | | 16874-17059 |
| | | | | | 17685-17787 |
| HCOOZ11 | 100 | 965306 | AL022238 | 1286 | 1-540 |
| HCOOZ11 | 100 | 965306 | AL022238 | 1287 | 1-665 |
| HCWFF88 | 101 | 506577 | AC025670 | 1288 | 1-300 |
| HCWFF88 | 101 | 506577 | AL157951 | 1289 | 1-624 |
| HCWFF88 | 101 | 506577 | AL157951 | 1290 | 1-409 |
| HCWEF88 | 101 | 506577 | AL157951 | 1291 | 1-83 |
| HDPFF24 | 104 | 909232 | AC020910 | 1292 | 1-353 |
| | | | | | 359-468 |
| | | | | | 787-861 |
| | | | | | 1877-2199 |
| | | | | | 4963-5089 |
| | | | | | 5342-5440 |
| | | | | | 6133-8734 |
| | | | | | 9933-10319 |
| HDPFF24 | 104 | 909232 | AC020910 | 1293 | 1-814 |
| HDPFF24 | 104 | 909232 | AC020910 | 1294 | 1-437 |
| HDTKQ14 | 107 | 886936 | AL359542 | 1295 | 1-140 |
| | | | | | 1249-4264 |
| HDTKQ14 | 107 | 886936 | AL023653 | 1296 | 1-140 |
| | | | | | 1249-4264 |
| HDTKQ14 | 107 | 886936 | AL359542 | 1297 | 1-499 |
| HDTKQ14 | 107 | 886936 | AL359542 | 1298 | 1-145 |
| HDTKQ14 | 107 | 886936 | AL023653 | 1299 | 1-499 |
| HFTDF15 | 113 | 657020 | AL365277 | 1300 | 1-406 |
| HFTDF15 | 113 | 657020 | AC024511 | 1301 | 1-406 |
| HFTDF15 | 113 | 657020 | AL365277 | 1302 | 1-430 |
| HFTDF15 | 113 | 657020 | AC024511 | 1303 | 1-430 |
| HFTDF15 | 113 | 657020 | AL365277 | 1304 | 1-526 |
| HFTDF15 | 113 | 657020 | AC024511 | 1305 | 1-526 |
| HLQDT35 | 117 | 839777 | AC010998 | 1306 | 1-44 |
| | | | | | 540-884 |
| | | | | | 1203-1261 |
| | | | | | 1994-2178 |
| | | | | | 2303-2474 |
| | | | | | 2991-3088 |
| | | | | | 3592-3757 |
| | | | | | 4262-4364 |
| | | | | | 4742-5802 |
| | | | | | 6235-7057 |
| | | | | | 7126-8472 |
| HLQDT35 | 117 | 839777 | AC013357 | 1307 | 1-44 |
| | | | | | 540-884 |
| | | | | | 1203-1261 |
| | | | | | 1994-2178 |
| | | | | | 2303-2474 |
| | | | | | 2991-3088 |
| | | | | | 3592-3757 |
| | | | | | 4262-4364 |
| | | | | | 4742-5802 |
| | | | | | 6235-7057 |
| | | | | | 7126-8472 |
| HLQDT35 | 117 | 839777 | AC010998 | 1308 | 1-768 |
| HLQDT35 | 117 | 839777 | AC013357 | 1309 | 1-6035 |
| | | | | | 8430-11057 |
| HLQDT35 | 117 | 839777 | AC010998 | 1310 | 1-278 |
| HLQDT35 | 117 | 839777 | AC013357 | 1311 | 1-278 |
| HLWFN63 | 118 | 908437 | AC006599 | 1312 | 1-30 |
| | | | | | 1525-1711 |
| | | | | | 5428-5502 |
| | | | | | 7038-7273 |
| | | | | | 7590-7735 |
| | | | | | 8960-9049 |
| | | | | | 11665-11800 |
| | | | | | 12889-13194 |
| | | | | | 13907-14119 |
| | | | | | 14889-15043 |
| | | | | | 15926-16164 |
| | | | | | 18759-19079 |
| | | | | | 20581-20693 |
| | | | | | 22531-22783 |
| | | | | | 23817-24956 |
| | | | | | 26153-26283 |
| | | | | | 26791-27141 |
| | | | | | 28145-29220 |
| HLWFN63 | 118 | 908437 | AL033378 | 1313 | 1-30 |
| | | | | | 1525-1711 |
| | | | | | 5428-5502 |
| | | | | | 7038-7261 |
| | | | | | 7590-7735 |
| | | | | | 11665-11800 |
| | | | | | 12889-13194 |
| | | | | | 13907-14119 |
| | | | | | 14889-15043 |
| | | | | | 15926-16164 |
| | | | | | 18759-19079 |
| | | | | | 20581-20693 |
| | | | | | 22531-22753 |
| | | | | | 23817-24956 |
| | | | | | 26153-26283 |
| | | | | | 26791-27141 |
| | | | | | 28145-29220 |
| HLWFN63 | 118 | 908437 | AC006599 | 1314 | 1-2939 |
| HLWFN63 | 118 | 908437 | AL033378 | 1315 | 1-2939 |
| HMSCD15 | 120 | 918133 | AC027008 | 1316 | 1-1190 |
| HMSCD15 | 120 | 918133 | AL158207 | 1317 | 1-130 |
| | | | | | 923-1252 |
| | | | | | 1765-3269 |
| | | | | | 4138-4483 |
| | | | | | 6546-7734 |
| HMSCD15 | 120 | 918133 | AL158207 | 1318 | 1-371 |
| HPMFL08 | 128 | 959569 | Z93016 | 1319 | 1-477 |
| HPMFL08 | 128 | 959569 | Z93016 | 1320 | 1-650 |
| HTEAG49 | 135 | 954614 | AL390796 | 1321 | 1-1310 |
| HTEAG49 | 135 | 954614 | AL357045 | 1322 | 1-1310 |
| HTEAG49 | 135 | 954614 | AL390796 | 1323 | 1-627 |
| HTEAG49 | 135 | 954614 | AL357045 | 1324 | 1-627 |
| HTLBH67 | 136 | 751985 | AC008439 | 1325 | 1-62 |
| | | | | | 293-400 |
| | | | | | 452-976 |
| | | | | | 1016-1058 |
| | | | | | 1463-1534 |
| | | | | | 1886-2026 |
| | | | | | 2110-2249 |
| | | | | | 2401-2463 |
| | | | | | 3324-4027 |
| | | | | | 4192-4288 |
| | | | | | 4694-5330 |
| | | | | | 5485-5650 |
| | | | | | 5813-6262 |
| | | | | | 6273-6401 |
| | | | | | 6475-6559 |
| | | | | | 6728-6847 |
| | | | | | 6979-7205 |
| | | | | | 7573-7676 |
| | | | | | 7730-8146 |
| | | | | | 8334-8866 |
| | | | | | 8885-9392 |
| HTLBH67 | 136 | 751985 | AC008781 | 1326 | 1-85 |
| | | | | | 254-371 |
| | | | | | 505-731 |
| | | | | | 1098-1201 |
| | | | | | 1255-1671 |
| | | | | | 1718-2387 |
| | | | | | 2408-2915 |
| | | | | | 3113-3244 |
| | | | | | 3382-4278 |
| | | | | | 4504-4538 |
| | | | | | 4650-5645 |
| HTLBH67 | 136 | 751985 | AC022420 | 1327 | 1-62 |
| | | | | | 295403 |
| | | | | | 455-979 |
| | | | | | 1019-1061 |
| | | | | | 1466-1537 |
| | | | | | 1890-2030 |
| | | | | | 2114-2253 |
| | | | | | 2405-2467 |
| | | | | | 3328-4030 |
| | | | | | 4195-4291 |
| | | | | | 4697-5333 |
| | | | | | 5488-5653 |
| | | | | | 5816-6265 |
| | | | | | 6276-6404 |
| | | | | | 6478-6562 |
| | | | | | 6731-6850 |
| | | | | | 6982-7208 |
| | | | | | 7575-7678 |
| | | | | | 7732-8148 |
| | | | | | 8195-8864 |
| | | | | | 8885-9392 |
| | | | | | 9590-9721 |
| | | | | | 9859-10754 |
| | | | | | 10980-11014 |
| | | | | | 11126-12121 |
| HTLBH67 | 136 | 751985 | AC005368 | 1328 | 1-64 |
| | | | | | 294-399 |
| | | | | | 451-975 |
| | | | | | 1015-1057 |
| | | | | | 1462-1533 |
| | | | | | 1885-2025 |
| | | | | | 2109-2248 |
| | | | | | 2400-2462 |
| | | | | | 3323-4026 |
| | | | | | 4191-4287 |
| | | | | | 4693-5329 |
| | | | | | 5484-5649 |
| | | | | | 5812-6264 |
| | | | | | 6275-6403 |
| | | | | | 6477-6561 |
| | | | | | 6730-6849 |
| | | | | | 6981-7207 |
| | | | | | 7575-7678 |
| | | | | | 7732-8148 |
| | | | | | 8201-8868 |
| | | | | | 8887-9394 |
| | | | | | 9592-9723 |
| | | | | | 9861-10759 |
| | | | | | 10985-11019 |
| | | | | | 11131-12126 |
| HTLBH67 | 136 | 751985 | AC008781 | 1329 | 1-292 |
| HTLBH67 | 136 | 751985 | AC022420 | 1330 | 1-323 |
| | | | | | 1372-1431 |
| | | | | | 1657-1821 |
| | | | | | 2377-2485 |
| | | | | | 4488-4700 |
| | | | | | 4954-5061 |
| | | | | | 6224-6547 |
| | | | | | 6819-6965 |
| | | | | | 7268-7333 |
| | | | | | 8088-8593 |
| | | | | | 9897-10068 |
| | | | | | 10109-10623 |
| | | | | | 10645-10680 |
| | | | | | 10812-10871 |
| | | | | | 10982-11123 |
| | | | | | 11345-11383 |
| | | | | | 11877-12000 |
| | | | | | 12310-13467 |
| HTLBH67 | 136 | 751985 | AC022420 | 1331 | 1-292 |
| HTLBH67 | 136 | 751985 | AC005368 | 1332 | 1-292 |
| HTLJC71 | 137 | 922923 | AC009516 | 1333 | 1-2009 |
| HTLJC71 | 137 | 922923 | AC007957 | 1334 | 1-1747 |
| HTLJC71 | 137 | 922923 | AC018751 | 1335 | 1-2009 |
| HTLJC71 | 137 | 922923 | AC023490 | 1336 | 1-2009 |
| HTLJC71 | 137 | 922923 | AC009516 | 1337 | 1-375 |
| HTLJC71 | 137 | 922923 | AC009516 | 1338 | 1-494 |
| HTLJC71 | 137 | 922923 | AC007957 | 1339 | 1-205 |
| HTLJC71 | 137 | 922923 | AC018751 | 1340 | 1-494 |
| HTLJC71 | 137 | 922923 | AC023490 | 1341 | 1-375 |
| HTLJC71 | 137 | 922923 | AC018751 | 1342 | 1-375 |
| HTPAD46 | 138 | 503313 | AC010932 | 1343 | 1-3347 |
| HTPAD46 | 138 | 503313 | AL133510 | 1344 | 1-5377 |
| HWMBM13 | 144 | 909683 | AL158847 | 1345 | 1-1445 |
| | | | | | 1668-1817 |
| | | | | | 1931-2643 |
| HWMBM13 | 144 | 909683 | AL158847 | 1346 | 1-396 |
| HWWDN34 | 145 | 911357 | AC019214 | 1347 | 1-160 |
| | | | | | 713-910 |
| | | | | | 1069-1269 |
| | | | | | 3997-4098 |
| | | | | | 4303-4397 |
| | | | | | 5035-5098 |
| | | | | | 5740-5796 |
| | | | | | 6024-6155 |
| | | | | | 6697-6813 |
| | | | | | 6937-7029 |
| | | | | | 7110-7349 |
| | | | | | 7432-7571 |
| | | | | | 7573-7601 |
| | | | | | 7834-7907 |
| | | | | | 8326-8490 |
| | | | | | 8712-8804 |
| | | | | | 8894-8979 |
| | | | | | 9090-9171 |
| | | | | | 9368-9467 |
| | | | | | 9622-9730 |
| | | | | | 9821-10012 |
| | | | | | 10197-10277 |
| | | | | | 10440-10562 |
| | | | | | 10668-11103 |
| | | | | | 11203-11432 |
| | | | | | 11937-12052 |
| | | | | | 12251-12312 |
| | | | | | 12794-13183 |
| | | | | | 13257-13343 |
| | | | | | 13483-13996 |
| | | | | | 14001-14146 |
| | | | | | 14369-14483 |
| | | | | | 14587-15046 |
| | | | | | 15053-15302 |
| | | | | | 15470-15534 |
| | | | | | 15624-15695 |
| | | | | | 16128-16212 |
| | | | | | 17904-17980 |
| | | | | | 18066-18189 |
| | | | | | 18298-18394 |
| | | | | | 18494-18574 |
| | | | | | 18668-18771 |
| | | | | | 18896-19043 |
| | | | | | 19245-19364 |
| | | | | | 19650-19925 |
| | | | | | 19968-20102 |
| | | | | | 20205-20354 |
| | | | | | 20529-21648 |
| | | | | | 21748-21816 |
| | | | | | 21861-22129 |
| | | | | | 22341-22569 |
| | | | | | 22799-22888 |
| | | | | | 23058-23600 |
| | | | | | 23833-23968 |
| | | | | | 24304-24757 |
| HWWDN34 | 145 | 911357 | AC019214 | 1348 | 1-803 |
| | | | | | 1028-1918 |
| HDPVY89 | 156 | 827026 | AC026283 | 1349 | 1-292 |
| | | | | | 353-776 |
| | | | | | 1340-1506 |
| | | | | | 1568-1696 |
| | | | | | 2408-2534 |
| | | | | | 4767-4955 |
| | | | | | 5472-5546 |
| | | | | | 5957-6293 |
| | | | | | 6373-7085 |
| | | | | | 7386-7445 |
| | | | | | 9201-9273 |
| | | | | | 9532-9672 |
| | | | | | 10470-10641 |
| | | | | | 10873-11481 |
| | | | | | 12131-12705 |
| | | | | | 12990-13214 |
| | | | | | 13351-13509 |
| | | | | | 14119-14173 |
| | | | | | 14445-14570 |
| | | | | | 14879-15004 |
| | | | | | 15604-15844 |
| | | | | | 16133-16253 |
| | | | | | 17540-17867 |
| | | | | | 17944-18254 |
| | | | | | 18356-18755 |
| | | | | | 18892-19002 |
| | | | | | 20066-20352 |
| | | | | | 21146-21308 |
| | | | | | 23235-23486 |
| | | | | | 23813-24533 |
| HDPVY89 | 156 | 827026 | AC026283 | 1350 | 1-318 |
| HFOXK14 | 180 | 603245 | AL096870 | 1351 | 1-68 |
| | | | | | 218-379 |
| | | | | | 706-840 |
| | | | | | 1000-1180 |
| | | | | | 1505-2004 |
| | | | | | 2014-2301 |
| | | | | | 3897-3942 |
| | | | | | 4074-4162 |
| | | | | | 4353-4422 |
| | | | | | 4764-4865 |
| | | | | | 4941-5356 |
| | | | | | 5850-5932 |
| | | | | | 6040-6181 |
| | | | | | 6664-6917 |
| | | | | | 7152-7337 |
| | | | | | 7431-7624 |
| | | | | | 8016-8175 |
| | | | | | 8346-8525 |
| | | | | | 9445-9926 |
| | | | | | 10349-10496 |
| | | | | | 10802-10912 |
| | | | | | 10949-11881 |
| HFOXK14 | 180 | 603245 | AL096870 | 1352 | 1-262 |
| HHFLU06 | 182 | 857884 | AL096870 | 1353 | 1-68 |
| | | | | | 218-379 |
| | | | | | 706-840 |
| | | | | | 1000-1180 |
| | | | | | 1505-2004 |
| | | | | | 2014-2301 |
| | | | | | 3897-3942 |
| | | | | | 4074-4162 |
| | | | | | 4353-4422 |
| | | | | | 4764-4865 |
| | | | | | 4941-5356 |
| | | | | | 5850-5932 |
| | | | | | 6040-6181 |
| | | | | | 6664-6917 |
| | | | | | 7152-7337 |
| | | | | | 7431-7624 |
| | | | | | 8016-8175 |
| | | | | | 8346-8525 |
| | | | | | 9445-9926 |
| | | | | | 10349-10496 |
| | | | | | 10802-10912 |
| | | | | | 10949-11881 |
| HHFLU06 | 182 | 857884 | AL096870 | 1354 | 1-262 |
| HBIOZ10 | 187 | 973131 | AC010761 | 1355 | 1-543 |
| | | | | | 787-3239 |
| | | | | | 3323-3758 |
| | | | | | 3840-3890 |
| HBIOZ10 | 187 | 973131 | AC010761 | 1356 | 1-134 |
| | | | | | 560-634 |
| | | | | | 971-1091 |
| | | | | | 2351-2501 |
| | | | | | 2711-2875 |
| | | | | | 2967-3126 |
| | | | | | 3298-3461 |
| | | | | | 3575-4655 |
| | | | | | 5184-5345 |
| HBKDI30 | 188 | 729048 | AL160175 | 1357 | 1-155 |
| | | | | | 743-898 |
| | | | | | 1272-1388 |
| | | | | | 4034-4114 |
| | | | | | 4238-4358 |
| | | | | | 4714-4779 |
| | | | | | 4918-5073 |
| | | | | | 5219-5353 |
| | | | | | 6932-7970 |
| HDAAV61 | 194 | 810305 | AC007136 | 1358 | 1-462 |
| | | | | | 1711-2082 |
| | | | | | 4232-4320 |
| | | | | | 4347-4558 |
| | | | | | 4640-4739 |
| | | | | | 7341-7423 |
| | | | | | 7710-8325 |
| | | | | | 8400-8498 |
| | | | | | 8890-9085 |
| | | | | | 9717-9885 |
| | | | | | 10451-10717 |
| | | | | | 10747-10793 |
| | | | | | 11067-13460 |
| HDAAV61 | 194 | 810305 | AC007136 | 1359 | 1-138 |
| HDAAV61 | 194 | 810305 | AC007136 | 1360 | 1-113 |
| HE8UY74 | 202 | 960914 | AL356968 | 1361 | 1-2209 |
| HE8UY74 | 202 | 960914 | AL356968 | 1362 | 1-518 |
| HFKIT06 | 207 | 934019 | AC068353 | 1363 | 1-1562 |
| HFKIT06 | 207 | 934019 | AC026976 | 1364 | 1-222 |
| HFKIT06 | 207 | 934019 | AC026976 | 1365 | 1-294 |
| HFKIT06 | 207 | 934019 | AF284563 | 1366 | 1-1562 |
| HFKIT06 | 207 | 934019 | AC068353 | 1367 | 1-323 |
| HFKIT06 | 207 | 934019 | AF284563 | 1368 | 1-323 |
| HHEHC53 | 209 | 921783 | AC009427 | 1369 | 1-100 |
| | | | | | 1854-1942 |
| | | | | | 3236-3463 |
| | | | | | 4629-4868 |
| | | | | | 5054-5181 |
| | | | | | 5371-5476 |
| | | | | | 5851-5953 |
| | | | | | 6104-6149 |
| | | | | | 6509-6612 |
| | | | | | 7131-8415 |
| | | | | | 8429-8492 |
| | | | | | 8638-8748 |
| | | | | | 8975-9440 |
| | | | | | 9835-10490 |
| | | | | | 10606-10899 |
| | | | | | 11149-11282 |
| | | | | | 11382-11881 |
| | | | | | 12023-12075 |
| | | | | | 12172-12315 |
| | | | | | 12496-12551 |
| | | | | | 12638-12706 |
| | | | | | 12827-12994 |
| | | | | | 13077-13630 |
| HHEHC53 | 209 | 921783 | AC009427 | 1370 | 1-428 |
| HHEHC53 | 209 | 921783 | AC009427 | 1371 | 1-388 |
| | | | | | 466-526 |
| | | | | | 698-906 |
| | | | | | 1023-1922 |
| HMTAJ73 | 215 | 813296 | AC015698 | 1372 | 1-132 |
| | | | | | 337-470 |
| | | | | | 573-666 |
| | | | | | 1313-1765 |
| | | | | | 1962-2257 |
| | | | | | 2433-2599 |
| | | | | | 2611-2991 |
| | | | | | 3150-4087 |
| HMTAJ73 | 215 | 813296 | AC015698 | 1373 | 1-184 |
| HNTMD79 | 217 | 934522 | AL160291 | 1374 | 1-240 |
| | | | | | 824-922 |
| | | | | | 1460-1771 |
| | | | | | 3163-3311 |
| | | | | | 4244-4385 |
| | | | | | 5252-5359 |
| | | | | | 5721-5781 |
| HNTMD79 | 217 | 934522 | AL365228 | 1375 | 1-240 |
| | | | | | 1460-1771 |
| | | | | | 3163-3311 |
| | | | | | 4244-4385 |
| | | | | | 5253-5360 |
| | | | | | 5722-5782 |
| HNTMD79 | 217 | 934522 | AL160291 | 1376 | 1-694 |
| HNTMD79 | 217 | 934522 | AL365228 | 1377 | 1-694 |
| HNTNB14 | 219 | 909942 | AC068701 | 1378 | 1-414 |
| | | | | | 578-660 |
| | | | | | 871-957 |
| | | | | | 1247-1581 |
| | | | | | 1647-3915 |
| HNTNB14 | 219 | 909942 | AC068701 | 1379 | 1-148 |
| HTEMU66 | 232 | 944419 | AL022167 | 1380 | 1-1796 |
| HTEMU66 | 232 | 944419 | AC018903 | 1381 | 1-631 |
| HTEMU66 | 232 | 941419 | AC068470 | 1382 | 1-706 |
| HTEMU66 | 232 | 944419 | AL049186 | 1383 | 1-912 |
| HTEMU66 | 232 | 941419 | AC006510 | 1384 | 1-1150 |
| HTEMU66 | 232 | 944419 | AC022305 | 1385 | 1-686 |
| HTEMU66 | 232 | 944419 | AL049186 | 1386 | 1-87 |
| HTPGG25 | 239 | 911282 | AC020705 | 1387 | 1-125 |
| | | | | | 455-594 |
| | | | | | 711-853 |
| | | | | | 934-1082 |
| | | | | | 1618-1727 |
| | | | | | 2487-2898 |
| | | | | | 3420-3558 |
| HTPGG25 | 239 | 911282 | AC020705 | 1388 | 1-924 |
| | | | | | 1085-2662 |
| HWAFG04 | 244 | 952878 | AC018571 | 1389 | 1-36 |
| | | | | | 150-275 |
| | | | | | 1528-2147 |
| | | | | | 2757-3048 |
| | | | | | 3345-3519 |
| | | | | | 4024-4132 |
| | | | | | 5472-7934 |
| HWAFG04 | 244 | 952878 | AC046185 | 1390 | 1-36 |
| | | | | | 150-275 |
| | | | | | 1528-2147 |
| | | | | | 2757-3048 |
| | | | | | 3345-3519 |
| | | | | | 4024-4132 |
| | | | | | 5472-7934 |
| HWAFG04 | 244 | 952878 | AC015651 | 1391 | 1-931 |
| | | | | | 1434-1990 |
| | | | | | 3313-3421 |
| | | | | | 3533-3658 |
| | | | | | 4911-5529 |
| | | | | | 6139-6430 |
| | | | | | 6727-6901 |
| | | | | | 7406-7514 |
| | | | | | 8854-11316 |
| HWAFG04 | 244 | 952878 | AC018571 | 1392 | 1-619 |
| HWAFG04 | 244 | 952878 | AC046185 | 1393 | 1-469 |
| HWAFG04 | 244 | 952878 | AC015651 | 1394 | 1-284 |
| HWAFG04 | 244 | 952878 | AC015651 | 1395 | 1-619 |
| HWMIB81 | 249 | 955336 | AC021719 | 1396 | 1-109 |
| | | | | | 636-1074 |
| | | | | | 4114-4301 |
| | | | | | 5473-5527 |
| | | | | | 8202-8368 |
| | | | | | 8491-9905 |
| | | | | | 9927-11792 |
| HWMIB81 | 249 | 955336 | AC016143 | 1397 | 1-109 |
| | | | | | 636-1074 |
| | | | | | 4114-4301 |
| | | | | | 5473-5527 |
| | | | | | 8202-8368 |
| | | | | | 8491-9905 |
| | | | | | 9927-11792 |
| HWHGY45 | 304 | 911621 | AC021102 | 1398 | 1-260 |
| | | | | | 946-1050 |
| HHPDV86 | 310 | 522953 | AC025928 | 1399 | 1-62 |
| | | | | | 370-633 |
| | | | | | 1054-1403 |
| | | | | | 1500-1650 |
| | | | | | 1962-2043 |
| | | | | | 2080-2494 |
| | | | | | 2660-2823 |
| | | | | | 3015-3150 |
| | | | | | 5002-5160 |
| | | | | | 5681-5758 |
| | | | | | 7238-7722 |
| | | | | | 7759-8092 |
| | | | | | 8289-8396 |
| | | | | | 8800-9692 |
| HHPDV86 | 310 | 522953 | AL109627 | 1400 | 1-62 |
| | | | | | 374-637 |
| | | | | | 1058-1406 |
| | | | | | 1503-1653 |
| | | | | | 1965-2046 |
| | | | | | 2083-2497 |
| | | | | | 2663-2826 |
| | | | | | 3018-3153 |
| | | | | | 5010-5168 |
| | | | | | 5723-5800 |
| | | | | | 7279-7763 |
| | | | | | 7800-8131 |
| | | | | | 8328-8435 |
| | | | | | 8839-9730 |
| HHPDV86 | 310 | 522953 | AC025928 | 1401 | 1-137 |
| | | | | | 3556-3999 |
| | | | | | 4417-4578 |
| HHPDV86 | 310 | 522953 | AL109627 | 1402 | 1-137 |
| | | | | | 3556-3999 |
| | | | | | 4417-4578 |
| HTTKF86 | 318 | 912689 | Z82188 | 1403 | 1-128 |
| | | | | | 933-996 |
| | | | | | 1532-1699 |
| | | | | | 6031-7667 |
| HTTKF86 | 318 | 912689 | Z82188 | 1404 | 1-282 |
| HTTKF86 | 318 | 912689 | Z82188 | 1405 | 1-896 |
| HCESA79 | 319 | 912709 | AC009065 | 1406 | 1-70 |
| | | | | | 850-1112 |
| | | | | | 1169-1622 |
| | | | | | 1707-1779 |
| | | | | | 1874-1924 |
| | | | | | 2836-2908 |
| | | | | | 3006-4160 |
| HCESA79 | 319 | 912709 | AC012171 | 1407 | 1-64 |
| | | | | | 159-209 |
| | | | | | 1122-1194 |
| | | | | | 1292-1527 |
| | | | | | 1593-2446 |
| HCESA79 | 319 | 912709 | AC005346 | 1408 | 1-70 |
| | | | | | 874-1136 |
| | | | | | 1193-1646 |
| | | | | | 1731-1803 |
| | | | | | 1898-1948 |
| | | | | | 2861-2933 |
| | | | | | 3031-4185 |
| HCESA79 | 319 | 912709 | AC009065 | 1409 | 1-547 |
| HCESA79 | 319 | 912709 | AC012171 | 1410 | 1-547 |
| HCESA79 | 319 | 912709 | AC009065 | 1411 | 1-424 |
| HCESA79 | 319 | 912709 | AC005346 | 1412 | 1-547 |
| HCESA79 | 319 | 912709 | AC012171 | 1413 | 1-419 |
| HCESA79 | 319 | 912709 | AC005346 | 1414 | 1-424 |
| HDTBJ28 | 320 | 912714 | AP001793 | 1415 | 1-791 |
| | | | | | 2172-2708 |
| | | | | | 3318-3396 |
| HDTBJ28 | 320 | 912714 | AP000864 | 1416 | 1-973 |
| | | | | | 2292-2890 |
| | | | | | 3500-3585 |
| HDTBJ28 | 320 | 912714 | AC008052 | 1417 | 1-1228 |
| | | | | | 2610-3146 |
| | | | | | 3756-3852 |
| | | | | | 6044-6512 |
| HDTBJ28 | 320 | 912714 | AC015676 | 1418 | 1-782 |
| | | | | | 2163-2699 |
| | | | | | 3310-3406 |
| | | | | | 5603-6071 |
| HDTBJ28 | 320 | 912714 | AC008052 | 1419 | 1-281 |
| | | | | | 344-1073 |
| | | | | | 1346-1846 |
| | | | | | 1875-2279 |
| | | | | | 2562-3367 |
| HDTBJ28 | 320 | 912714 | AC015676 | 1420 | 1-281 |
| | | | | | 344-1073 |
| | | | | | 1346-1846 |
| | | | | | 1875-2279 |
| | | | | | 2562-3367 |
| HEOQA56 | 324 | 925132 | AC013449 | 1421 | 1-104 |
| HTPCQ24 | 325 | 925349 | Z99716 | 1422 | 1-55 |
| | | | | | 126-186 |
| | | | | | 610-963 |
| | | | | | 1193-1368 |
| | | | | | 2995-3327 |
| HTPCQ24 | 325 | 925349 | Z99716 | 1423 | 1-135 |
| HWAEI37 | 326 | 929481 | AL035461 | 1424 | 1-125 |
| | | | | | 1059-1213 |
| | | | | | 1474-1578 |
| | | | | | 2527-2806 |
| | | | | | 3656-3738 |
| | | | | | 4150-4303 |
| | | | | | 6178-6277 |
| | | | | | 7576-7777 |
| | | | | | 8753-8841 |
| | | | | | 11399-11733 |
| | | | | | 12324-12409 |
| | | | | | 13930-14406 |
| | | | | | 14552-14912 |
| | | | | | 16486-16637 |
| | | | | | 16878-17075 |
| | | | | | 17331-17733 |
| | | | | | 18153-18539 |
| | | | | | 19403-19618 |
| | | | | | 20219-20612 |
| | | | | | 21057-21087 |
| | | | | | 22106-22250 |
| | | | | | 24542-24846 |
| | | | | | 25416-25943 |
| | | | | | 26924-27007 |
| HWAEI37 | 326 | 929481 | AL035461 | 1425 | 1-902 |
| | | | | | 3219-3309 |
| | | | | | 3397-3514 |
| | | | | | 4119-4204 |
| | | | | | 4594-4956 |
| | | | | | 5725-5855 |
| | | | | | 6111-6199 |
| | | | | | 6330-6423 |
| | | | | | 6972-7084 |
| | | | | | 7935-8468 |
| | | | | | 8574-8701 |
| | | | | | 12446-12712 |
| HSLEM44 | 330 | 506604 | AC078913 | 1426 | 1-350 |
| HSLEM44 | 330 | 506604 | AC022123 | 1427 | 1-351 |
| HSLEM44 | 330 | 506604 | AC010357 | 1428 | 1-350 |
| HLWBR95 | 335 | 734474 | AC013252 | 1429 | 1-1431 |
| | | | | | 2471-2593 |
| | | | | | 3271-3363 |
| | | | | | 3664-3815 |
| | | | | | 4189-4313 |
| | | | | | 4828-5350 |
| | | | | | 5548-5643 |
| | | | | | 5651-5788 |
| | | | | | 6280-6588 |
| | | | | | 7989-8153 |
| | | | | | 8309-8444 |
| | | | | | 9035-9391 |
| | | | | | 10636-10819 |
| | | | | | 11421-11524 |
| | | | | | 11927-12357 |
| | | | | | 12421-12568 |
| | | | | | 13436-13609 |
| | | | | | 14506-14698 |
| HLWBR95 | 335 | 734474 | AC013252 | 1430 | 1-355 |
| HMSOZ55 | 340 | 910911 | AC024229 | 1431 | 1-44 |
| | | | | | 4837-4955 |
| | | | | | 5209-5280 |
| | | | | | 6713-7192 |
| | | | | | 7207-7601 |
| | | | | | 7973-885g |
| HMSOZS5 | 340 | 910911 | AC024229 | 1432 | 1-1660 |
| HMCAV88 | 347 | 924874 | AC068231 | 1433 | 1-77 |
| | | | | | 341-747 |
| | | | | | 965-1228 |
| | | | | | 1419-1507 |
| | | | | | 1758-1819 |
| | | | | | 2098-2205 |
| | | | | | 2595-2658 |
| | | | | | 2804-3341 |
| HMCAV88 | 347 | 924874 | AL357752 | 1434 | 1-77 |
| | | | | | 341-747 |
| | | | | | 965-1229 |
| | | | | | 1420-1508 |
| | | | | | 1759-1820 |
| | | | | | 2099-2206 |
| | | | | | 2596-2659 |
| | | | | | 2805-3342 |
| HMCAV88 | 347 | 924874 | AC005476 | 1435 | 1-960 |
| HMCAV88 | 347 | 924874 | AC068231 | 1436 | 1-202 |
| | | | | | 2270-2941 |
| | | | | | 5541-5653 |
| | | | | | 5766-5910 |
| | | | | | 6198-6242 |
| HMCAV88 | 347 | 924874 | AC068231 | 1437 | 1-415 |
| | | | | | 674-737 |
| | | | | | 960-1053 |
| | | | | | 1379-1496 |
| HMCAV88 | 347 | 924874 | AL357752 | 1438 | 1-415 |
| | | | | | 674-737 |
| | | | | | 960-1053 |
| | | | | | 1379-1496 |
| HMCAV88 | 347 | 924874 | AC005476 | 1439 | 1-366 |
| HFVHV40 | 349 | 945849 | AC020911 | 1440 | 1-149 |
| | | | | | 3465-3490 |
| | | | | | 3536-3663 |
| | | | | | 5417-6105 |
| | | | | | 6912-7217 |
| | | | | | 8423-8493 |
| | | | | | 8847-9176 |
| | | | | | 10098-10233 |
| | | | | | 10536-11336 |
| HFVHV40 | 349 | 945849 | AC020911 | 1441 | 1-299 |
| HFVHV40 | 349 | 945849 | AC020911 | 1442 | 1-110 |
| HEAAE08 | 351 | 959970 | AC008687 | 1443 | 1-66 |
| | | | | | 297-597 |
| | | | | | 884-1115 |
| | | | | | 1668-2115 |
| | | | | | 2645-2819 |
| | | | | | 2847-3188 |
| | | | | | 3247-3306 |
| | | | | | 3480-4766 |
| HEAAE08 | 351 | 959970 | AC008687 | 1444 | 1-95 |
| HAPRM21 | 353 | 963200 | AL034374 | 1445 | 1-78 |
| | | | | | 996-1169 |
| | | | | | 2915-3039 |
| | | | | | 3204-3252 |
| | | | | | 3307-3664 |
| | | | | | 4437-4671 |
| | | | | | 4859-4972 |
| | | | | | 5431-8861 |
| HAPRM21 | 353 | 963200 | AL034374 | 1446 | 1-498 |
| HAPRM21 | 353 | 963200 | AL034374 | 1447 | 1-495 |
| HTADZ74 | 358 | 811489 | AC007278 | 1448 | 1-164 |
| | | | | | 1470-1572 |
| | | | | | 1892-2030 |
| | | | | | 3973-4099 |
| | | | | | 5671-5845 |
| | | | | | 6588-7389 |
| HAPNZ77 | 359 | 887072 | AC076973 | 1449 | 1-480 |
| HAPNZ77 | 359 | 887072 | AC023098 | 1450 | 1-1520 |
| | | | | | 1808-2468 |
| HAPNZ77 | 359 | 887072 | AC003046 | 1451 | 1-3893 |
| | | | | | 4181-4841 |
| HAPNZ77 | 359 | 887072 | AC005859 | 1452 | 1-3893 |
| | | | | | 4181-4841 |
| HAPNZ77 | 359 | 887072 | AC023098 | 1453 | 1-307 |
| HTSFJ40 | 364 | 722406 | AC006171 | 1454 | 1-247 |
| | | | | | 1217-1320 |
| | | | | | 1624-1963 |
| | | | | | 2076-2179 |
| | | | | | 2604-2711 |
| | | | | | 2716-3114 |
| | | | | | 3399-3638 |
| | | | | | 4344-4427 |
| | | | | | 5079-5141 |
| | | | | | 5439-8153 |
| | | | | | 8268-8798 |
| HTSFJ40 | 364 | 722406 | AL161645 | 1455 | 1-247 |
| | | | | | 1217-1320 |
| | | | | | 1624-1963 |
| | | | | | 2076-2179 |
| | | | | | 2604-2711 |
| | | | | | 2716-3114 |
| | | | | | 3399-3638 |
| | | | | | 4344-4427 |
| | | | | | 5079-5141 |
| | | | | | 5439-8153 |
| | | | | | 8268-8798 |
| HTSFJ40 | 364 | 722406 | AC006171 | 1456 | 1-2213 |
| HSDJH12 | 368 | 876344 | AC021747 | 1457 | 1-76 |
| | | | | | 239-328 |
| | | | | | 886-973 |
| | | | | | 3912-4047 |
| | | | | | 6397-6453 |
| | | | | | 7393-7574 |
| | | | | | 8590-9069 |
| | | | | | 9354-10839 |
| | | | | | 13386-13803 |
| | | | | | 14791-15108 |
| | | | | | 15296-15408 |
| | | | | | 15499-15925 |
| | | | | | 16031-16317 |
| | | | | | 16452-16602 |
| | | | | | 17145-18449 |
| HSDJH12 | 368 | 876344 | AL359882 | 1458 | 1-283 |
| | | | | | 1979-2405 |
| HSDJH12 | 368 | 876344 | AC046143 | 1459 | 1-283 |
| | | | | | 1272-1589 |
| | | | | | 1794-1889 |
| | | | | | 1980-2406 |
| | | | | | 2512-2797 |
| | | | | | 2932-3082 |
| HWLEY40 | 374 | 957875 | AC006171 | 1460 | 1-247 |
| | | | | | 1217-1320 |
| | | | | | 1624-1963 |
| | | | | | 2076-2179 |
| | | | | | 2604-2711 |
| | | | | | 2716-3114 |
| | | | | | 3399-3638 |
| | | | | | 4344-4427 |
| | | | | | 5079-5141 |
| | | | | | 5439-8153 |
| | | | | | 8268-8798 |
| HWLEY40 | 374 | 957875 | AL161645 | 1461 | 1-247 |
| | | | | | 1217-1320 |
| | | | | | 1624-1963 |
| | | | | | 2076-2179 |
| | | | | | 2604-2711 |
| | | | | | 2716-3 114 |
| | | | | | 3399-3638 |
| | | | | | 4344-4427 |
| | | | | | 5079-5141 |
| | | | | | 5439-8153 |
| | | | | | 8268-8798 |
| HWLEY40 | 374 | 957875 | AC006171 | 1462 | 1-2213 |
| HOUBZ94 | 376 | 527876 | AC068475 | 1463 | 1-70 |
| | | | | | 163-330 |
| | | | | | 651-994 |
| | | | | | 1105-1272 |
| | | | | | 1372-1586 |
| | | | | | 2253-2908 |
| | | | | | 2995-3524 |
| | | | | | 3711-4406 |
| | | | | | 4418-4480 |
| | | | | | 4581-5218 |
| | | | | | 5621-5829 |
| | | | | | 6007-6286 |
| HOUBZ94 | 376 | 527876 | AC005954 | 1464 | 1-91 |
| | | | | | 893-1009 |
| | | | | | 1323-1695 |
| | | | | | 1856-2422 |
| | | | | | 3548-3650 |
| | | | | | 3665-4010 |
| | | | | | 4965-5170 |
| | | | | | 5288-5397 |
| | | | | | 6874-7000 |
| | | | | | 7283-7430 |
| | | | | | 7520-7600 |
| | | | | | 7693-7860 |
| | | | | | 8181-8524 |
| | | | | | 8634-8807 |
| | | | | | 8902-9116 |
| | | | | | 9783-10438 |
| | | | | | 10525-11054 |
| | | | | | 11241-11936 |
| | | | | | 11948-12010 |
| | | | | | 12111-12748 |
| | | | | | 13154-13362 |
| | | | | | 13540-13833 |
| | | | | | 14748-14851 |
| | | | | | 14928-15142 |
| | | | | | 15543-15616 |
| | | | | | 17091-17240 |
| | | | | | 17351-18020 |
| | | | | | 18331-18662 |
| | | | | | 19524-19871 |
| | | | | | 19999-20209 |
| | | | | | 20570-20670 |
| | | | | | 20861-21075 |
| | | | | | 22489-22727 |
| | | | | | 22961-23073 |
| | | | | | 25307-25360 |
| | | | | | 29573-29961 |
| | | | | | 31051-31168 |
| HOUBZ94 | 376 | 527876 | AC005954 | 1465 | 1-131 |
| HCE3W04 | 379 | 615501 | AC022366 | 1466 | 1-565 |
| | | | | | 1503-1718 |
| | | | | | 1838-1933 |
| | | | | | 2011-2097 |
| | | | | | 2265-2335 |
| | | | | | 2588-2693 |
| | | | | | 2905-2975 |
| | | | | | 3090-3726 |
| | | | | | 3809-3889 |
| | | | | | 4080-4591 |
| | | | | | 4847-5070 |
| | | | | | 5355-5819 |
| HCE3W04 | 379 | 615501 | AC022506 | 1467 | 1-563 |
| | | | | | 1501-1716 |
| | | | | | 1836-1931 |
| | | | | | 2009-2094 |
| | | | | | 2263-2333 |
| | | | | | 2586-2691 |
| | | | | | 2903-2973 |
| | | | | | 3088-3724 |
| | | | | | 3807-3887 |
| | | | | | 4085-4540 |
| HCE3W04 | 379 | 615501 | AC025165 | 1468 | 1-565 |
| | | | | | 1503-1718 |
| | | | | | 1838-1933 |
| | | | | | 2011-2097 |
| | | | | | 2265-2335 |
| | | | | | 2588-2693 |
| | | | | | 2905-2975 |
| | | | | | 3090-3726 |
| | | | | | 3809-3889 |
| | | | | | 4080-4591 |
| | | | | | 4847-5070 |
| | | | | | 5355-5819 |
| HCE3W04 | 379 | 615501 | AC025165 | 1469 | 1-604 |
| HCE3W04 | 379 | 615501 | AC022506 | 1470 | 1-518 |
| | | | | | 999-1533 |
| | | | | | 1563-1830 |
| | | | | | 2015-2094 |
| | | | | | 2441-3538 |
| | | | | | 4095-4315 |
| | | | | | 4655-5378 |
| HPJAP28 | 382 | 686349 | AC004794 | 1471 | 1-599 |
| | | | | | 769-987 |
| | | | | | 1562-1690 |
| | | | | | 1879-2043 |
| | | | | | 2595-2821 |
| | | | | | 3807-5923 |
| | | | | | 6102-6572 |
| | | | | | 6641-7502 |
| | | | | | 8127-8585 |
| | | | | | 9415-9553 |
| | | | | | 9669-9763 |
| | | | | | 9826-9989 |
| | | | | | 10230-10322 |
| HPJAP28 | 382 | 686349 | AC004794 | 1472 | 1-97 |
| | | | | | 1121-1975 |
| HPJAP28 | 382 | 686349 | AC004794 | 1473 | 1-691 |
| HIBEC79 | 383 | 703000 | AC011458 | 1474 | 1-138 |
| | | | | | 397-1114 |
| | | | | | 1356-1693 |
| | | | | | 1781-2091 |
| | | | | | 2270-2389 |
| | | | | | 2474-2908 |
| | | | | | 3053-3202 |
| | | | | | 3288-3349 |
| | | | | | 3421-3976 |
| | | | | | 4551-4662 |
| | | | | | 4696-5053 |
| | | | | | 5166-5246 |
| | | | | | 5318-5490 |
| | | | | | 5592-5723 |
| | | | | | 6082-6283 |
| | | | | | 6619-6733 |
| | | | | | 6853-6942 |
| | | | | | 7491-7586 |
| | | | | | 7922-8003 |
| | | | | | 8015-8421 |
| | | | | | 8432-8624 |
| | | | | | 8714-8856 |
| | | | | | 8943-10332 |
| | | | | | 10482-10901 |
| | | | | | 11647-11934 |
| | | | | | 13110-13177 |
| | | | | | 13310-14175 |
| HIBEC79 | 383 | 703000 | AC011458 | 1475 | 1-406 |
| HIBEC79 | 383 | 703000 | AC011458 | 1476 | 1-287 |
| HNFHS82 | 387 | 779946 | AC010835 | 1477 | 1-418 |
| HFPBB28 | 389 | 844526 | AC016135 | 1478 | 1-845 |
| HFPBB28 | 389 | 844526 | AC018512 | 1479 | 1-776 |
| HFPBB28 | 389 | 844526 | AC073717 | 1480 | 1-240 |
| | | | | | 976-1440 |
| | | | | | 2143-2356 |
| | | | | | 6769-6910 |
| | | | | | 9591-9648 |
| | | | | | 9951-10098 |
| HSIDQ38 | 401 | 909854 | AC003070 | 1483 | 1-152 |
| | | | | | 3039-3473 |
| | | | | | 4301-4483 |
| | | | | | 4678-4795 |
| | | | | | 5280-5944 |
| | | | | | 6055-6117 |
| | | | | | 6290-6359 |
| | | | | | 6677-6761 |
| | | | | | 8475-9284 |
| | | | | | 11404-11918 |
| | | | | | 12112-12437 |
| | | | | | 12443-13065 |
| | | | | | 13153-13467 |
| | | | | | 13593-13719 |
| | | | | | 13799-14185 |
| | | | | | 14224-16489 |
| HFTBL33 | 407 | 910055 | AC022366 | 1484 | 1-565 |
| | | | | | 1503-1718 |
| | | | | | 1838-1933 |
| | | | | | 2011-2097 |
| | | | | | 2265-2335 |
| | | | | | 2588-2693 |
| | | | | | 2905-2975 |
| | | | | | 3090-3726 |
| | | | | | 3809-3889 |
| | | | | | 4080-4591 |
| | | | | | 4847-5070 |
| | | | | | 5355-5819 |
| HETBL33 | 407 | 910055 | AC025165 | 1485 | 1-565 |
| | | | | | 1503-1718 |
| | | | | | 1838-1933 |
| | | | | | 2011-2097 |
| | | | | | 2265-2335 |
| | | | | | 2588-2693 |
| | | | | | 2905-2975 |
| | | | | | 3090-3726 |
| | | | | | 3809-3889 |
| | | | | | 4080-4591 |
| | | | | | 4847-5070 |
| | | | | | 5355-5819 |
| HFTBL33 | 407 | 910055 | AC025165 | 1486 | 1-604 |
| HUFCI64 | 411 | 911558 | AC004151 | 1487 | 1-145 |
| | | | | | 359-443 |
| | | | | | 527-599 |
| | | | | | 798-868 |
| | | | | | 958-1095 |
| | | | | | 1196-1260 |
| | | | | | 1465-1577 |
| | | | | | 1652-1732 |
| | | | | | 2256-3158 |
| | | | | | 4031-4899 |
| | | | | | 4984-5306 |
| | | | | | 5735-6066 |
| | | | | | 6554-6694 |
| | | | | | 6780-6970 |
| | | | | | 7107-7232 |
| | | | | | 7316-7404 |
| | | | | | 7529-7643 |
| | | | | | 7744-7917 |
| | | | | | 8401-8592 |
| | | | | | 8675-8813 |
| | | | | | 9685-9920 |
| | | | | | 9958-10211 |
| | | | | | 10485-11014 |
| | | | | | 11088-11199 |
| | | | | | 11958-15576 |
| | | | | | 16324-16465 |
| | | | | | 16587-16818 |
| | | | | | 16939-17000 |
| | | | | | 17440-17554 |
| | | | | | 17558-17946 |
| | | | | | 18645-18765 |
| | | | | | 19015-19378 |
| | | | | | 20522-20937 |
| | | | | | 22111-22452 |
| HUFCI64 | 411 | 911558 | AC004151 | 1488 | 1-134 |
| HWAFT84 | 412 | 911559 | AC004151 | 1489 | 1-145 |
| | | | | | 359-443 |
| | | | | | 527-599 |
| | | | | | 798-868 |
| | | | | | 958-1095 |
| | | | | | 1196-1260 |
| | | | | | 1465-1577 |
| | | | | | 1652-1732 |
| | | | | | 2256-3158 |
| | | | | | 4031-4899 |
| | | | | | 4984-5306 |
| | | | | | 5735-6066 |
| | | | | | 6554-6694 |
| | | | | | 6780-6970 |
| | | | | | 7107-7232 |
| | | | | | 7316-7404 |
| | | | | | 7529-7643 |
| | | | | | 7744-7917 |
| | | | | | 8401-8592 |
| | | | | | 8675-8813 |
| | | | | | 9685-9920 |
| | | | | | 9958-10211 |
| | | | | | 10485-11014 |
| | | | | | 11088-11199 |
| | | | | | 11958-15576 |
| | | | | | 16324-16465 |
| | | | | | 16587-16818 |
| | | | | | 16939-17000 |
| | | | | | 17440-17554 |
| | | | | | 17558-17946 |
| | | | | | 18645-18765 |
| | | | | | 19015-19378 |
| | | | | | 20522-20937 |
| | | | | | 22111-22452 |
| HWAFT84 | 412 | 911559 | AC004151 | 1490 | 1-134 |
| HWADR60 | 416 | 926487 | AC023176 | 1491 | 1-178 |
| | | | | | 293-506 |
| | | | | | 542-940 |
| | | | | | 1591-2005 |
| | | | | | 2031-2104 |
| | | | | | 2390-2509 |
| | | | | | 3681-3797 |
| | | | | | 4018-4165 |
| | | | | | 4267-4381 |
| | | | | | 4704-4736 |
| HWADR60 | 416 | 926487 | AC023176 | 1492 | 1-162 |
| | | | | | 443-739 |
| | | | | | 1067-1458 |
| | | | | | 1745-1877 |
| | | | | | 1976-2119 |
| | | | | | 2816-2883 |
| | | | | | 3171-3294 |
| | | | | | 3727-4154 |
| | | | | | 4340-4442 |
| | | | | | 5251-6126 |
| | | | | | 6708-7176 |
| | | | | | 7418-7880 |
| | | | | | 8134-8752 |
| | | | | | 9979-10164 |
| | | | | | 11234-11413 |
| | | | | | 12532-12666 |
| | | | | | 13313-13459 |
| | | | | | 14761-14898 |
| | | | | | 15208-15308 |
| | | | | | 16207-16518 |
| HPCIG66 | 419 | 930886 | AC024888 | 1493 | 1-36 |
| | | | | | 149-234 |
| | | | | | 537-623 |
| | | | | | 852-921 |
| | | | | | 1077-1728 |
| HPCIG66 | 419 | 930886 | AC024888 | 1494 | 1-61 |
| | | | | | 133-210 |
| | | | | | 992-1107 |
| | | | | | 1310-1644 |
| | | | | | 1834-1905 |
| | | | | | 2133-2254 |
| | | | | | 2927-3032 |
| | | | | | 4154-4254 |
| | | | | | 4482-4683 |
| HPCIG66 | 419 | 930886 | AC024888 | 1495 | 1-63 |
| | | | | | 239-327 |
| | | | | | 574-1064 |
| | | | | | 1763-2190 |
| | | | | | 2394-2604 |
| | | | | | 2659-2795 |
| | | | | | 3452-4040 |
| | | | | | 5967-6046 |
| | | | | | 6187-6254 |
| HCRPU72 | 420 | 931140 | AC023151 | 1496 | 1-65 |
| | | | | | 721-1042 |
| HE9RT95 | 421 | 934556 | AC008439 | 1497 | 1-57 |
| | | | | | 311-418 |
| | | | | | 1581-1904 |
| | | | | | 2176-2322 |
| | | | | | 2625-2690 |
| | | | | | 3445-3950 |
| | | | | | 5254-5425 |
| | | | | | 5466-5980 |
| | | | | | 6002-6037 |
| | | | | | 6169-6228 |
| | | | | | 6339-6480 |
| | | | | | 6701-6739 |
| | | | | | 7238-7349 |
| | | | | | 7664-8821 |
| HE9RT95 | 421 | 934556 | AC022420 | 1498 | 1-323 |
| | | | | | 1372-1431 |
| | | | | | 1657-1821 |
| | | | | | 2377-2485 |
| | | | | | 4488-4700 |
| | | | | | 4954-5061 |
| | | | | | 6224-6547 |
| | | | | | 6819-6965 |
| | | | | | 7268-7333 |
| | | | | | 8088-8593 |
| | | | | | 9897-10068 |
| | | | | | 10109-10623 |
| | | | | | 10645-10680 |
| | | | | | 10812-10871 |
| | | | | | 10982-11123 |
| | | | | | 11345-11383 |
| | | | | | 11877-12000 |
| | | | | | 12310-13467 |
| HE9RT95 | 421 | 934556 | AC022420 | 1499 | 1-389 |
| HE9RT95 | 421 | 934556 | AC022420 | 1500 | 1-62 |
| | | | | | 295-403 |
| | | | | | 455-979 |
| | | | | | 1019-1061 |
| | | | | | 1466-1537 |
| | | | | | 1890-2030 |
| | | | | | 2114-2253 |
| | | | | | 2405-2467 |
| | | | | | 3328-4030 |
| | | | | | 4195-4291 |
| | | | | | 4697-5333 |
| | | | | | 5488-5653 |
| | | | | | 5816-6265 |
| | | | | | 6276-6404 |
| | | | | | 6478-6562 |
| | | | | | 6731-6850 |
| | | | | | 6982-7208 |
| | | | | | 7575-7678 |
| | | | | | 7732-8148 |
| | | | | | 8195-8864 |
| | | | | | 8885-9392 |
| | | | | | 9590-9721 |
| | | | | | 9859-10754 |
| | | | | | 10980-11014 |
| | | | | | 11126-12121 |
| HWADD57 | 426 | 943039 | AC011492 | 1501 | 1-303 |
| | | | | | 949-1648 |
| | | | | | 1913-2937 |
| | | | | | 3032-3231 |
| | | | | | 3325-3443 |
| | | | | | 4093-4485 |
| | | | | | 47774936 |
| | | | | | 5057-5548 |
| | | | | | 5650-5968 |
| HWADD57 | 426 | 943039 | AC011492 | 1502 | 1-50 |
| | | | | | 852-907 |
| | | | | | 988-1407 |
| | | | | | 1584-1839 |
| | | | | | 2455-2586 |
| | | | | | 2689-2787 |
| HFKHR40 | 431 | 952470 | AC018805 | 1503 | 1-525 |
| | | | | | 612-1372 |
| | | | | | 1476-1730 |
| | | | | | 1732-2155 |
| | | | | | 2345-2460 |
| | | | | | 2652-3025 |
| | | | | | 3157-3251 |
| | | | | | 3449-3540 |
| | | | | | 3680-3780 |
| | | | | | 3914-4131 |
| | | | | | 4215-4491 |
| | | | | | 4603-4741 |
| | | | | | 4913-4987 |
| | | | | | 5135-5190 |
| | | | | | 5435-5571 |
| | | | | | 5901-6011 |
| | | | | | 6309-6423 |
| | | | | | 6922-8294 |
| | | | | | 8370-8522 |
| HFKHR40 | 431 | 952470 | AC061707 | 1504 | 1-527 |
| | | | | | 614-1374 |
| | | | | | 1478-1732 |
| | | | | | 1734-2158 |
| | | | | | 2348-2463 |
| | | | | | 2655-3027 |
| | | | | | 3159-3253 |
| | | | | | 3451-3542 |
| | | | | | 3682-3782 |
| | | | | | 3916-4134 |
| | | | | | 4219-4495 |
| | | | | | 4607-4745 |
| | | | | | 4917-4991 |
| | | | | | 5139-5194 |
| | | | | | 5439-5575 |
| | | | | | 5905-6015 |
| | | | | | 6313-6427 |
| | | | | | 6926-9300 |
| | | | | | 9919-9960 |
| | | | | | 10029-10186 |
| | | | | | 11393-11624 |
| | | | | | 12094-12294 |
| | | | | | 13227-13375 |
| | | | | | 13690-13829 |
| | | | | | 13921-14010 |
| | | | | | 14362-14486 |
| HFKHR40 | 431 | 952470 | AC018805 | 1505 | 1-343 |
| | | | | | 700-770 |
| HFKHR40 | 431 | 952470 | AC061707 | 1506 | 1-343 |
| | | | | | 700-771 |
| HFKHR40 | 431 | 952470 | AC061707 | 1507 | 1-277 |
| HWLHF10 | 435 | 963422 | AC010545 | 1508 | 1-40 |
| | | | | | 1661-1891 |
| | | | | | 2119-2199 |
| | | | | | 5160-5349 |
| | | | | | 6239-6607 |
| | | | | | 7675-8566 |
| | | | | | 9450-9516 |
| | | | | | 9675-9752 |
| | | | | | 10110-10274 |
| | | | | | 14154-15055 |
| | | | | | 16384-16500 |
| | | | | | 17055-17139 |
| | | | | | 19941-20453 |
| | | | | | 20703-21216 |
| | | | | | 21806-21945 |
| | | | | | 23638-24171 |
| | | | | | 24527-24795 |
| | | | | | 25564-25656 |
| | | | | | 26644-26787 |
| | | | | | 27284-27438 |
| | | | | | 28354-28612 |
| | | | | | 29247-29591 |
| | | | | | 29597-30208 |
| | | | | | 32018-32539 |
| | | | | | 33187-33942 |
| HWLHF10 | 435 | 963422 | AC010545 | 1509 | 1-721 |
| HWLHF10 | 435 | 963422 | AC010545 | 1510 | 1-610 |
| | | | | | 675-1454 |
| | | | | | 1591-2267 |
| | | | | | 2801-3363 |

[0067] Table 1B summarizes additional polynucleotides encompassed by the invention (including cDNA clones related to the sequences (Clone ID NO:Z), contig sequences (contig identifier (Contig ID:) contig nucleotide sequence identifiers (SEQ ID NO:X)), and genomic sequences (SEQ ID NO:B). The first column provides a unique clone identifier, “Clone ID NO:Z”, for a cDNA clone related to each contig sequence. The second column provides the sequence identifier, “SEQ ID NO:X”, for each contig sequence. The third column provides a unique contig identifier, “Contig ID:” for each contig sequence. The fourth column, provides a BAC identifier “BAC ID NO:A” for the BAC clone referenced in the corresponding row of the table. The fifth column provides the nucleotide sequence identifier, “SEQ ID NO:B” for a fragment of the BAC clone identified in column four of the corresponding row of the table. The sixth column, “Exon From-To”, provides the location (i.e., nucleotide position numbers) within the polynucleotide sequence of SEQ ID NO:B which delineate certain polynucleotides of the invention that are also exemplary members of polynucleotide sequences that encode polypeptides of the invention (e.g., polypeptides containing amino acid sequences encoded by the polynucleotide sequences delineated in column six, and fragments and variants thereof).

TABLE 2

| | | SEQ | | | | Score/ | | |
|---|---|---|---|---|---|---|---|---|
| Clone ID | Contig | ID | Analysis | | PFam/NR Accession | Percent | | |
| NO:Z | ID: | NO:X | Method | PFam/NR Description | Number | Identity | NT From | NT To |
| HDPTE21 | 1165861 | 11 | blastx.14 | (AB018414) Gab2 [Mus | gi\|4589377\|dbj\|BAA7 | 74% | 51 | 227 |
| | | | | musculus] | 6738.1\| | 50% | 246 | 416 |
| | | | | | | 55% | 1650 | 1784 |
| | | | | | | 65% | 1344 | 1421 |
| | | | | | | 68% | 1620 | 1667 |
| | | | | | | 69% | 1188 | 1226 |
| | | | | | | 66% | 1260 | 1295 |
| | | | | | | 39% | 1527 | 1595 |
| | | | | | | 32% | 1017 | 1100 |
| | | | | | | 45% | 1182 | 1241 |
| | | | | | | 36% | 1528 | 1584 |
| | | | | | | 34% | 2907 | 2984 |
| HDPTE21 | 887711 | 443 | HMMER | PFAM: PH domain | PF00169 | 25.2 | 31 | 129 |
| | | | 2.1.1 | | | | | |
| H6EDR51 | 930788 | 445 | HMMER | PFAM: PH domain | PF00169 | 80.9 | 664 | 951 |
| | | | 2.1.1 | | | | | |
| | | | blastx.2 | (AF053974) SWAP-70 | gb\|AAC40155.1\| | 53% | 19 | 996 |
| | | | | [Mus musculus] | | 57% | 1291 | 1395 |
| | | | | | | 26% | 1464 | 1760 |
| | | | | | | 19% | 1566 | 1826 |
| | | | | | | 43% | 1199 | 1279 |
| | | | | | | 33% | 1214 | 1285 |
| HAPRA41 | 1154054 | 13 | blastx.14 | actin filament-associated | gi\|487418\|gb\|AAA18 | 82% | 53 | 1261 |
| | | | | protein [Gallus gallus] | 166.1\| | | | |
| HAPRA41 | 926285 | 446 | HMMER | PFAM: PH domain | PF00169 | 59.8 | 111 | 398 |
| | | | 2.1.1 | | | | | |
| | | | blastx.2 | actin filament-associated | gb\|AAA18166.1\| | 76% | 45 | 473 |
| | | | | protein [Gallus gallus] | | | | |
| HBXBI07 | 954118 | 447 | HMMER | PFAM: PH domain | PF00169 | 33.2 | 164 | 484 |
| | | | 2.1.1 | | | | | |
| | | | blastx.2 | (AF101054)PHR1 | gb\|AAF18572.1\|AF1 | 100% | 119 | 637 |
| | | | | isoform 2 [Homo sapiens] | 01054_1 | 92% | 684 | 722 |
| HBXCM38 | 910086 | 15 | HMMER | PFAM: Src homology | PF00018 | 55.89 | 1062 | 1232 |
| | | | 1.8 | domain 3 | | | | |
| | | | blastx.2 | unnamed protein product | emb\|CAB69447.1\| | 92% | 402 | 1316 |
| | | | | [unidentified] | | 87% | 13 | 396 |
| | | | | | | 77% | 1295 | 1348 |
| HCE3E50 | 961098 | 448 | HMMER | PFAM: PH (pleckstrin | PF00169 | 50.5 | 146 | 448 |
| | | | 1.8 | homology) domain | | | | |
| HCEQD04 | 1150868 | 17 | blastx.14 | (AF163255) adaptor | gi\|5733602\|gb\|AAD4 | 36% | 30 | 278 |
| | | | | protein DAPP1 [Mus | 9698.1\|AF163255_1 | | | |
| | | | | musculus] | | | | |
| HCEQD04 | 927873 | 449 | HMMER | PFAM: PH domain | PF00169 | 44.9 | 139 | 258 |
| | | | 2.1.1 | | | | | |
| | | | blastx.2 | (AF163255) adaptor | gb\|AAD49698.1\|AF1 | 37% | 7 | 270 |
| | | | | protein DAPP1 [Mus | 63255_1 | | | |
| | | | | musculus] | | | | |
| HDPHI92 | 909900 | 18 | HMMER | PFAM: RhoGAP domain | PF00620 | 235.1 | 888 | 1343 |
| | | | 2.1.1 | | | | | |
| | | | blastx.2 | racGAP [Dictyostelium | emb\|CAA71241.1\| | 37% | 825 | 1343 |
| | | | | discoideum] | | | | |
| HDPLT89 | 962403 | 19 | HMMER | PFAM: Src homology | PF00017 | 85.1 | 194 | 418 |
| | | | 2.1.1 | domain 2 | | | | |
| | | | blastx.2 | (AF163254) adaptor | gb\|AAD49697.1\|AF1 | 100% | 92 | 931 |
| | | | | protein DAPP1 [Homo | 63254_1 | | | |
| | | | | sapiens] | | | | |
| HDPSU48 | 1228284 | 20 | blastx.14 | hypothetical protein | pir\|T13601\|T13601 | 56% | 421 | 873 |
| | | | | 80H7.5 - fruit fly | | 72% | 243 | 485 |
| | | | | (Drosophila melanogaster) | | | | |
| HDPSU48 | 909949 | 450 | HMMER | PFAM: FYVE zinc finger | PF01363 | 101.5 | 668 | 868 |
| | | | 2.1.1 | | | | | |
| | | | blastx.2 | (AL031027) | emb\|CAA19842.1\| | 70% | 230 | 862 |
| | | | | /prediction=(method:““ge | | | | |
| | | | | nefinder””, 1 1 1 | | | | |
| | | | | PROTEIN)””, sp | | | | |
| HDPWE80 | 909916 | 21 | HMMER | PFAM: PH domain | PF00169 | 81.2 | 412 | 708 |
| | | | 2.1.1 | | | | | |
| | | | blastx.2 | (AF102854) membrane- | gb\|AAD04568.1\| | 36% | 349 | 756 |
| | | | | associated guanylate | | | | |
| | | | | kinase-interacting protein | | | | |
| | | | | 2 Maguin-2 [Rattus | | | | |
| | | | | norvegicus] | | | | |
| HDQFY84 | 971615 | 451 | HMMER | PFAM: PH domain | PF00169 | 52.1 | 1232 | 1507 |
| | | | 2.1.1 | | | | | |
| HEONQ19 | 930705 | 23 | HMMER | PFAM: PH domain | PF00169 | 42.5 | 213 | 533 |
| | | | 2.1.1 | | | | | |
| | | | blastx.2 | (AJ250425) Collybistin I | emb\|CAB65966.1\| | 96% | 9 | 629 |
| | | | | [Rattus norvegicus] | | | | |
| HFCBB56 | 910073 | 24 | HMMER | PFAM: EF hand | PF00036 | 23.95 | 431 | 514 |
| | | | 1.8 | | | | | |
| | | | blastx.2 | 1 -phosphatidylinositol- | pir\|S14113\|S14113 | 36% | 275 | 565 |
| | | | | 4,5-bisphosphate | | | | |
| | | | | phosphodiesterase 1 | | | | |
| HFKKZ94 | 926486 | 452 | HMMER | PFAM: PH domain | PF00169 | 55.3 | 226 | 558 |
| | | | 2.1.1 | | | | | |
| HHBGJ53 | 909912 | 453 | HMMER | PFAM: PH domain | PF00169 | 38.3 | 160 | 267 |
| | | | 2.1.1 | | | | | |
| HHFJF24 | 1212624 | 27 | blastx.14 | GUANINE | sp\|Q64096\|DBS_MO | 83% | 3 | 566 |
| | | | | NUCLEOTIDE | USE | 71% | 545 | 811 |
| | | | | EXCHANGE FACTOR | | 79% | 878 | 979 |
| | | | | DBS (DBLS BIG | | 23% | 512 | 613 |
| | | | | SISTER) (MCF2 | | | | |
| | | | | TRANSFORMING | | | | |
| | | | | SEQUENCE-LIKE | | | | |
| | | | | PROTEIN). | | | | |
| HHFJF24 | 910065 | 454 | HMMER | PFAM: PH (pleckstrin | PF00169 | 23.24 | 3 | 107 |
| | | | 1.8 | homology) domain | | | | |
| | | | blastx.2 | GUANINE | sp\|Q63406\|DBS_RA | 98% | 3 | 158 |
| | | | | NUCLEOTIDE | T | | | |
| | | | | EXCHANGE FACTOR | | | | |
| | | | | DBS (DBL'S BIG | | | | |
| | | | | SISTER) 1 | | | | |
| | | | | (FRAGMENT). | | | | |
| HHFMM10 | 1178801 | 28 | blastx.14 | putative [Rattus | gi\|397579\|emb\|CAA5 | 97% | 138 | 263 |
| | | | | norvegicus] | 2297.1\| | 91% | 503 | 613 |
| HHFMM10 | 962997 | 455 | HMMER | PFAM: PH domain | PF00169 | 42.9 | 251 | 487 |
| | | | 2.1.1 | | | | | |
| | | | blastx.2 | putative [Rattus | emb\|CAA52297.1\| | 95% | 131 | 493 |
| | | | | norvegicus] | | | | |
| HHPBA42 | 901921 | 29 | HMMER | PFAM: PH domain | PF00169 | 42.4 | 352 | 663 |
| | | | 2.1.1 | | | | | |
| | | | blastx.2 | mitogen inducible gene | emb\|CAA80852.1\| | 61% | 1 | 822 |
| | | | | mig-2 [Homo sapiens] | | | | |
| HHPSP89 | 910024 | 456 | HMMER | PFAM: PH domain | PF00169 | 62.3 | 562 | 855 |
| | | | 2.1.1 | | | | | |
| | | | blastx.2 | (AB023656) KIF1B-beta | dbj\|BAA75243.1\| | 87% | 118 | 906 |
| | | | | [Mus musculus] | | | | |
| HKABX13 | 1167182 | 31 | blastx.14 | (AK000790) unnamed | gi\|7021093\|dbj\|BAA9 | 98% | 97 | 480 |
| | | | | protein product [Homo | 1379.1\| | 57% | 589 | 786 |
| | | | | sapiens] | | | | |
| HKABX13 | 958656 | 457 | HMMER | PFAM: PH (pleckstrin | PF00169 | 51.8 | 104 | 424 |
| | | | 1.8 | homology) domain | | | | |
| | | | blastx.2 | (AK000790) unnamed | dbj\|BAA91379.1\| | 72% | 98 | 763 |
| | | | | protein product [Homo | | | | |
| | | | | sapiens] | | | | |
| HLTHG77 | 878592 | 458 | HMMER | PFAM: PH domain | PF00169 | 60.2 | 1254 | 1625 |
| | | | 2.1.1 | | | | | |
| | | | blastx.2 | (AK001472) unnamed | dbj\|BAA91711.1\| | 94% | 3 | 1676 |
| | | | | protein product [Homo | | | | |
| | | | | sapiens] | | | | |
| HLWBZ09 | 957912 | 459 | HMMER | PFAM: PH (pleckstrin | PF00169 | 21.29 | 145 | 417 |
| | | | 1.8 | homology) domain | | | | |
| HLWEH54 | 932133 | 460 | HMMER | PFAM: PH domain | PF00169 | 114.1 | 556 | 849 |
| | | | 2.1.1 | | | | | |
| HLYAA41 | 1188029 | 35 | blastx.14 | SecG [Dictyostelium | gi\|1688318\|gb\|AAB3 | 43% | 173 | 352 |
| | | | | discoideum] | 6958.1\| | | | |
| HLYAA41 | 909874 | 461 | HMMER | PFAM: PH domain | PF00169 | 37.3 | 162 | 260 |
| | | | 2.1.1 | | | | | |
| HLYDV62 | 1154065 | 36 | blastx.14 | SecG [Dictyostelium | gi\|1688318\|gb\|AAB3 | 43% | 173 | 352 |
| | | | | discoideum] | 6958.1\| | | | |
| HLYDV62 | 927872 | 462 | HMMER | PFAM: PH domain | PF00169 | 58.6 | 188 | 406 |
| | | | 2.1.1 | | | | | |
| | | | blastx.2 | (AC005496) unknown | gb\|AAC35236.1\| | 41% | 113 | 292 |
| | | | | protein [Arabidopsis | | 38% | 451 | 504 |
| | | | | thaliana] | | | | |
| HMCFB47 | 910088 | 463 | HMMER | PFAM: PH domain | PF00169 | 73 | 79 | 378 |
| | | | 2.1.1 | | | | | |
| | | | blastx.2 | (AB005903) AtPH1 | dbj\|BAA84651.1\| | 30% | 85 | 375 |
| | | | | [Arabidopsis thaliana] | | | | |
| HMSOI20 | 928168 | 464 | HMMER | PFAM: PH (pleckstrin | PF00169 | 18.44 | 154 | 384 |
| | | | 1.8 | homology) domain | | | | |
| HOENH55 | 1163460 | 39 | blastx.14 | p116Rip [Mus musculus] | gi\|1657837\|gb\|AAB1 | 95% | 343 | 624 |
| | | | | | 8198.1\| | 86% | 1 | 90 |
| | | | | | | 100% | 139 | 207 |
| | | | | | | 80% | 220 | 294 |
| | | | | | | 40% | 293 | 358 |
| HOENH55 | 922141 | 465 | HMMER | PFAM: PH domain | PF00169 | 50.5 | 406 | 621 |
| | | | 2.1.1 | | | | | |
| | | | blastx.2 | p116Rip [Mus musculus] | gb\|AAB18198.1\| | 76% | 1 | 624 |
| HPIAI01 | 1078178 | 40 | blastx.14 | unnamed protein product | gi\|4756912\|emb\|CAB | 36% | 213 | 437 |
| | | | | [unidentified] | 42323.1\| | 42% | 414 | 476 |
| | | | | | | 72% | 183 | 215 |
| HPIAI01 | 909928 | 466 | HMMER | PFAM: PH domain | PF00169 | 30.3 | 294 | 482 |
| | | | 2.1.1 | | | | | |
| | | | blastx.2 | unnamed protein product | emb\|CAB42187.1\| | 62% | 10 | 195 |
| | | | | [unidentified] | | | | |
| HPJCT50 | 919836 | 467 | HMMER | PFAM: PH domain | PF00169 | 81.4 | 728 | 1015 |
| | | | 2.1.1 | | | | | |
| | | | blastx.2 | (AF210818) SWAP-70 | gb\|AAF24486.1\|AF2 | 85% | 98 | 1453 |
| | | | | [Homo sapiens] | 10818_1 | | | |
| HPMFE91 | 1164740 | 42 | blastx.14 | (AF136450) goodpasture | gi\|4835895\|gb\|AAD3 | 89% | 20 | 1129 |
| | | | | antigen-binding protein | 0288.1\|AF136450_1 | 97% | 1097 | 1813 |
| | | | | [Homo sapiens] | | | | |
| HPMFE91 | 910026 | 468 | HMMER | PFAM: PH domain | PF00169 | 81.9 | 332 | 613 |
| | | | 2.1.1 | | | | | |
| | | | blastx.2 | (AF136450) goodpasture | gb\|AAD30288.1\|AF1 | 94% | 263 | 955 |
| | | | | antigen-binding protein | 36450_1 | | | |
| | | | | [Homo sapiens] | | | | |
| HRAED51 | 1090522 | 43 | blastx.14 | racGAP [Dictyostelium | gi\|2190355\|emb\|CAA | 40% | 363 | 569 |
| | | | | discoideum] | 71241.1\| | 48% | 195 | 305 |
| HRAED51 | 909859 | 469 | HMMER | PFAM: RhoGAP domain | PF00620 | 78.3 | 259 | 504 |
| | | | 2.1.1 | | | | | |
| | | | blastx.2 | beta-chimaerin [Rattus | gb\|AAA40809.1\| | 28% | 259 | 585 |
| | | | | norvegicus] | | | | |
| HSMBA19 | 924885 | 470 | HMMER | PFAM: PH domain | PF00169 | 34.3 | 289 | 528 |
| | | | 2.1.1 | | | | | |
| | | | blastx.2 | (AL096767) dJ579N16.2 | emb\|CAB63063.1\| | 49% | 4 | 531 |
| | | | | (SET binding factor 1) | | 76% | 533 | 607 |
| | | | | [Homo sapiens] | | | | |
| HSYCY88 | 914775 | 45 | HMMER | PFAM: PH domain | PF00169 | 34.6 | 811 | 966 |
| | | | 2.1.1 | | | | | |
| | | | blastx.2 | putative [Rattus | emb\|CAA52297.1\| | 97% | 607 | 966 |
| | | | | norvegicus] | | 63% | 21 | 437 |
| | | | | | | 88% | 425 | 532 |
| | | | | | | 50% | 962 | 1111 |
| | | | | | | 44% | 1041 | 1136 |
| HTEDW26 | 909749 | 46 | HMMER | PFAM: FYVE zinc finger | PF01363 | 88.9 | 321 | 521 |
| | | | 2.1.1 | | | | | |
| | | | blastx.2 | (AF038388) actin- | gb\|AAC27698.1\| | 89% | 57 | 959 |
| | | | | filament binding protein | | 51% | 1 | 81 |
| | | | | Frabin [Rattus norvegicus] | | | | |
| HTEKD92 | 1090524 | 47 | blastx.14 | (AK000074) unnamed | gi\|7019925\|dbj\|BAA9 | 87% | 482 | 1165 |
| | | | | protein product [Homo | 0927.1\| | | | |
| | | | | sapiens] | | | | |
| HTEKD92 | 910027 | 471 | HMMER | PFAM: PH domain | PF00169 | 54.1 | 252 | 530 |
| | | | 2.1.1 | | | | | |
| | | | blastx.2 | (AK000074) unnamed | dbj\|BAA90927.1\| | 87% | 468 | 1151 |
| | | | | protein product [Homo | | | | |
| | | | | sapiens] | | | | |
| HTLDT05 | 909752 | 472 | HMMER | PFAM: PH domain | PF00169 | 36.9 | 59 | 271 |
| | | | 2.1.1 | | | | | |
| | | | blastx.2 | (AK000004) FLJ00004 | dbj\|BAA92229.1\| | 77% | 47 | 487 |
| | | | | protein [Homo sapiens] | | | | |
| HTPDS90 | 529764 | 473 | HMMER | PFAM: PH domain | PF00169 | 65.3 | 132 | 440 |
| | | | 2.1.1 | | | | | |
| | | | blastx.2 | putative [Rattus | emb\|CAA52297.1\| | 79% | 75 | 458 |
| | | | | norvegicus] | | 65% | 2 | 58 |
| HTPHM71 | 1194698 | 50 | blastx.14 | CDNA FLJ20260 FIS, | sp\|BAA91043\|BAA9 | 62% | 61 | 348 |
| | | | | CLONE COLF7627. | 1043 | 70% | 1423 | 1659 |
| | | | | | | 42% | 520 | 675 |
| | | | | | | 59% | 1192 | 1287 |
| | | | | | | 47% | 700 | 762 |
| | | | | | | 23% | 889 | 1002 |
| | | | | | | 42% | 1054 | 1131 |
| | | | | | | 80% | 808 | 837 |
| | | | | | | 27% | 1552 | 1671 |
| | | | | | | 38% | 600 | 653 |
| HTPHM71 | 909878 | 474 | HMMER | PFAM: PH (pleckstrin | PF00169 | 38.8 | 57 | 341 |
| | | | 1.8 | homology) domain | | | | |
| | | | blastx.2 | (AK000267) unnamed | dbj\|BAA91043.1\| | 53% | 6 | 341 |
| | | | | protein product [Homo | | 31% | 711 | 929 |
| | | | | sapiens] | | 65% | 1139 | 1207 |
| | | | | | | 32% | 550 | 690 |
| | | | | | | 42% | 957 | 1034 |
| HUUAR12 | 944393 | 475 | HMMER | PFAM: PH domain | PF00169 | 63.5 | 69 | 359 |
| | | | 2.1.1 | | | | | |
| | | | blastx.2 | (AB008430) CDEP | dbj\|BAA24267.1\| | 45% | 3 | 677 |
| | | | | [Homo sapiens] | | | | |
| HWAGP22 | 1150195 | 52 | blastx.14 | (AL031027) | gi\|3292902\|emb\|CAA | 50% | 1653 | 1021 |
| | | | | /prediction=(method:““ge | 19842.1\| | | | |
| | | | | nefinder””, 1 1 1 | | | | |
| | | | | PROTEIN)””, sp | | | | |
| HWAGP22 | 909919 | 476 | HMMER | PFAM: FYVE zinc finger | PF01363 | 89.9 | 516 | 716 |
| | | | 2.1.1 | | | | | |
| | | | blastx.2 | (AL031027) | emb\|CAA19842.1\| | 50% | 78 | 710 |
| | | | | /prediction=(method:““ge | | | | |
| | | | | nefinder””, 1 1 1 | | | | |
| | | | | PROTEIN)””, sp | | | | |
| HWBCE37 | 906968 | 53 | HMMER | PFAM: PH (pleckstrin | PF00169 | 60.73 | 39 | 353 |
| | | | 1.8 | homology) domain | | | | |
| | | | blastx.2 | brain beta spectrin [Mus | gb\|AAC42040.1\| | 30% | 93 | 386 |
| | | | | musculus] | | | | |
| HWLFB60 | 1223499 | 54 | blastx.14 | CG1513 PROTEIN. | sp\|Q9V5D4\|Q9V5D4 | 64% | 1445 | 1924 |
| | | | | | | 72% | 1127 | 1459 |
| | | | | | | 66% | 2 | 355 |
| | | | | | | 33% | 1943 | 2218 |
| | | | | | | 52% | 518 | 580 |
| | | | | | | 24% | 1295 | 1393 |
| | | | | | | 38% | 89 | 142 |
| HWLFB60 | 910018 | 477 | HMMER | PFAM: PH domain | PF00169 | 43 | 8 | 241 |
| | | | 2.1.1 | | | | | |
| | | | blastx.2 | (AF000195) Contains | gb\|AAC24270.1\| | 63% | 14 | 241 |
| | | | | similarity to Pfam | | 33% | 238 | 414 |
| | | | | domain: PF00169 (PH), 1 | | | | |
| HDPGS16 | 909833 | 478 | HMMER | PFAM: Protein kinase C | PF00433 | 57.51 | 287 | 445 |
| | | | 1.8 | terminal domain | | | | |
| | | | blastx.2 | (AJ245709) Akt-3 protein | emb\|CAB53537.1\| | 100% | 236 | 460 |
| | | | | [Homo sapiens] | | 100% | 3 | 116 |
| HDQDV69 | 937850 | 56 | HMMER | PFAM: Eukaryotic protein | PF00069 | 212.5 | 68 | 598 |
| | | | 2.1.1 | kinase domain | | | | |
| | | | blastx.2 | (AF169035) protein | gb\|AAF12758.1\|AF1 | 98% | 68 | 829 |
| | | | | kinase [Homo sapiens] | 69035_1 | | | |
| HE6BK63 | 1153879 | 57 | blastx.14 | (AF128625) CDC42- | gi\|5006445\|gb\|AAD3 | 99% | 6 | 767 |
| | | | | binding protein kinase | 7506.1\|AF128625_1 | | | |
| | | | | beta [Homo sapiens] | | | | |
| HE6BK63 | 661045 | 480 | HMMER | PFAM: Protein kinase C | PF00433 | 21.1 | 679 | 765 |
| | | | 2.1.1 | terminal domain | | | | |
| | | | blastx.2 | (AF128625) CDC42- | gb\|AAD37506.1\|AF1 | 97% | 589 | 1179 |
| | | | | binding protein kinase | 28625_1 | 99% | 101 | 595 |
| | | | | beta [Homo sapiens] | | 23% | 862 | 1152 |
| | | | | | | 18% | 922 | 1140 |
| | | | | | | 25% | 937 | 1152 |
| | | | | | | 22% | 934 | 1170 |
| | | | | | | 22% | 904 | 1161 |
| HE6BK63 | 974253 | 481 | blastx.14 | (AF128625) CDC42- | gi\|5006445\|gb\|AAD3 | 99% | 2 | 328 |
| | | | | binding protein kinase | 7506.1\|AF128625_1 | 66% | 357 | 500 |
| | | | | beta [Homo sapiens] | | 100% | 502 | 570 |
| | | | | | | 22% | 137 | 325 |
| | | | | | | 100% | 330 | 362 |
| | | | | | | 55% | 325 | 378 |
| | | | | | | 32% | 242 | 325 |
| | | | | | | 53% | 523 | 561 |
| HFKDR14 | 974255 | 58 | HMMER | PFAM: Eukaryotic protein | PF00069 | 244.21 | 297 | 1097 |
| | | | 1.8 | kinase domain | | | | |
| | | | blastx.2 | (AF128625) CDC42- | gb\|AAD37506.1\|AF1 | 98% | 72 | 1733 |
| | | | | binding protein kinase | 28625_1 | 22% | 1572 | 1706 |
| | | | | beta [Homo sapiens] | | | | |
| HFPER82 | 1152249 | 59 | blastx.14 | (AC004877) sco-spondin- | gi\|3638957\|gb\|AAC3 | 68% | 137 | 90 |
| | | | | mucin-like; similar to | 6301.1\| | 34% | 227 | 123 |
| | | | | P98167 1 sapiens] | | 42% | 569 | 513 |
| | | | | | | 50% | 387 | 346 |
| | | | | | | 34% | 332 | 255 |
| | | | | | | 54% | 84 | 52 |
| HFPER82 | 909835 | 482 | HMMER | PFAM: Protein kinase C | PF00433 | 33.87 | 943 | 1047 |
| | | | 1.8 | terminal domain | | | | |
| | | | blastx.2 | human protein kinase B | emb\|CAA43372.1\| | 89% | 943 | 1053 |
| | | | | [Homo sapiens] | | | | |
| HAAAO58 | 1091088 | 60 | blastx.14 | (AF097887) Chp [Rattus | gi\|3806122\|gb\|AAC6 | 100% | 75 | 260 |
| | | | | norvegicus] | 9198.1\| | | | |
| HAAAO58 | 912622 | 483 | HMMER | PFAM: Ras family | PF00071 | 85.9 | 75 | 365 |
| | | | 2.1.1 | | | | | |
| | | | blastx.2 | (AF097887)Chp [Rattus | gb\|AAC69198.1\| | 98% | 75 | 467 |
| | | | | norvegicus] | | | | |
| HADFK69 | 1091937 | 61 | blastx.14 | (AF229839) kappa B-ras | gi\|7008402\|gb\|AAF34 | 91% | 207 | 752 |
| | | | | 1 [Homo sapiens] | 998.1\| | | | |
| HADFK69 | 912850 | 484 | HMMER | PFAM: Ras family | PF00071 | 85.8 | 109 | 573 |
| | | | 1.8 | (contains ATP/GTP | | | | |
| | | | | binding P-loop) | | | | |
| | | | blastx.2 | (AF229839) kappa B-ras | gb\|AAF34998.1\| | 90% | 49 | 543 |
| | | | | 1 [Homo sapiens] | | | | |
| HDPMO62 | 1152329 | 62 | blastx.14 | rab-related GTP-binding | gi\|1491714\|emb\|CAA | 38% | 303 | 596 |
| | | | | protein [Homo sapiens] | 68227.1\| | 64% | 145 | 303 |
| | | | | | | 50% | 31 | 96 |
| HDPMO62 | 912722 | 485 | HMMER | PFAM: Ras family | PF00071 | 132.39 | 127 | 432 |
| | | | 1.8 | (contains ATP/GTP | | | | |
| | | | | binding P-loop) | | | | |
| | | | blastx.2 | rab-related GTP-binding | emb\|CAA68227.1\| | 54% | 133 | 444 |
| | | | | protein [Homo sapiens] | | 57% | 20 | 76 |
| HDPMO85 | 912837 | 486 | HMMER | PFAM: Ras family | PF00071 | 75.28 | 162 | 668 |
| | | | 1.8 | (contains ATP/GTP | | | | |
| | | | | binding P-loop) | | | | |
| | | | blastx.2 | (AF229840) kappa B-ras | gb\|AAF34999.1\| | 92% | 147 | 719 |
| | | | | 2 [Homo sapiens] | | | | |
| HDPUY72 | 966153 | 487 | HMMER | PFAM: Ras family | PF00071 | 325.7 | 815 | 207 |
| | | | 2.1.1 | | | | | |
| | | | blastx.2 | (AF112206) ras-related | gb\|AAF17194.1\|AF1 | 100% | 851 | 219 |
| | | | | protein rab-14 [Homo | 12206_1 | | | |
| | | | | sapiens] | | | | |
| HDTJF87 | 1154640 | 65 | blastx.14 | GTP-binding protein | gi\|409166\|gb\|AAA34 | 96% | 99 | 254 |
| | | | | [Volvox carteri] | 253.1\| | | | |
| HDTJF87 | 907527 | 488 | HMMER | PFAM: Ras family | PF00071 | 198.2 | 110 | 394 |
| | | | 2.1.1 | | | | | |
| | | | blastx.2 | strong similarity to the | gb\|AAB52431.1\| | 97% | 89 | 394 |
| | | | | YPT1 sub-family of RAS | | 73% | 396 | 737 |
| | | | | proteins [Caenorhabditis | | | | |
| | | | | elegans] | | | | |
| HE8TB94 | 1178794 | 66 | blastx.14 | ras-like protein [Homo | gi\|190881\|gb\|AAA36 | 78% | 527 | 1075 |
| | | | | sapiens] | 547.1\| | 78% | 507 | 548 |
| HE8TB94 | 935935 | 489 | HMMER | PFAM: Ras family | PF00071 | 236.3 | 529 | 1104 |
| | | | 2.1.1 | | | | | |
| | | | blastx.2 | ras-like protein [Homo | gb\|AAA36547.1\| | 80% | 523 | 1101 |
| | | | | sapiens] | | | | |
| HE8UB55 | 912932 | 490 | HMMER | PFAM: Ras family | PF00071 | 271.56 | 197 | 676 |
| | | | 1.8 | (contains ATP/GTP | | | | |
| | | | | binding P-loop) | | | | |
| | | | blastx.2 | (AL049685) hypothetical | emb\|CAB41256.1\| | 89% | 185 | 688 |
| | | | | protein [Homo sapiens] | | | | |
| HEBGA65 | 1178633 | 68 | blastx.14 | Rab24 protein [Mus | gi\|438164\|emb\|CAA8 | 90% | 435 | 860 |
| | | | | musculus] | 0472.1\| | 94% | 1076 | 1252 |
| HEBGA65 | 912815 | 491 | HMMER | PFAM: Ras family | PF00071 | 176.38 | 451 | 939 |
| | | | 1.8 | (contains ATP/GTP | | | | |
| | | | | binding P-loop) | | | | |
| | | | blastx.2 | Rab24 protein [Mus | emb\|CAA80472.1\| | 92% | 442 | 1035 |
| | | | | musculus] | | | | |
| HEGBB59 | 1197907 | 69 | blastx.14 | RAS-LIKE PROTEIN | sp\|P03967\|RASD_DI | 47% | 671 | 928 |
| | | | | RASD | CDI | 57% | 497 | 679 |
| | | | | (TRANSFORMING | | 53% | 944 | 988 |
| | | | | PROTEIN P23). | | | | |
| HEGBB59 | 912601 | 492 | HMMER | PFAM: Ras family | PF00071 | 75.96 | 370 | 546 |
| | | | 1.8 | (contains ATP/GTP | | | | |
| | | | | binding P-loop) | | | | |
| | | | blastx.2 | ras protein [Suberites | emb\|CAA77070.1\| | 53% | 364 | 594 |
| | | | | domuncula] | | | | |
| HELHC48 | 956003 | 70 | HMMER | PFAM: Ras family | PF00071 | 156.24 | 756 | 403 |
| | | | 1.8 | (contains ATP/GTP | | | | |
| | | | | binding P-loop) | | | | |
| | | | blastx.2 | (AF106681) ras-related | gb\|AAD43034.1\| | 96% | 756 | 403 |
| | | | | GTP-binding protein | | 76% | 817 | 767 |
| | | | | [Homo sapiens] | | | | |
| HEOQH90 | 1212646 | 71 | blastx.14 | GTPase Rab37. | sp\|AAF67162\|AAF67 | 93% | 12 | 680 |
| | | | | | 162 | | | |
| HEOQH90 | 907532 | 493 | HMMER | PFAM: Ras family | PF00071 | 305.73 | 88 | 666 |
| | | | 1.8 | (contains ATP/GTP | | | | |
| | | | | binding P-loop) | | | | |
| | | | blastx.2 | (AB027137) RAB-26 | dbj\|BAA84707.1\| | 72% | 94 | 657 |
| | | | | [Homo sapiens] | | | | |
| HFKHA18 | 1152242 | 72 | blastx.14 | (AF058807) GTP-binding | gi\|4587775\|gb\|AAD2 | 97% | 94 | 426 |
| | | | | protein rah [Bos taurus] | 5874.1\| | 95% | 427 | 690 |
| HFKHA18 | 972414 | 494 | HMMER | PFAM: Ras family | PF00071 | 142.21 | 91 | 408 |
| | | | 1.8 | (contains ATP/GTP | | | | |
| | | | | binding P-loop) | | | | |
| | | | blastx.2 | (AF058807) GTP-binding | gb\|AAD25874.1\| | 97% | 88 | 420 |
| | | | | protein rah [Bos taurus] | | 93% | 409 | 684 |
| HFKMA10 | 964258 | 73 | HMMER | PFAM: Ras family | PF00071 | 254.6 | 254 | 721 |
| | | | 1.8 | (contains ATP/GTP | | | | |
| | | | | binding P-loop) | | | | |
| | | | blastx.2 | Rab22a protein [Canis | emb\|CAA80473.1\| | 99% | 242 | 724 |
| | | | | familiaris] | | | | |
| HHBFM91 | 1092116 | 74 | blastx.14 | (AF091035) GTP-binding | gi\|6002585\|gb\|AAF00 | 100% | 3 | 479 |
| | | | | protein RAB21 [Homo | 048.1\|AF091035_1 | | | |
| | | | | sapiens] | | | | |
| HHBFM91 | 912832 | 495 | HMMER | PFAM: Ras family | PF00071 | 86.13 | 2 | 340 |
| | | | 1.8 | (contains ATP/GTP | | | | |
| | | | | binding P-loop) | | | | |
| | | | blastx.2 | (AF091035) GTP-binding | gb\|AAF00048.1\|AF0 | 97% | 2 | 316 |
| | | | | protein RAB21 [Homo | 91035_1 | | | |
| | | | | sapiens] | | | | |
| HIBBF63 | 912715 | 75 | HMMER | PFAM: Ras family | PF00071 | 211.1 | 3 | 416 |
| | | | 2.1.1 | | | | | |
| | | | blastx.2 | (AB027137) RAB-26 | dbj\|BAA84707.1\| | 100% | 3 | 419 |
| | | | | [Homo sapiens] | | | | |
| HMCEI38 | 1134410 | 76 | blastx.14 | (AF081353) GTP-binding | gi\|3859936\|gb\|AAC7 | 81% | 229 | 594 |
| | | | | protein [Homo sapiens] | 2918.1\| | | | |
| HMCEI38 | 912580 | 496 | HMMER | PFAM: Ras family | PF00071 | 103.6 | 297 | 452 |
| | | | 2.1.1 | | | | | |
| | | | blastx.2 | (AF081353) GTP-binding | gb\|AAC72918.1\| | 81% | 228 | 593 |
| | | | | protein [Homo sapiens] | | | | |
| HMWJD68 | 1154790 | 77 | blastx.14 | (AK000254) unnamed | gi\|7020212\|dbj\|BAA9 | 98% | 54 | 614 |
| | | | | protein product [Homo | 1034.1\| | | | |
| | | | | sapiens] | | | | |
| HMWJD68 | 912628 | 497 | HMMER | PFAM: Ras family | PF00071 | 231.3 | 113 | 685 |
| | | | 2.1.1 | | | | | |
| | | | blastx.2 | (AK000254) unnamed | dbj\|BAA91034.1\| | 99% | 53 | 613 |
| | | | | protein product [Homo | | | | |
| | | | | sapiens] | | | | |
| HOEOL58 | 1078090 | 78 | blastx.14 | small GTP-binding | gi\|5107835\|gb\|AAC5 | 100% | 102 | 338 |
| | | | | protein Rab27b [Homo | 1194.2\| | | | |
| | | | | sapiens] | | | | |
| HOEOL58 | 912836 | 498 | HMMER | PFAM: Ras family | PF00071 | 150.75 | 3 | 407 |
| | | | 1.8 | (contains ATP/GTP | | | | |
| | | | | binding P-loop) | | | | |
| | | | blastx.2 | small GTP-binding | gb\|AAC51194.2\| | 97% | 3 | 407 |
| | | | | protein Rab27b [Homo | | | | |
| | | | | sapiens] | | | | |
| HRACA51 | 1162856 | 79 | blastx.14 | rab4b [Canis familiaris] | gi\|919\|emb\|CAA3980 | 100% | 54 | 677 |
| | | | | | 0.1\| | | | |
| HRACA51 | 912776 | 499 | HMMER | PFAM: Ras family | PF00071 | 310.6 | 55 | 666 |
| | | | 2.1.1 | | | | | |
| | | | blastx.2 | rab4b [Canis familiaris] | emb\|CAA39800.1\| | 100% | 43 | 666 |
| HSHAV32 | 912812 | 500 | HMMER | PFAM: Ras family | PF00071 | 242.77 | 192 | 872 |
| | | | 1.8 | (contains ATP/GTP | | | | |
| | | | | binding P-loop) | | | | |
| | | | blastx.2 | (AB034244) RAB23 | dbj\|BAA87324.1\| | 99% | 162 | 872 |
| | | | | protein [Homo sapiens] | | | | |
| HTPDE66 | 971281 | 81 | HMMER | PFAM: Ras family | PF00071 | 73.53 | 260 | 427 |
| | | | 1.8 | (contains ATP/GTP | | | | |
| | | | | binding P-loop) | | | | |
| | | | blastx.2 | small GTP-binding | gb\|AAA31261.1\| | 100% | 260 | 427 |
| | | | | protein [Oryctolagus | | 63% | 216 | 281 |
| | | | | cuniculus] | | | | |
| HTPDV73 | 997659 | 82 | blastx.14 | N-methyl-D-aspartate | gi\|286238\|dbj\|BAA02 | 66% | 39 | 74 |
| | | | | receptor subunit [Rattus | 500.1\| | 30% | 123 | 182 |
| | | | | rattus] | | 70% | 5 | 34 |
| | | | | | | 71% | 290 | 310 |
| | | | | | | 83% | 123 | 140 |
| | | | | | | 85% | 248 | 268 |
| | | | | | | 71% | 331 | 351 |
| HTPDV73 | 912947 | 501 | HMMER | PFAM: Ras family | PF00071 | 205.32 | 306 | 740 |
| | | | 1.8 | (contains ATP/GTP | | | | |
| | | | | binding P-loop) | | | | |
| | | | blastx.2 | (AL049685) hypothetical | emb\|CAB41256.1\| | 97% | 312 | 746 |
| | | | | protein [Homo sapiens] | | | | |
| HTPHE33 | 963658 | 502 | HMMER | PFAM: Ras family | PF00071 | 94.19 | 993 | 1433 |
| | | | 1.8 | (contains ATP/GTP | | | | |
| | | | | binding P-loop) | | | | |
| | | | blastx.2 | (AF095350) RAB-like | gb\|AAD51377.1\|AF0 | 83% | 993 | 1478 |
| | | | | protein2A [Homo | 95350_1 | 93% | 793 | 1014 |
| | | | | sapiens] | | | | |
| HUFDN58 | 1224609 | 84 | blastx.14 | RAS-LIKE PROTEIN | sp\|P03967\|RASD_DI | 47% | 664 | 921 |
| | | | | RASD | CDI | 57% | 490 | 672 |
| | | | | (TRANSFORMING | | 53% | 937 | 981 |
| | | | | PROTEIN P23). | | | | |
| HUFDN58 | 912929 | 503 | HMMER | PFAM: Ras family | PF00071 | 80.7 | 42 | 296 |
| | | | 2.1.1 | | | | | |
| | | | blastx.2 | ras-related protein | emb\|CAA78508.1\| | 43% | 3 | 299 |
| | | | | [Dictyostelium | | | | |
| | | | | discoideum] | | | | |
| HUVFX92 | 1225329 | 85 | blastx.14 | GTP-binding protein ypt1 | pir\|S30096\|S30096 | 88% | 54 | 308 |
| | | | | [similarity]- Neurospora | | | | |
| | | | | crassa | | | | |
| HUVFX92 | 912672 | 504 | HMMER | PFAM: Ras family | PF00071 | 161 | 81 | 278 |
| | | | 2.1.1 | | | | | |
| | | | blastx.2 | (AF101310) similar to | gb\|AAC69218.1\| | 100% | 54 | 275 |
| | | | | RAS-related proteins; | | | | |
| | | | | contains similarity 1 | | | | |
| HWAEG71 | 1182321 | 86 | blastx.14 | rab-related GTP-binding | gi\|206543\|gb\|AAA42 | 96% | 85 | 690 |
| | | | | protein [Rattus | 000.1\| | | | |
| | | | | norvegicus] | | | | |
| HWAEG71 | 931547 | 505 | HMMER | PFAM: Ras family | PF00071 | 147.95 | 116 | 475 |
| | | | 1.8 | (contains ATP/GTP | | | | |
| | | | | binding P-loop) | | | | |
| | | | blastx.2 | rab-related GTP-binding | gb\|AAA42000.1\| | 98% | 86 | 493 |
| | | | | protein [Rattus | | 80% | 477 | 569 |
| | | | | norvegicus] | | | | |
| HWAHD49 | 1228064 | 87 | blastx.14 | GTP-BINDING | sp\|Q9XS71\|Q9XS71 | 97% | 391 | 747 |
| | | | | PROTEIN RAH | | 94% | 742 | 1011 |
| | | | | (FRAGMENT). | | | | |
| HWAHD49 | 972413 | 506 | HMMER | PFAM: Ras family | PF00071 | 143.42 | 394 | 717 |
| | | | 1.8 | (contains ATP/GTP | | | | |
| | | | | binding P-loop) | | | | |
| | | | blastx.2 | LMW G-protein=low- | gb\|AAB20669.1\| | 95% | 391 | 720 |
| | | | | molecular-weight GTP- | | 76% | 726 | 764 |
| | | | | binding protein [mice, | | | | |
| | | | | HT4 neural cell line, | | | | |
| | | | | Peptide, 208 aa] [Mus sp.] | | | | |
| HWLGG31 | 1178825 | 88 | blastx.14 | RAB15 [Rattus | gi\|206537\|gb\|AAA41 | 92% | 81 | 716 |
| | | | | norvegicus] | 995.1\| | | | |
| HWLGG31 | 912581 | 507 | HMMER | PFAM: Ras family | PF00071 | 301.8 | 98 | 562 |
| | | | 2.1.1 | | | | | |
| | | | blastx.2 | RAB15 [Rattus | gb\|AAA41995.1\| | 90% | 71 | 562 |
| | | | | norvegicus] | | | | |
| HWLKF25 | 912842 | 508 | HMMER | PFAM: Ras family | PF00071 | 298.2 | 311 | 889 |
| | | | 2.1.1 | | | | | |
| | | | blastx.2 | (AB036693) RAB9-like | dbj\|BAA89542.1\| | 100% | 287 | 889 |
| | | | | protein [Homo sapiens] | | | | |
| H2CBH45 | 963811 | 90 | HMMER | PFAM: Src homology | PF00018 | 13 | 194 | 310 |
| | | | 1.8 | domain 3 | | | | |
| | | | blastx.2 | Kryn [Mus musculus] | dbj\|BAA19686.1\| | 85% | 2 | 373 |
| | | | | | | 79% | 381 | 467 |
| | | | | | | 87% | 460 | 483 |
| | | | | | | 70% | 131 | 160 |
| HAGDN53 | 895963 | 509 | HMMER | PFAM: Src homology | PF00018 | 22.95 | 270 | 335 |
| | | | 1.8 | domain 3 | | | | |
| | | | blastx.2 | coded for by C. elegans | gb\|AAA96115.1\| | 43% | 165 | 455 |
| | | | | cDNA yk34a9.5; coded | | 38% | 103 | 156 |
| | | | | for by C. elegans 1 | | | | |
| | | | | elegans] | | | | |
| HAMFM39 | 971347 | 92 | HMMER | PFAM: Src homology | PF00018 | 67.14 | 1136 | 1306 |
| | | | 1.8 | domain 3 | | | | |
| | | | blastx.2 | (AK001509) unnamed | dbj\|BAA91729.1\| | 59% | 4511 | 4017 |
| | | | | protein product [Homo | | | | |
| | | | | sapiens] | | | | |
| HBGQT03 | 908173 | 93 | HMMER | PFAM: SH3 domain | PF00018 | 68.5 | 615 | 785 |
| | | | 2.1.1 | | | | | |
| | | | blastx.2 | (AF130979) SH3 domain- | gb\|AAF04472.1\|AF1 | 93% | 3 | 791 |
| | | | | containing protein 6511 | 30979_1 | | | |
| | | | | [Homo sapiens] | | | | |
| HBGSJ13 | 1150790 | 94 | blastx.14 | ferrienterobactin receptor | gi\|1778500\|gb\|AAB4 | 93% | 729 | 1 |
| | | | | precursor [Escherichia | 0783.1\| | | | |
| | | | | coli] | | | | |
| HBGSJ13 | 878322 | 510 | HMMER | PFAM: Src homology | PF00018 | 4.07 | 445 | 510 |
| | | | 1.8 | domain 3 | | | | |
| | | | blastx.2 | ferrienterobactin receptor | gb\|AAB40783.1\| | 92% | 64 | 684 |
| | | | | precursor [Escherichia | | | | |
| | | | | coli] | | | | |
| HBIBQ89 | 909782 | 95 | HMMER | PFAM: SH3 domain | PF00018 | 49.7 | 212 | 376 |
| | | | 2.1.1 | | | | | |
| | | | blastx.2 | p115 [Homo sapiens] | emb\|CAA55394.1\| | 41% | 14 | 397 |
| HCECM90 | 945088 | 96 | HMMER | PFAM: Src homology | PF00018 | 53.06 | 392 | 568 |
| | | | 1.8 | domain 3 | | | | |
| HCEPH71 | 522739 | 97 | HMMER | PFAM: Src homology | PF00018 | 4.22 | 33 | 62 |
| | | | 1.8 | domain 3 | | | | |
| HCFMT57 | 1175204 | 98 | blastx.14 | (AF039571) peripheral | gi\|4104812\|gb\|AAD1 | 96% | 45 | 629 |
| | | | | benzodiazepine receptor | 1957.1\| | 74% | 702 | 887 |
| | | | | interacting protein; PBR- | | 100% | 887 | 979 |
| | | | | IP/PRAX1 [Homo | | 52% | 381 | 500 |
| | | | | sapiens] | | 44% | 381 | 461 |
| | | | | | | 55% | 327 | 386 |
| | | | | | | 28% | 161 | 319 |
| | | | | | | 50% | 744 | 803 |
| | | | | | | 58% | 780 | 830 |
| | | | | | | 35% | 160 | 243 |
| | | | | | | 34% | 1693 | 1770 |
| | | | | | | 47% | 468 | 518 |
| | | | | | | 55% | 190 | 243 |
| | | | | | | 58% | 795 | 830 |
| | | | | | | 42% | 622 | 684 |
| | | | | | | 29% | 73 | 153 |
| | | | | | | 42% | 607 | 663 |
| | | | | | | 35% | 54 | 137 |
| | | | | | | 36% | 643 | 717 |
| | | | | | | 31% | 631 | 717 |
| | | | | | | 25% | 136 | 231 |
| | | | | | | 38% | 111 | 188 |
| | | | | | | 28% | 114 | 230 |
| | | | | | | 28% | 144 | 227 |
| HCFMT57 | 765375 | 511 | HMMER | PFAM: Src homology | PF00018 | 14.55 | 107 | 3 |
| | | | 1.8 | domain 3 | | | | |
| | | | blastx.2 | (AF039571) peripheral | gb\|AAD11957.1\| | 96% | 377 | 3 |
| | | | | benzodiazepine receptor | | | | |
| | | | | interacting protein; PBR- | | | | |
| | | | | IP/PRAX1 [Homo | | | | |
| | | | | sapiens] | | | | |
| HCOMM05 | 1173146 | 99 | blastx.14 | epidermal growth factor | gi\|530823\|gb\|AAA62 | 44% | 456 | 722 |
| | | | | receptor kinase substrate | 280.1\| | 59% | 189 | 371 |
| | | | | [Homo sapiens] | | 46% | 723 | 851 |
| | | | | | | 23% | 54 | 233 |
| | | | | | | 36% | 126 | 191 |
| | | | | | | 63% | 1081 | 1113 |
| HCOMM05 | 925952 | 512 | HMMER | PFAM: Src homology | PF00018 | 59.48 | 178 | 342 |
| | | | 1.8 | domain 3 | | | | |
| | | | blastx.2 | epidermal growth factor | gb\|AAA62280.1\| | 46% | 445 | 840 |
| | | | | receptor kinase substrate | | 43% | 115 | 435 |
| | | | | [Homo sapiens] | | 23% | 43 | 222 |
| HCOOZ11 | 965306 | 100 | HMMER | PFAM: Src homology | PF00018 | 5.22 | 179 | 214 |
| | | | 1.8 | domain 3 | | | | |
| | | | blastx.2 | (AL022238) dJ1042K10.2 | emb\|CAA18266.1\| | 100% | 182 | 589 |
| | | | | (supported by | | | | |
| | | | | GENSCAN, FGENES and | | | | |
| | | | | GENEWISE) [Homo | | | | |
| | | | | sapiens] | | | | |
| HCWFF88 | 506577 | 101 | HMMER | PFAM: Src homology | PF00018 | 4.92 | 140 | 181 |
| | | | 1.8 | domain 3 | | | | |
| HDMAV01 | 911386 | 513 | HMMER | PFAM: Src homology | PF00018 | 52.13 | 264 | 413 |
| | | | 1.8 | domain 3 | | | | |
| | | | blastx.2 | unnamed protein product | emb\|CAB42388.1\| | 73% | 111 | 410 |
| | | | | [unidentified] | | 100% | 3 | 116 |
| HDPDA47 | 929193 | 103 | HMMER | PFAM: Src homology | PF00018 | 12.52 | 691 | 810 |
| | | | 1.8 | domain 3 | | | | |
| | | | blastx.2 | (AL049683) hypothetical | emb\|CAB41255.1\| | 69% | 145 | 1026 |
| | | | | protein [Homo sapiens] | | 53% | 945 | 1022 |
| HDPFF24 | 909232 | 104 | HMMER | PFAM: KRAB box | PF01352 | 121.3 | 158 | 349 |
| | | | 2.1.1 | | | | | |
| | | | blastx.2 | (AC007228) R31665_2 | gb\|AAD23606.1\|AC0 | 50% | 158 | 457 |
| | | | | [AA1-673] [Homo | 07228_1 | | | |
| | | | | sapiens] | | | | |
| HDPPO35 | 966248 | 105 | HMMER | PFAM: Src homology | PF00018 | 14.07 | 600 | 749 |
| | | | 1.8 | domain 3 | | | | |
| | | | blastx.2 | (AL049683) hypothetical | emb\|CAB41255.1\| | 39% | 84 | 1148 |
| | | | | protein [Homo sapiens] | | | | |
| HDPSR74 | 911396 | 106 | HMMER | PFAM: Src homology | PF00018 | 47.19 | 293 | 460 |
| | | | 1.8 | domain 3 | | | | |
| | | | blastx.2 | (AF104246) enhancer of | gb\|AAD11795.1\| | 48% | 281 | 553 |
| | | | | filamentation 1 homolog | | | | |
| | | | | [Gallus gallus] | | | | |
| HDTKQ14 | 886936 | 107 | HMMER | PFAM: Src homology | PF00018 | 12.87 | 430 | 546 |
| | | | 1.8 | domain 3 | | | | |
| | | | blastx.2 | (AL049683) hypothetical | emb\|CAB41255.1\| | 100% | 439 | 555 |
| | | | | protein [Homo sapiens] | | 56% | 76 | 291 |
| HE6GF02 | 1150897 | 108 | blastx.14 | (AJ007012) Fish protein | gi\|3702174\|emb\|CAA | 75% | 795 | 613 |
| | | | | [Mus musculus] | 07416.1\| | 66% | 603 | 427 |
| | | | | | | 70% | 189 | 70 |
| | | | | | | 39% | 603 | 430 |
| | | | | | | 40% | 804 | 613 |
| | | | | | | 38% | 792 | 637 |
| | | | | | | 39% | 795 | 637 |
| | | | | | | 41% | 600 | 427 |
| | | | | | | 38% | 582 | 433 |
| | | | | | | 37% | 552 | 481 |
| | | | | | | 37% | 150 | 70 |
| | | | | | | 50% | 532 | 485 |
| | | | | | | 54% | 459 | 427 |
| HE6GF02 | 911263 | 514 | HMMER | PFAM: Src homology | PF00018 | 51.15 | 10 | 174 |
| | | | 1.8 | domain 3 | | | | |
| | | | blastx.2 | (AJ007012) Fish protein | emb\|CAA07416.1\| | 77% | 10 | 186 |
| | | | | [Mus musculus] | | 44% | 201 | 275 |
| HE8PK12 | 909884 | 109 | HMMER | PFAM: Src homology | PF00018 | 58.12 | 197 | 361 |
| | | | 1.8 | domain 3 | | | | |
| | | | blastx.2 | (AF136380) SH3P12 | gb\|AAD27647.1\|AF1 | 82% | 59 | 367 |
| | | | | protein [Homo sapiens] | 36380_1 | | | |
| HE9SE62 | 911476 | 110 | HMMER | PFAM: Src homology | PF00018 | 47.65 | 268 | 435 |
| | | | 1.8 | domain 3 | | | | |
| | | | blastx.2 | (AK000007) FLJ00007 | dbj\|BAA92232.1\| | 43% | 4 | 435 |
| | | | | protein [Homo sapiens] | | 64% | 877 | 927 |
| HEOPL36 | 968826 | 515 | HMMER | PFAM: Src homology | PF00018 | 79.81 | 316 | 483 |
| | | | 1.8 | domain 3 | | | | |
| | | | blastx.2 | (AL049758) dJ437M21.3 | emb\|CAB51395.1\| | 99% | 178 | 486 |
| | | | | (protein kinase C and | | | | |
| | | | | casein kinase substrate in | | | | |
| | | | | neurons 2) [Homo | | | | |
| | | | | sapiens] | | | | |
| HFBDJ13 | 911264 | 112 | HMMER | PFAM: SH3 domain | PF00018 | 78.6 | 105 | 269 |
| | | | 2.1.1 | | | | | |
| | | | blastx.2 | (AF030131) Plenty of | gb\|AAC40070.1\| | 78% | 3 | 473 |
| | | | | SH3s; POSH [Mus | | | | |
| | | | | musculus] | | | | |
| HFTDF15 | 657020 | 113 | HMMER | PFAM: Src homology | PF00018 | 4.85 | 168 | 203 |
| | | | 1.8 | domain 3 | | | | |
| HHEQV39 | 932851 | 114 | HMMER | PFAM: Src homology | PF00018 | 30.41 | 526 | 708 |
| | | | 1.8 | domain 3 | | | | |
| HHFCK09 | 965304 | 115 | HMMER | PFAM: TBC domain | PF00566 | 179.1 | 2305 | 1655 |
| | | | 2.1.1 | | | | | |
| | | | blastx.2 | (AL022238) dJ1042K10.2 | emb\|CAA18266.1\| | 97% | 2635 | 1268 |
| | | | | (supported by | | 98% | 1276 | 389 |
| | | | | GENSCAN, FGENES and | | | | |
| | | | | GENEWISE) [Homo | | | | |
| | | | | sapiens] | | | | |
| HISDS62 | 935932 | 116 | HMMER | PFAM: RhoGEF domain | PF00621 | 51.3 | 229 | 486 |
| | | | 2.1.1 | | | | | |
| | | | blastx.2 | (AJ250425) Collybistin I | emb\|CAB65966.1\| | 96% | 1 | 483 |
| | | | | [Rattus norvegicus] | | | | |
| HLQDT35 | 839777 | 117 | HMMER | PFAM: Src homology | PF00018 | 3.85 | 342 | 419 |
| | | | 1.8 | domain 3 | | | | |
| | | | blastx.2 | (AK000579) unnamed | dbj\|BAA91269.1\| | 98% | 252 | 458 |
| | | | | protein product [Homo | | | | |
| | | | | sapiens] | | | | |
| HLWFN63 | 908437 | 118 | HMMER | PFAM: Src homology | PF00018 | 12.81 | 515 | 664 |
| | | | 1.8 | domain 3 | | | | |
| | | | blastx.2 | (AL049683) hypothetical | emb\|CAB41255.1\| | 44% | 464 | 1024 |
| | | | | protein [Homo sapiens] | | | | |
| HMEFT66 | 856149 | 119 | HMMER | PFAM: Src homology | PF00018 | 28.51 | 5 | 136 |
| | | | 1.8 | domain 3 | | | | |
| HMSCD15 | 918133 | 120 | HMMER | PFAM: Src homology | PF00018 | 41.06 | 453 | 599 |
| | | | 1.8 | domain 3 | | | | |
| | | | blastx.2 | (AK000975) unnamed | dbj\|BAA91451.1\| | 98% | 453 | 635 |
| | | | | protein product [Homo | | 29% | 387 | 479 |
| | | | | sapiens] | | 28% | 80 | 175 |
| HMSHO64 | 746582 | 121 | HMMER | PFAM: Src homology | PF00018 | 11.08 | 316 | 405 |
| | | | 1.8 | domain 3 | | | | |
| | | | blastx.2 | (AF030131) Plenty of | gb\|AAC40070.1\| | 47% | 1 | 411 |
| | | | | SH3s; POSH [Mus | | | | |
| | | | | musculus] | | | | |
| HMTAW83 | 911385 | 122 | HMMER | PFAM: Src homology | PF00018 | 76.18 | 1 | 159 |
| | | | 1.8 | domain 3 | | | | |
| | | | blastx.2 | (AF230904) c-Cbl- | gb\|AAF37854.1\|AF2 | 94% | 1 | 354 |
| | | | | interacting protein [Homo | 30904_1 | 52% | 7 | 210 |
| | | | | sapiens] | | 48% | 7 | 168 |
| | | | | | | 61% | 298 | 351 |
| | | | | | | 75% | 425 | 460 |
| HMVAM09 | 963814 | 123 | HMMER | PFAM: Src homology | PF00018 | 4.79 | 728 | 802 |
| | | | 1.8 | domain 3 | | | | |
| | | | blastx.2 | (AK001580) unnamed | dbj\|BAA91769.1\| | 96% | 20 | 802 |
| | | | | protein product [Homo | | | | |
| | | | | sapiens] | | | | |
| HNSAA28 | 946988 | 124 | HMMER | PFAM: SH3 domain | PF00018 | 149 | 757 | 915 |
| | | | 2.1.1 | | | | | |
| | | | blastx.2 | (AF146277) adapter | gb\|AAD34595.1\|AF1 | 82% | 4 | 1554 |
| | | | | protein CMS [Homo | 46277_1 | | | |
| | | | | sapiens] | | | | |
| HNSAA28 | 972348 | 516 | blastx.14 | (AF146277) adapter | gi\|4960047\|gb\|AAD3 | 88% | 21 | 449 |
| | | | | protein CMS [Homo | 4595.1\|AF146277_1 | | | |
| | | | | sapiens] | | | | |
| HOGEQ43 | 935465 | 517 | HMMER | PFAM: Src homology | PF00018 | 28.13 | 58 | 132 |
| | | | 1.8 | domain 3 | | | | |
| | | | blastx.2 | (AF132480) Ese2 protein | gb\|AAD19748.1\| | 93% | 37 | 132 |
| | | | | [Mus musculus] | | | | |
| HOUDH19 | 1150918 | 126 | blastx.14 | (AC007842) BC331191_1 | gi\|5080758\|gb\|AAD3 | 91% | 350 | 27 |
| | | | | [Homo sapiens] | 9268.1\|AC007842_3 | | | |
| HOUDH19 | 908588 | 518 | HMMER | PFAM: KRAB box | PF01352 | 169.7 | 241 | 429 |
| | | | 2.1.1 | | | | | |
| | | | blastx.2 | (AC007842) BC331191_1 | gb\|AAD39268.1\|AC0 | 91% | 226 | 549 |
| | | | | [Homo sapiens] | 07842_3 | | | |
| HOUFT36 | 911293 | 127 | HMMER | PFAM: PDZ domain | PF00595 | 35.3 | 322 | 558 |
| | | | 2.1.1 | (Also known as DHR or | | | | |
| | | | | GLGF). | | | | |
| | | | blastx.2 | (AF162130) MAGUK | gb\|AAD45919.2\|AF1 | 91% | 196 | 846 |
| | | | | protein TEM-61 [Homo | 62130_1 | 98% | 23 | 193 |
| | | | | sapiens] | | | | |
| HPMFL08 | 959569 | 128 | HMMER | PFAM: Src homology | PF00018 | 4.97 | 209 | 238 |
| | | | 1.8 | domain 3 | | | | |
| HRSMD49 | 723025 | 129 | HMMER | PFAM: Src homology | PF00018 | 4.76 | 199 | 270 |
| | | | 1.8 | domain 3 | | | | |
| HSDII69 | 917180 | 130 | HMMER | PFAM: Src homology | PF00018 | 4.09 | 382 | 429 |
| | | | 1.8 | domain 3 | | | | |
| HSDSB06 | 949151 | 131 | HMMER | PFAM: SH3 domain | PF00018 | 249.3 | 483 | 647 |
| | | | 2.1.1 | | | | | |
| | | | blastx.2 | (AL133047) hypothetical | emb\|CAB61374.1\| | 98% | 3 | 863 |
| | | | | protein [Homo sapiens] | | 30% | 6 | 848 |
| | | | | | | 33% | 222 | 848 |
| HSFAM09 | 573345 | 519 | HMMER | PFAM: Src homology | PF00018 | 5.33 | 195 | 218 |
| | | | 1.8 | domain 3 | | | | |
| HSSAX53 | 507509 | 133 | HMMER | PFAM: Src homology | PF00018 | 4.36 | 266 | 331 |
| | | | 1.8 | domain 3 | | | | |
| HSVAW49 | 689674 | 520 | HMMER | PFAM: Src homology | PF00018 | 36.33 | 77 | 169 |
| | | | 1.8 | domain 3 | | | | |
| | | | blastx.2 | (AF146277) adapter | gb\|AAD34595.1\|AF1 | 97% | 65 | 166 |
| | | | | protein CMS [Homo | 46277_1 | | | |
| | | | | sapiens] | | | | |
| HTEAG49 | 954614 | 135 | HMMER | PFAM: Src homology | PF00018 | 4.51 | 312 | 238 |
| | | | 1.8 | domain 3 | | | | |
| HTLBH67 | 751985 | 136 | HMMER | PFAM: Src homology | PF00018 | 37.78 | 16 | 162 |
| | | | 1.8 | domain 3 | | | | |
| HTLJC71 | 922923 | 137 | HMMER | PFAM: Src homology | PF00018 | 9.14 | 1152 | 1340 |
| | | | 1.8 | domain 3 | | | | |
| | | | blastx.2 | (AL133030) hypothetical | emb\|CAB61362.1\| | 94% | 3 | 1355 |
| | | | | protein [Homo sapiens] | | | | |
| HTPAD46 | 503313 | 138 | HMMER | PFAM: Src homology | PF00018 | 4.14 | 160 | 186 |
| | | | 1.8 | domain 3 | | | | |
| HTTKP07 | 911390 | 139 | HMMER | PFAM: Src homology | PF00018 | 15.82 | 47 | 196 |
| | | | 1.8 | domain 3 | | | | |
| | | | blastx.2 | (AL049683) hypothetical | emb\|CAB41255.1\| | 51% | 8 | 289 |
| | | | | protein [Homo sapiens] | | 56% | 292 | 450 |
| HUCOW17 | 933357 | 140 | HMMER | PFAM: Src homology | PF00018 | 20.28 | 647 | 739 |
| | | | 1.8 | domain 3 | | | | |
| | | | blastx.2 | Graf protein [Homo | emb\|CAA71414.2\| | 67% | 1 | 261 |
| | | | | sapiens] | | 50% | 608 | 751 |
| | | | | | | 83% | 756 | 809 |
| | | | | | | 40% | 187 | 246 |
| HWHGF52 | 726102 | 141 | HMMER | PFAM: Src homology | PF00018 | 5.01 | 325 | 387 |
| | | | 1.8 | domain 3 | | | | |
| | | | blastx.2 | Dbs=Dbl guanine | gb\|AAB33461.1\| | 74% | 3 | 203 |
| | | | | nucleotide exchange | | 72% | 319 | 417 |
| | | | | factor homolog [mice, | | 73% | 203 | 259 |
| | | | | 32D 1 | | | | |
| HWHHB69 | 690442 | 521 | HMMER | PFAM: Src homology | PF00018 | 31.65 | 91 | 255 |
| | | | 1.8 | domain 3 | | | | |
| | | | blastx.2 | (AF178432) SH3 protein | gb\|AAF35985.1\|AF1 | 70% | 91 | 315 |
| | | | | [Homo sapiens] | 78432_1 | 100% | 303 | 329 |
| HWLFH94 | 1151387 | 143 | blastx.14 | (AK000265) unnamed | gi\|7020230\|dbj\|BAA9 | 41% | 545 | 345 |
| | | | | protein product [Homo | 1041.1\| | 53% | 689 | 594 |
| | | | | sapiens] | | 52% | 949 | 887 |
| HWLFH94 | 909682 | 522 | HMMER | PFAM: Src homology | PF00018 | 58.42 | 308 | 463 |
| | | | 1.8 | domain 3 | | | | |
| | | | blastx.2 | (AK000265) unnamed | dbj\|BAA91041.1\| | 40% | 215 | 535 |
| | | | | protein product [Homo | | | | |
| | | | | sapiens] | | | | |
| HWMBM13 | 909683 | 144 | HMMER | PFAM: Src homology | PF00018 | 59.64 | 126 | 281 |
| | | | 1.8 | domain 3 | | | | |
| | | | blastx.2 | Eps8 [Mus musculus] | gb\|AAA16358.1\| | 35% | 33 | 317 |
| | | | | | | 37% | 324 | 527 |
| HWWDN34 | 911357 | 145 | HMMER | PFAM: Src homology | PF00018 | 14.09 | 686 | 853 |
| | | | 1.8 | domain 3 | | | | |
| | | | blastx.2 | (AF053130) | gb\|AAC40124.1\| | 42% | 56 | 874 |
| | | | | unconventional myosin | | 66% | 788 | 868 |
| | | | | MYO15 [Mus musculus] | | | | |
| HCEML27 | 771667 | 523 | HMMER | PFAM: Src homology | PF00017 | 42.63 | 14 | 202 |
| | | | 1.8 | domain 2 | | | | |
| | | | blastx.2 | (AL049924) hypothetical | emb\|CAB43208.1\| | 88% | 2 | 322 |
| | | | | protein [Homo sapiens] | | | | |
| HELHJ69 | 1128924 | 147 | blastx.14 | (AF124251) SH2- | gi\|4704739\|gb\|AAD2 | 81% | 66 | 593 |
| | | | | containing protein Nsp3 | 8246.1\|AF124251_1 | 76% | 586 | 624 |
| | | | | [Homo sapiens] | | 52% | 590 | 640 |
| | | | | | | 60% | 55 | 99 |
| | | | | | | 63% | 612 | 644 |
| HELHJ69 | 911262 | 524 | HMMER | PFAM: Src homology | PF00017 | 72.59 | 241 | 483 |
| | | | 1.8 | domain 2 | | | | |
| | | | blastx.2 | (AF124251) SH2- | gb\|AAD28246.1\|AF1 | 78% | 67 | 645 |
| | | | | containing protein Nsp3 | 24251_1 | 76% | 587 | 625 |
| | | | | [Homo sapiens] | | 60% | 56 | 100 |
| HFKLA09 | 952634 | 525 | HMMER | PFAM: Src homology | PF00017 | 46.9 | 758 | 1036 |
| | | | 2.1.1 | domain 2 | | | | |
| HSBBF79 | 965764 | 149 | HMMER | PFAM: Src homology | PF00017 | 69.47 | 384 | 614 |
| | | | 1.8 | domain 2 | | | | |
| HSLKA77 | 911589 | 526 | HMMER | PFAM: Src homology | PF00017 | 37.25 | 301 | 405 |
| | | | 1.8 | domain 2 | | | | |
| | | | blastx.2 | tensin [Gallus gallus] | gb\|AAA49087.1\| | 58% | 178 | 432 |
| | | | | | | 51% | 29 | 115 |
| | | | | | | 31% | 3 | 155 |
| hagdr21 | 1090433 | 151 | blastx.14 | p66shc [Homo sapiens] | gi\|1899055\|gb\|AAB4 | 69% | 848 | 1150 |
| | | | | | 9972.1\| | 72% | 134 | 412 |
| | | | | | | 59% | 380 | 475 |
| | | | | | | 37% | 665 | 751 |
| | | | | | | 35% | 72 | 164 |
| | | | | | | 34% | 701 | 778 |
| hagdr21 | 1002124 | 527 | blastx.14 | MUS p66 Shc [Mus | gi\|1200456\|gb\|AAA9 | 91% | 62 | 268 |
| | | | | musculus] | 1777.1\| | | | |
| HHFNH27 | 1025277 | 152 | blastx.2 | collagen alpha 1(III) chain | pir\|S05272\|CGHU7L | 30% | 89 | 1609 |
| | | | | precursor - human | | 28% | 53 | 1606 |
| | | | | | | 30% | 1061 | 1741 |
| | | | | | | 32% | 1094 | 1606 |
| | | | | | | 32% | 956 | 1741 |
| | | | | | | 32% | 1094 | 1606 |
| | | | | | | 31% | 851 | 1735 |
| | | | | | | 30% | 830 | 1741 |
| | | | | | | 30% | 1073 | 1618 |
| | | | | | | 28% | 1094 | 1831 |
| | | | | | | 28% | 1022 | 1735 |
| | | | | | | 30% | 1088 | 1741 |
| | | | | | | 30% | 21 | 593 |
| | | | | | | 30% | 89 | 655 |
| | | | | | | 34% | 86 | 910 |
| | | | | | | 28% | 18 | 593 |
| | | | | | | 27% | 27 | 455 |
| | | | | | | 32% | 128 | 655 |
| | | | | | | 30% | 80 | 601 |
| | | | | | | 34% | 27 | 257 |
| | | | | | | 30% | 42 | 599 |
| | | | | | | 28% | 53 | 541 |
| | | | | | | 34% | 21 | 257 |
| | | | | | | 28% | 33 | 455 |
| | | | | | | 35% | 12 | 257 |
| | | | | | | 33% | 9 | 269 |
| | | | | | | 28% | 36 | 593 |
| | | | | | | 36% | 21 | 245 |
| | | | | | | 28% | 21 | 386 |
| | | | | | | 30% | 9 | 593 |
| | | | | | | 27% | 67 | 477 |
| | | | | | | 30% | 37 | 477 |
| | | | | | | 29% | 1746 | 289 |
| | | | | | | 31% | 1656 | 835 |
| | | | | | | 32% | 1848 | 952 |
| | | | | | | 29% | 1662 | 955 |
| | | | | | | 36% | 525 | 55 |
| | | | | | | 37% | 525 | 19 |
| | | | | | | 32% | 525 | 37 |
| | | | | | | 33% | 1659 | 1063 |
| | | | | | | 30% | 1656 | 1021 |
| | | | | | | 30% | 1644 | 958 |
| | | | | | | 32% | 642 | 64 |
| | | | | | | 34% | 534 | 85 |
| | | | | | | 33% | 592 | 11 |
| | | | | | | 30% | 654 | 7 |
| | | | | | | 39% | 226 | 8 |
| | | | | | | 28% | 598 | 2 |
| | | | | | | 30% | 648 | 85 |
| | | | | | | 41% | 229 | 11 |
| | | | | | | 30% | 589 | 17 |
| | | | | | | 37% | 211 | 11 |
| | | | | | | 34% | 226 | 23 |
| | | | | | | 33% | 250 | 11 |
| | | | | | | 35% | 226 | 23 |
| | | | | | | 43% | 190 | 11 |
| | | | | | | 36% | 259 | 41 |
| | | | | | | 44% | 125 | 45 |
| | | | | | | 52% | 128 | 72 |
| HTLIT05 | 1217625 | 153 | blastx.14 | CDNA FLJ10243 FIS, | sp\|BAA91505\|BAA9 | 49% | 213 | 584 |
| | | | | CLONE | 1505 | | | |
| | | | | HEMBB1000631, | | | | |
| | | | | WEAKLY SIMILAR TO | | | | |
| | | | | 1 | | | | |
| HTLIT05 | 1095161 | 528 | blastx.14 | (AK001105) unnamed | gi\|7022161\|dbj\|BAA9 | 49% | 212 | 577 |
| | | | | protein product [Homo | 1505.1\| | | | |
| | | | | sapiens] | | | | |
| HAPNV33 | 1151374 | 154 | blastx.14 | (AK001267) unnamed | gi\|7022415\|dbj\|BAA9 | 100% | 1 | 774 |
| | | | | protein product [Homo | 1590.1\| | | | |
| | | | | sapiens] | | | | |
| HAPNV33 | 947872 | 529 | HMMER | PFAM: ATPases | PF00004 | 120.31 | 61 | 450 |
| | | | 1.8 | associated with various | | | | |
| | | | | cellular activities (AAA) | | | | |
| | | | blastx.14 | (AF016427) Contains | gi\|2291232\|gb\|AAB6 | 53% | 1 | 447 |
| | | | | similarity to Pfam | 5351.1\| | | | |
| | | | | domain: 1 elegans] | | | | |
| HBTAE84 | 1128800 | 155 | blastx.14 | ATP-dependent Clp | gi\|1651401\|dbj\|BAA3 | 100% | 3 | 299 |
| | | | | protease ATP-binding | 5601.1\| | | | |
| | | | | subunit ClpA. | | | | |
| | | | | [Escherichia coli] | | | | |
| HBTAE84 | 781946 | 530 | HMMER | PFAM: ATPases | PF00004 | 20.81 | 122 | 122 |
| | | | 1.8 | associated with various | | | | |
| | | | | cellular activities (AAA) | | | | |
| HDPVY89 | 827026 | 156 | HMMER | PFAM: ATPases | PF00004 | 30.6 | 431 | 490 |
| | | | 2.1.1 | associated with various | | | | |
| | | | | cellular activities (AAA) | | | | |
| HGLDB21 | 455474 | 531 | HMMER | PFAM: ATPases | PF00004 | 19.89 | 12 | 80 |
| | | | 1.8 | associated with various | | | | |
| | | | | cellular activities (AAA) | | | | |
| HMIAN37 | 947881 | 158 | HMMER | PFAM: ATPases | PF00004 | 109 | 436 | 642 |
| | | | 2.1.1 | associated with various | | | | |
| | | | | cellular activities (AAA) | | | | |
| | | | blastx.2 | Similarity to Yeast MSP1 | emb\|CAA93516.1\| | 45% | 91 | 642 |
| | | | | protein (TAT-binding | | | | |
| | | | | homolog 4) | | | | |
| | | | | (SW:MSP1_YEAST) | | | | |
| | | | | [Caenorhabditis elegans] | | | | |
| HODAK55 | 745532 | 532 | HMMER | PFAM: ATPases | PF00004 | 60.69 | 11 | 157 |
| | | | 1.8 | associated with various | | | | |
| | | | | cellular activities (AAA) | | | | |
| HSLEI59 | 1128801 | 160 | blastx.14 | ATP-dependent Clp | gi\|1651401\|dbj\|BAA3 | 94% | 3 | 770 |
| | | | | protease ATP-binding | 5601.1 | | | |
| | | | | subunit ClpA. | | | | |
| | | | | [Escherichia coli] | | | | |
| HSLEI59 | 781945 | 533 | HMMER | PFAM: ATPases | PF00004 | 20.14 | 96 | 206 |
| | | | 1.8 | associated with various | | | | |
| | | | | cellular activities (AAA) | | | | |
| HSQFH29 | 1217061 | 161 | blastx.14 | SPAF. | sp\|Q9Z2K7\|Q9Z2K7 | 89% | 101 | 1723 |
| | | | | | | 52% | 5 | 208 |
| | | | | | | 36% | 854 | 961 |
| HSQFH29 | 967708 | 534 | HMMER | PFAM: ATPases | PF00004 | 97.36 | 193 | 393 |
| | | | 1.8 | associated with various | | | | |
| | | | | cellular activities (AAA) | | | | |
| | | | blastx.14 | (AF049099) SPAF [Mus | gi\|4105619\|gb\|AAD0 | 83% | 70 | 417 |
| | | | | musculus] | 2481.1\| | 43% | 76 | 414 |
| | | | | | | 76% | 408 | 470 |
| | | | | | | 61% | 3 | 41 |
| HTLEA35 | 1107230 | 162 | blastx.14 | (AK001571) unnamed | gi\|7022907\|dbj\|BAA9 | 100% | 3 | 479 |
| | | | | protein product [Homo | 1764.1\| | | | |
| | | | | sapiens] | | | | |
| HTLEA35 | 827028 | 535 | HMMER | PFAM: ATPases | PF00004 | 19.08 | 12 | 260 |
| | | | 1.8 | associated with various | | | | |
| | | | | cellular activities (AAA) | | | | |
| HUVGG63 | 969432 | 536 | HMMER | PFAM: ATPases | PF00004 | 332.15 | 621 | 1178 |
| | | | 1.8 | associated with various | | | | |
| | | | | cellular activities (AAA) | | | | |
| | | | blastx.14 | (AF159063) SKD1- | gi\|5732691\|gb\|AAD4 | 97% | 138 | 1448 |
| | | | | homolog [Homo sapiens] | 9227.1\|AF159063_1 | | | |
| HAGAX57 | 1150865 | 164 | blastx.14 | (AF176012) J domain | gi\|5815353\|gb\|AAD5 | 100% | 192 | 785 |
| | | | | containing protein 1 | 2650.1\|AF176012_1 | | | |
| | | | | isoform a [Homo sapiens] | | | | |
| HAGAX57 | 949211 | 537 | HMMER | PFAM: DnaJ, prokaryotic | PF00226 | 67.6 | 224 | 421 |
| | | | 1.8 | heat shock protein | | | | |
| | | | blastx.14 | (AF176012) J domain | gi\|5815353\|gb\|AAD5 | 100% | 185 | 778 |
| | | | | containing protein 1 | 2650.1\|AF176012_1 | | | |
| | | | | isoform a [Homo sapiens] | | | | |
| HAMGX15 | 1177932 | 165 | blastx.14 | (AL032657)predicted | gi\|3881075\|emb\|CAA | 64% | 335 | 565 |
| | | | | using Genefinder; similar | 21734.1\| | 52% | 560 | 667 |
| | | | | to 1 1 1 ES | | 66% | 665 | 736 |
| | | | | | | 32% | 623 | 733 |
| | | | | | | 45% | 674 | 733 |
| | | | | | | 26% | 626 | 751 |
| HAMGX15 | 908840 | 538 | HMMER | PFAM: DnaJ domain | PF00226 | 80.1 | 554 | 709 |
| | | | 2.1.1 | | | | | |
| | | | blastx.14 | (AL032657) predicted | gi\|3881075\|emb\|CAA | 51% | 506 | 715 |
| | | | | using Genefinder; similar | 21734.1\| | | | |
| | | | | to 1 1 1 ES | | | | |
| HAUBV06 | 1106041 | 166 | blastx.14 | similar to [SwissProt | gi\|1799806\|dbj\|BAA1 | 98% | 1164 | 2120 |
| | | | | Accession Number | 6264.1\| | 80% | 2104 | 2166 |
| | | | | P08409]; 1 | | | | |
| HAUBV06 | 596802 | 539 | HMMER | PFAM: DnaJ C terminal | PF01556 | 262.1 | 567 | 932 |
| | | | 2.1.1 | region | | | | |
| HAUBV06 | 929762 | 540 | HMMER | PFAM: DnaJ C terminal | PF01556 | 249.7 | 1650 | 1285 |
| | | | 2.1.1 | region | | | | |
| HBWCM62 | 908818 | 541 | HMMER | PFAM: DnaJ, prokaryotic | PF00226 | 97.9 | 37 | 243 |
| | | | 1.8 | heat shock protein | | | | |
| | | | blastx.14 | contains strong similarity | gi\|1707079\|gb\|AAB3 | 42% | 19 | 306 |
| | | | | to a DNAJ-like domain | 7835.1\| | | | |
| | | | | (PS:PS00636) | | | | |
| | | | | [Caenorhabditis elegans] | | | | |
| HCWFA35 | 1105672 | 168 | blastx.14 | Curved DNA-binding | gi\|1651491\|dbj\|BAA3 | 98% | 68 | 322 |
| | | | | protein cbpA [Escherichia | 6142.1\| | | | |
| | | | | coli] | | | | |
| HCWFA35 | 908820 | 542 | HMMER | PFAM: DnaJ, prokaryotic | PF00226 | 116.61 | 80 | 274 |
| | | | 1.8 | heat shock protein | | | | |
| | | | blastx.14 | Curved DNA-binding | gi\|1651491\|dbj\|BAA3 | 98% | 68 | 364 |
| | | | | protein cbpA [Escherichia | 6142.1\| | | | |
| | | | | coli] | | | | |
| HDACA35 | 1107236 | 169 | blastx.14 | (AK001496) unnamed | gi\|7022789\|dbj\|BAA9 | 76% | 71 | 904 |
| | | | | protein product [Homo | 1724.1\| | | | |
| | | | | sapiens] | | | | |
| HDACA35 | 908837 | 543 | HMMER | PFAM: DnaJ, prokaryotic | PF00226 | 65.68 | 68 | 229 |
| | | | 1.8 | heat shock protein | | | | |
| | | | blastx.14 | cysteine string protein | gi\|1232165\|emb\|CAA | 49% | 80 | 256 |
| | | | | [Bos taurus] | 63355.1\| | | | |
| HDQGM08 | 1151469 | 170 | blastx.14 | (AF176013) J domain | gi\|5815355\|gb\|AAD5 | 100% | 37 | 357 |
| | | | | containing protein 1 | 2651.1\|AF176013_1 | | | |
| | | | | isoform b [Homo sapiens] | | | | |
| HDQGM08 | 949210 | 544 | HMMER | PFAM: DnaJ, prokaryotic | PF00226 | 68.48 | 466 | 269 |
| | | | 1.8 | heat shock protein | | | | |
| | | | blastx.14 | (AF176013) J domain | gi\|5815355\|gb\|AAD5 | 100% | 505 | 185 |
| | | | | containing protein 1 | 2651.1\|AF176013_1 | | | |
| | | | | isoform b [Homo sapiens] | | | | |
| HELGB06 | 1148741 | 171 | blastx.14 | ORF-1 [Escherichia coli] | gi\|402674\|gb\|AAA18 | 100% | 248 | 3 |
| | | | | | 299.1\| | | | |
| HELGB06 | 935730 | 545 | HMMER | PFAM: DnaJ domain | PF00226 | 78.3 | 203 | 421 |
| | | | 2.1.1 | | | | | |
| | | | blastx.14 | ORF-1 [Escherichia coli] | gi\|402674\|gb\|AAA18 | 100% | 200 | 445 |
| | | | | | 299.1\| | | | |
| HEOPR74 | 908836 | 546 | HMMER | PFAM: DnaJ, prokaryotic | PF00226 | 88.67 | 65 | 262 |
| | | | 1.8 | heat shock protein | | | | |
| | | | blastx.14 | cysteine string protein | gi\|1232163\|emb\|CAA | 41% | 68 | 289 |
| | | | | [Bos taurus] | 63354.1\| | 50% | 457 | 492 |
| HIBEK35 | 731480 | 173 | HMMER | PFAM: DnaJ domain | PF00226 | 112.7 | 237 | 404 |
| | | | 2.1.1 | | | | | |
| HJMAR88 | 908839 | 547 | HMMER | PFAM: DnaJ domain | PF00226 | 42.7 | 57 | 149 |
| | | | 2.1.1 | | | | | |
| | | | blastx.14 | cysteine string protein 1 - | pir\|S70515\|570515 | 68% | 6 | 254 |
| | | | | human | | 100% | 1 | 60 |
| HMWGU56 | 908825 | 548 | HMMER | PFAM: DnaJ domain | PF00226 | 126.9 | 375 | 569 |
| | | | 2.1.1 | | | | | |
| | | | blastx.14 | Similarity to B. subtilis | gi\|3873707\|emb\|CAA | 59% | 327 | 587 |
| | | | | DNAJ protein 1 | 97416.1\| | 65% | 630 | 698 |
| | | | | [Caenorhabditis elegans] | | 34% | 51 | 200 |
| HOUDS09 | 1164010 | 176 | blastx.14 | (AK000034) unnamed | gi\|7019854\|dbj\|BAA9 | 66% | 240 | 659 |
| | | | | protein product [Homo | 0896.1\| | 35% | 729 | 1118 |
| | | | | sapiens] | | 45% | 96 | 167 |
| | | | | | | 32% | 174 | 248 |
| HOUDS09 | 949051 | 549 | HMMER | PFAM: DnaJ, prokaryotic | PF00226 | 98.53 | 310 | 504 |
| | | | 1.8 | heat shock protein | | | | |
| | | | blastx.2 | (AK000034) unnamed | dbj\|BAA90896.1\| | 53% | 37 | 888 |
| | | | | protein product [Homo | | 55% | 899 | 1033 |
| | | | | sapiens] | | 63% | 2 | 34 |
| HTEGM38 | 675087 | 177 | HMMER | PFAM: DnaJ domain | PF00226 | 65.2 | 93 | 197 |
| | | | 2.1.1 | | | | | |
| HTEKY82 | 908846 | 550 | HMMER | PFAM: DnaJ domain | PF00226 | 119.6 | 281 | 475 |
| | | | 2.1.1 | | | | | |
| | | | blastx.14 | Similarity to B. subtilis | gi\|3873707\|emb\|CAA | 53% | 236 | 502 |
| | | | | DNAJ protein 1 | 97416.1\| | | | |
| | | | | [Caenorhabditis elegans] | | | | |
| HTLCY54 | 1193550 | 179 | blastx.14 | MDJ6. | sp\|Q9QYI7\|Q9QYI7 | 94% | 239 | 460 |
| | | | | | | 81% | 796 | 927 |
| | | | | | | 81% | 484 | 597 |
| | | | | | | 73% | 610 | 699 |
| HTLCY54 | 908832 | 551 | HMMER | PFAM: DnaJ domain | PF00226 | 119.8 | 245 | 445 |
| | | | 2.1.1 | | | | | |
| | | | blastx.14 | (AB014888) MRJ [Homo | gi\|3402485\|dbj\|BAA3 | 67% | 239 | 616 |
| | | | | sapiens] | 2209.1\| | 78% | 797 | 934 |
| | | | | | | 47% | 632 | 694 |
| | | | | | | 40% | 611 | 691 |
| HFOXK14 | 603245 | 180 | HMMER | PFAM: Adenylate and | PF00211 | 137.85 | 183 | 401 |
| | | | 1.8 | Guanylate cyclase | | | | |
| | | | | catalytic domain | | | | |
| HHFFO69 | 837703 | 181 | HMMER | PFAM: Adenylate and | PF00211 | 386.54 | 124 | 708 |
| | | | 1.8 | Guanylate cyclase | | | | |
| | | | | catalytic domain | | | | |
| HHFLU06 | 857884 | 182 | HMMER | PFAM: Adenylate and | PF00211 | 108.8 | 17 | 268 |
| | | | 2.1.1 | Guanylate cyclase | | | | |
| | | | | catalytic domain | | | | |
| HAGBA56 | 732597 | 183 | HMMER | PFAM: Eukaryotic protein | PF00069 | 64.9 | 139 | 516 |
| | | | 2.1.1 | kinase domain | | | | |
| HAGGF84 | 911312 | 184 | HMMER | PFAM: Eukaryotic protein | PF00069 | 105.85 | 10 | 318 |
| | | | 1.8 | kinase domain | | | | |
| | | | blastx.14 | calmodulin-dependent | gi\|3241849\|dbj\|BAA2 | 88% | 10 | 363 |
| | | | | protein kinase II-delta | 8870.1\| | 87% | 366 | 413 |
| | | | | dash [Oryctolagus | | 100% | 320 | 364 |
| | | | | cuniculus] | | | | |
| HAHGD33 | 921782 | 185 | HMMER | PFAM: Eukaryotic protein | PF00069 | 83.68 | 4 | 564 |
| | | | 1.8 | kinase domain | | | | |
| | | | blastx.14 | (AF145690) | gi\|5052670\|gb\|AAD3 | 68% | 1 | 297 |
| | | | | BcDNA.LD28657 | 8665.1\|AF145690_1 | 56% | 412 | 609 |
| | | | | [Drosophila melanogaster] | | 60% | 304 | 426 |
| | | | | | | 39% | 676 | 804 |
| HAHIY08 | 962113 | 186 | HMMER | PFAM: Eukaryotic protein | PF00069 | 74.92 | 39 | 278 |
| | | | 1.8 | kinase domain | | | | |
| | | | blastx.14 | similar to tyrosine kinase | gi\|470364\|gb\|AAC47 | 44% | 192 | 278 |
| | | | | [Caenorhabditis elegans] | 047.1\| | 64% | 18 | 92 |
| | | | | | | 58% | 108 | 179 |
| HBIOZ10 | 973131 | 187 | HMMER | PFAM: Eukaryotic protein | PF00069 | 121.1 | 3 | 365 |
| | | | 1.8 | kinase domain | | | | |
| | | | blastx.2 | (AF003134) strong | gb\|AAB54139.1\| | 60% | 3 | 305 |
| | | | | similarity to the | | | | |
| | | | | CDC2\|CDX subfamily of | | | | |
| | | | | ser/thr protein kinases | | | | |
| | | | | [Caenorhabditis elegans] | | | | |
| HBKDI30 | 729048 | 188 | HMMER | PFAM: Eukaryotic protein | PF00069 | 42.23 | 1 | 213 |
| | | | 1.8 | kinase domain | | | | |
| HBXBW40 | 706115 | 189 | HMMER | PFAM: Eukaryotic protein | PF00069 | 34.01 | 280 | 423 |
| | | | 1.8 | kinase domain | | | | |
| HCEHE35 | 909937 | 190 | HMMER | PFAM: Eukaryotic protein | PF00069 | 30.78 | 210 | 347 |
| | | | 1.8 | kinase domain | | | | |
| | | | blastx.14 | protein kinase PRK2 | gi\|914100\|gb\|AAB33 | 66% | 204 | 365 |
| | | | | [human, DX3 B-cell | 346.1\| | | | |
| | | | | myeloma cell line, | | | | |
| | | | | Peptide, 984 aa] [Homo | | | | |
| | | | | sapiens] | | | | |
| HCEPW85 | 911374 | 191 | HMMER | PFAM: Eukaryotic protein | PF00069 | 83.52 | 3 | 260 |
| | | | 1.8 | kinase domain | | | | |
| | | | blastx.14 | predicted using | gi\|3875903\|emb\|CAA | 87% | 3 | 260 |
| | | | | Genefinder; Similarity to | 94127.1\| | | | |
| | | | | 1 1 1 cDNA | | | | |
| HCFAT25 | 932068 | 192 | HMMER | PFAM: Eukaryotic protein | PF00069 | 26.6 | 136 | 231 |
| | | | 2.1.1 | kinase domain | | | | |
| | | | blastx.14 | (AF096300) HPK/GCK- | gi\|4322936\|gb\|AAD1 | 63% | 91 | 456 |
| | | | | like kinase HGK [Homo | 6137.1\| | 72% | 60 | 158 |
| | | | | sapiens] | | 25% | 232 | 312 |
| HCFCF47 | 1139731 | 193 | blastx.14 | (AF003134) strong | gi\|2088685\|gb\|AAB5 | 56% | 318 | 509 |
| | | | | similarity to the | 4139.1\| | 71% | 736 | 861 |
| | | | | CDC2/CDX 1 | | 42% | 87 | 290 |
| | | | | | | 61% | 15 | 92 |
| HCFCF47 | 894415 | 552 | HMMER | PFAM: Eukaryotic protein | PF00069 | 89.54 | 20 | 295 |
| | | | 1.8 | kinase domain | | | | |
| HDAAV61 | 810305 | 194 | HMMER | PFAM: Eukaryotic protein | PF00069 | 41.11 | 11 | 145 |
| | | | 1.8 | kinase domain | | | | |
| HDPKD75 | 810824 | 195 | HMMER | PFAM: Eukaryotic protein | PF00069 | 98.74 | 68 | 433 |
| | | | 1.8 | kinase domain | | | | |
| HDPNC96 | 934520 | 196 | HMMER | PFAM: Eukaryotic protein | PF00069 | 206.63 | 3 | 734 |
| | | | 1.8 | kinase domain | | | | |
| | | | blastx.14 | HUMAN NDR | gi\|2304746\|emb\|CAA | 92% | 3 | 734 |
| | | | | [unidentified] | 03387.1\| | | | |
| HDPSR15 | 969666 | 197 | HMMER | PFAM: Eukaryotic protein | PF00069 | 87.19 | 351 | 626 |
| | | | 1.8 | kinase domain | | | | |
| | | | blastx.2 | (AB026289) protein | dbj\|BAA85045.1\| | 95% | 631 | 1158 |
| | | | | kinase SID6-1512 [Homo | | 89% | 240 | 692 |
| | | | | sapiens] | | | | |
| HDQDX20 | 919027 | 198 | HMMER | PFAM: PX domain | PF00787 | 73.4 | 246 | 569 |
| | | | 2.1.1 | | | | | |
| | | | blastx.14 | serine/threonine protein | gi\|294637\|gb\|AAA42 | 78% | 633 | 974 |
| | | | | kinase [Rattus norvegicus] | 137.1\| | 44% | 465 | 578 |
| HDQHB19 | 895106 | 553 | HMMER | PFAM: Eukaryotic protein | PF00069 | 92.5 | 260 | 520 |
| | | | 2.1.1 | kinase domain | | | | |
| HDTBY88 | 934472 | 200 | HMMER | PFAM: Eukaryotic protein | PF00069 | 93.6 | 3 | 302 |
| | | | 2.1.1 | kinase domain | | | | |
| | | | blastx. 14 | p56 KKIAMRE protein | gi\|1517820\|gb\|AAC5 | 82% | 3 | 170 |
| | | | | kinase [Homo sapiens] | 0918.1\| | 35% | 192 | 458 |
| | | | | | | 100% | 492 | 509 |
| HE2KZ07 | 909948 | 201 | HMMER | PFAM: Eukaryotic protein | PF00069 | 115.19 | 5 | 289 |
| | | | 1.8 | kinase domain | | | | |
| | | | blastx.14 | (AB004267) | gi\|3135197\|dbj\|BAA2 | 96% | 17 | 433 |
| | | | | Ca2+/calmodulin- | 8263.1\| | 56% | 418 | 507 |
| | | | | dependent protein kinase I | | | | |
| | | | | beta 2 [Rattus norvegicus] | | | | |
| HE8UY74 | 960914 | 202 | HMMER | PFAM: Eukaryotic protein | PF00069 | 36.37 | 114 | 407 |
| | | | 1.8 | kinase domain | | | | |
| | | | blastx.14 | (AF080119) contains | gi\|3600036\|gb\|AAC3 | 36% | 117 | 290 |
| | | | | similarity to protein | 5524.1 | 45% | 13 | 111 |
| | | | | kinase 1 | | 73% | 366 | 410 |
| | | | | | | 37% | 467 | 553 |
| HE9NO66 | 974353 | 203 | HMMER | PFAM: Eukaryotic protein | PF00069 | 121.6 | 473 | 757 |
| | | | 1.8 | kinase domain | | | | |
| | | | blastx.14 | (AB020741) NIK-related | gi\|6009519\|dbj\|BAA8 | 73% | 449 | 817 |
| | | | | kinase [Mus musculus] | 4943.1\| | 94% | 2 | 283 |
| | | | | | | 79% | 748 | 990 |
| HEMBT61 | 939957 | 204 | HMMER | PFAM: Eukaryotic protein | PF00069 | 76.6 | 16 | 285 |
| | | | 2.1.1 | kinase domain | | | | |
| | | | blastx.2 | (AD000092) hypothetical | gb\|AAB51171.1\| | 71% | 13 | 441 |
| | | | | human serine-threonine | | | | |
| | | | | protein kinase R31240_1 | | | | |
| | | | | [Homo sapiens] | | | | |
| HETLF29 | 909762 | 205 | HMMER | PFAM: Eukaryotic protein | PF00069 | 143.18 | 6 | 416 |
| | | | 1.8 | kinase domain | | | | |
| | | | blastx.14 | similar to cAMP- | gi\|3878636\|emb\|CAA | 56% | 6 | 416 |
| | | | | dependant protein kinase; | 88953.1\| | | | |
| | | | | cDNA EST 1 1 1 | | | | |
| HFIUE75 | 909758 | 206 | HMMER | PFAM: Eukaryotic protein | PF00069 | 85.68 | 377 | 664 |
| | | | 1.8 | kinase domain | | | | |
| | | | blastx.14 | (AD000092) hypothetical | gi\|1905906\|gb\|AAB5 | 43% | 362 | 634 |
| | | | | human serine-threonine | 1171.1\| | 46% | 632 | 715 |
| | | | | protein kinase R31240_1 | | 47% | 724 | 774 |
| | | | | [Homo sapiens] | | | | |
| HFKIT06 | 934019 | 207 | HMMER | PFAM: Eukaryotic protein | PF00069 | 34.65 | 160 | 270 |
| | | | 1.8 | kinase domain | | | | |
| | | | blastx.14 | p58 galactosyltransferase- | pir\|A38282\|A38282 | 51% | 178 | 270 |
| | | | | associated protein kinase - | | 40% | 74 | 118 |
| | | | | human | | | | |
| HHEGG20 | 894409 | 208 | HMMER | PFAM: Eukaryotic protein | PF00069 | 200.01 | 26 | 598 |
| | | | 1.8 | kinase domain | | | | |
| HHEHC53 | 921783 | 209 | HMMER | PFAM: Eukaryotic protein | PF00069 | 58.81 | 507 | 797 |
| | | | 1.8 | kinase domain | | | | |
| | | | blastx.14 | (AF145690) | gi\|5052670\|gb\|AAD3 | 79% | 567 | 803 |
| | | | | BcDNA.LD28657 | 8665.1\|AF145690_1 | 70% | 321 | 563 |
| | | | | [Drosophila melanogaster] | | | | |
| HHERQ79 | 944057 | 210 | HMMER | PFAM: Eukaryotic protein | PF00069 | 83.4 | 133 | 474 |
| | | | 1.8 | kinase domain | | | | |
| | | | blastx.2 | (AB016589) inducible | dbj\|BAA85154.1\| | 90% | 109 | 471 |
| | | | | IKappaB kinase [Mus | | | | |
| | | | | musculus] | | | | |
| HISAF59 | 959140 | 211 | HMMER | PFAM: Eukaryotic protein | PF00069 | 89.46 | 340 | 771 |
| | | | 1.8 | kinase domain | | | | |
| | | | blastx.14 | (AC002343) Ser/Thr | gi\|2262107\|gb\|AAB6 | 39% | 460 | 768 |
| | | | | protein kinase isolog | 3615.1\| | 33% | 397 | 468 |
| | | | | [Arabidopsis thaliana] | | | | |
| HKAKM10 | 918685 | 212 | HMMER | PFAM: Eukaryotic protein | PF00069 | 31.4 | 8 | 127 |
| | | | 2.1.1 | kinase domain | | | | |
| HLTHP86 | 919354 | 213 | HMMER | PFAM: TBC domain | PF00566 | 69.4 | 855 | 1274 |
| | | | 2.1.1 | | | | | |
| | | | blastx.2 | (AF161420) HSPC302 | gb\|AAF28980.1\|AF1 | 89% | 456 | 1352 |
| | | | | [Homo sapiens] | 61420_1 | 99% | 1309 | 1974 |
| | | | | | | 52% | 1253 | 1309 |
| HMSJL96 | 934483 | 214 | HMMER | PFAM: Eukaryotic protein | PF00069 | 26.49 | 199 | 363 |
| | | | 1.8 | kinase domain | | | | |
| HMTAJ73 | 813296 | 215 | HMMER | PFAM: Eukaryotic protein | PF00069 | 21.34 | 4 | 114 |
| | | | 1.8 | kinase domain | | | | |
| HNTCP13 | 909770 | 216 | HMMER | PFAM: Eukaryotic protein | PF00069 | 102.96 | 445 | 930 |
| | | | 1.8 | kinase domain | | | | |
| | | | blastx.14 | (AC006530) unknown | gi\|4809337\|gb\|AAD3 | 55% | 463 | 957 |
| | | | | [Homo sapiens] | 0182.1\|AC006530_4 | | | |
| HNTMD79 | 934522 | 217 | HMMER | PFAM: Eukaryotic protein | PF00069 | 130.82 | 203 | 586 |
| | | | 1.8 | kinase domain | | | | |
| | | | blastx.14 | LATS [Drosophila | gi\|903942\|gb\|AAA70 | 52% | 239 | 586 |
| | | | | melanogaster] | 336.1\| | 33% | 76 | 156 |
| | | | | | | 57% | 169 | 210 |
| | | | | | | 22% | 64 | 240 |
| HNTMH70 | 757184 | 218 | HMMER | PFAM: Eukaryotic protein | PF00069 | 94.55 | 176 | 577 |
| | | | 1.8 | kinase domain | | | | |
| HNTNB14 | 909942 | 219 | HMMER | PFAM: Eukaryotic protein | PF00069 | 96.28 | 38 | 343 |
| | | | 1.8 | kinase domain | | | | |
| | | | blastx.14 | calmodulin-binding | gi\|349075\|gb\|AAA16 | 97% | 41 | 475 |
| | | | | protein [Rattus | 633.1\| | 85% | 553 | 657 |
| | | | | norvegicus] | | 74% | 553 | 657 |
| | | | | | | 77% | 553 | 657 |
| | | | | | | 69% | 559 | 657 |
| | | | | | | 65% | 553 | 657 |
| | | | | | | 60% | 553 | 657 |
| | | | | | | 52% | 553 | 654 |
| | | | | | | 37% | 553 | 657 |
| | | | | | | 39% | 553 | 636 |
| | | | | | | 35% | 553 | 645 |
| | | | | | | 33% | 559 | 657 |
| | | | | | | 77% | 512 | 538 |
| | | | | | | 29% | 556 | 657 |
| HODFF88 | 974911 | 220 | HMMER | PFAM: Eukaryotic protein | PF00069 | 101.43 | 98 | 370 |
| | | | 1.8 | kinase domain | | | | |
| | | | blastx.14 | mixed-lineage protein | pir\|S32467\|JU0229 | 74% | 131 | 493 |
| | | | | kinase 1 - human | | 81% | 763 | 921 |
| | | | | | | 30% | 751 | 915 |
| HOHCE47 | 911566 | 554 | HMMER | PFAM: Eukaryotic protein | PF00069 | 79.42 | 211 | 423 |
| | | | 1.8 | kinase domain | | | | |
| HPCRV84 | 945856 | 222 | HMMER | PFAM: Eukaryotic protein | PF00069 | 75.57 | 157 | 384 |
| | | | 1.8 | kinase domain | | | | |
| | | | blastx.2 | similar to protein kinase | dbj\|BAA11492.1\| | 78% | 127 | 483 |
| | | | | of X. laevis, has putative 1 | | | | |
| HRACK83 | 888037 | 223 | HMMER | PFAM: Eukaryotic protein | PF00069 | 48.4 | 211 | 423 |
| | | | 1.8 | kinase domain | | | | |
| HRADM45 | 717358 | 224 | HMMER | PFAM: Eukaryotic protein | PF00069 | 23.7 | 14 | 124 |
| | | | 1.8 | kinase domain | | | | |
| | | | blastx.2 | (AJ271722) putative | emb\|CAB71146.1\| | 98% | 2 | 469 |
| | | | | serine/threonine protein | | | | |
| | | | | kinase MAK-V [Homo | | | | |
| | | | | sapiens] | | | | |
| HRAED74 | 942527 | 225 | HMMER | PFAM: Eukaryotic protein | PF00069 | 59.6 | 406 | 612 |
| | | | 1.8 | kinase domain | | | | |
| | | | blastx.2 | (AB023658) | dbj\|BAA75246.1\| | 97% | 71 | 346 |
| | | | | Ca/calmodulin-dependent | | 81% | 388 | 648 |
| | | | | protein kinase kinase | | 71% | 342 | 425 |
| | | | | alpha, CaM-kinase kinase | | 88% | 662 | 688 |
| | | | | alpha [Rattus norvegicus] | | | | |
| HRODZ70 | 942673 | 226 | HMMER | PFAM: Eukaryotic protein | PF00069 | 78.2 | 33 | 248 |
| | | | 2.1.1 | kinase domain | | | | |
| | | | blastx.2 | kinase like protein | emb\|CAB10257.1\| | 39% | 33 | 323 |
| | | | | [Arabidopsis thaliana] | | 50% | 303 | 380 |
| HSKAC24 | 823869 | 227 | HMMER | PFAM: Eukaryotic protein | PF00069 | 79.36 | 122 | 454 |
| | | | 1.8 | kinase domain | | | | |
| HSSMT34 | 911294 | 228 | HMMER | PFAM: Eukaryotic protein | PF00069 | 53.16 | 95 | 292 |
| | | | 1.8 | kinase domain | | | | |
| HT3BG12 | 921593 | 229 | HMMER | PFAM: Eukaryotic protein | PF00069 | 27.09 | 109 | 183 |
| | | | 1.8 | kinase domain | | | | |
| | | | blastx.14 | CYCLIN-DEPENDENT | gi\|3715669\|emb\|CAA | 85% | 1 | 246 |
| | | | | KINASE (CDK)8 | 03585.1\| | | | |
| | | | | [unidentified] | | | | |
| HTEGO05 | 932583 | 230 | HMMER | PFAM: Eukaryotic protein | PF00069 | 50.8 | 3 | 233 |
| | | | 2.1.1 | kinase domain | | | | |
| | | | blastx.14 | male germ cell-associated | gi\|205278\|gb\|AAA41 | 85% | 3 | 395 |
| | | | | kinase (mak) [Rattus | 562.1\| | 64% | 489 | 761 |
| | | | | norvegicus] | | 85% | 768 | 848 |
| | | | | | | 38% | 1023 | 1100 |
| HTEKT33 | 953308 | 231 | HMMER | PFAM: Eukaryotic protein | PF00069 | 200.58 | 428 | 1393 |
| | | | 1.8 | kinase domain | | | | |
| | | | blastx.2 | (AC007661) putative | gb\|AAD32787.1\|AC0 | 41% | 722 | 1009 |
| | | | | protein kinase | 07661_24 | 36% | 1070 | 1243 |
| | | | | [Arabidopsis thaliana] | | 29% | 428 | 628 |
| HTEMU66 | 944419 | 232 | HMMER | PFAM: Eukaryotic protein | PF00069 | 114.85 | 613 | 963 |
| | | | 1.8 | kinase domain | | | | |
| | | | blastx.2 | MEK Kinase 3 [Mus | gb\|AAB03535.1\| | 49% | 604 | 948 |
| | | | | musculus] | | 29% | 209 | 340 |
| HTEMV09 | 909843 | 233 | HMMER | PFAM: Eukaryotic protein | PF00069 | 99.16 | 19 | 312 |
| | | | 1.8 | kinase domain | | | | |
| | | | blastx.14 | protein kinase I [Rattus | gi\|406113\|gb\|AAA19 | 44% | 1 | 321 |
| | | | | norvegicus] | 670.1\| | | | |
| HTEMV66 | 1151075 | 234 | blastx.14 | contains EGF-like repeats; | gi\|495684\|gb\|AAA50 | 55% | 579 | 223 |
| | | | | highly similar to ZC84.1; | 735.1\| | 44% | 783 | 649 |
| | | | | 1 | | 23% | 861 | 772 |
| HTEMV66 | 813038 | 555 | HMMER | PFAM: Eukaryotic protein | PF00069 | 27.8 | 154 | 315 |
| | | | 2.1.1 | kinase domain | | | | |
| HTGAU79 | 1175071 | 235 | blastx.14 | (AL157917) similarity to | gi\|7106102\|emb\|CAB | 50% | 755 | 976 |
| | | | | endopeptidases 1 | 76028.1\| | 38% | 371 | 571 |
| | | | | | | 60% | 641 | 730 |
| | | | | | | 52% | 323 | 373 |
| HTGAU79 | 940369 | 556 | HMMER | PFAM: Eukaryotic protein | PF00069 | 31.25 | 315 | 779 |
| | | | 1.8 | kinase domain | | | | |
| | | | blastx.2 | (AL157917) similarity to | emb\|CAB76028.1\| | 45% | 324 | 977 |
| | | | | endopeptidases | | | | |
| | | | | [Schizosaceharomyces 1 | | | | |
| HTLEJ11 | 973302 | 236 | HMMER | PFAM: Eukaryotic protein | PF00069 | 55.9 | 44 | 223 |
| | | | 2.1.1 | kinase domain | | | | |
| | | | blastx.14 | (AF144573) Mx- | gi\|4868443\|gb\|AAD3 | 69% | 35 | 268 |
| | | | | interacting protein kinase | 1319.1\|AF144573_1 | 40% | 437 | 592 |
| | | | | PKM [Mesocricetus | | 42% | 293 | 397 |
| | | | | auratus] | | 38% | 877 | 939 |
| HTLIY52 | 1218691 | 237 | blastx.14 | TESTIS-SPECIFIC | sp\|Q61241IQ61241 | 46% | 640 | 972 |
| | | | | SERINE/THREONINE | | 48% | 142 | 414 |
| | | | | KINASE. | | 45% | 427 | 579 |
| | | | | | | 42% | 565 | 621 |
| HTLIYS2 | 942161 | 557 | HMMER | PFAM: Eukaryotic protein | PF00069 | 251.19 | 166 | 933 |
| | | | 1.8 | kinase domain | | | | |
| | | | blastx.2 | serine/threonine kinase | gb\|AAA99535.1\| | 44% | 133 | 936 |
| | | | | [Mus musculus] | | | | |
| HTOAK34 | 966800 | 238 | HMMER | PFAM: Eukaryotic protein | PF00069 | 32.41 | 1020 | 1190 |
| | | | 1.8 | kinase domain | | | | |
| | | | blastx.14 | (AF084205) | gi\|3452473\|gb\|AAC7 | 75% | 954 | 1190 |
| | | | | serine/threonine protein | 1014.1\| | | | |
| | | | | kinase TAO1 [Rattus | | | | |
| | | | | norvegicus] | | | | |
| HTPGG25 | 911282 | 239 | HMMER | PFAM: Eukaryotic protein | PF00069 | 114.02 | 72 | 353 |
| | | | 1.8 | kinase domain | | | | |
| | | | blastx.2 | (AL117482) hypothetical | emb\|CAB55955.1\| | 94% | 9 | 353 |
| | | | | protein [Homo sapiens] | | 92% | 350 | 622 |
| | | | | | | 63% | 2 | 58 |
| HUJAD24 | 1161319 | 240 | blastx.14 | serine/threonine kinase | gi\|2052191\|emb\|CAB | 34% | 439 | 759 |
| | | | | [Rattus norvegicus] | 06295.1\| | 48% | 345 | 494 |
| | | | | | | 34% | 779 | 910 |
| | | | | | | 57% | 267 | 344 |
| | | | | | | 48% | 123 | 215 |
| | | | | | | 24% | 57 | 206 |
| | | | | | | 47% | 3 | 53 |
| | | | | | | 72% | 211 | 243 |
| | | | | | | 42% | 162 | 218 |
| HUJAD24 | 911498 | 558 | HMMER | PFAM: Eukaryotic protein | PF00069 | 34.73 | 9 | 215 |
| | | | 1.8 | kinase domain | | | | |
| | | | blastx.14 | AMP-activated protein | gi\|758783\|gb\|AAA64 | 45% | 336 | 467 |
| | | | | kinase homolog [Homo | 850.1\| | 45% | 123 | 215 |
| | | | | sapiens] | | 37% | 267 | 338 |
| | | | | | | 54% | 211 | 243 |
| | | | | | | 41% | 45 | 95 |
| HUTSF11 | 966029 | 241 | HMMER | PFAM: Eukaryotic protein | PF00069 | 27.74 | 3 | 104 |
| | | | 1.8 | kinase domain | | | | |
| HUVGZ88 | 1227628 | 242 | blastx.14 | PRO1038. | sp\|AAF71042\|AAF71 | 59% | 425 | 859 |
| | | | | | 042 | 41% | 1159 | 1296 |
| | | | | | | 39% | 1282 | 1404 |
| | | | | | | 75% | 1695 | 1742 |
| HUVGZ88 | 959020 | 559 | HMMER | PFAM: Eukaryotic protein | PF00069 | 31.12 | 182 | 439 |
| | | | 1.8 | kinase domain | | | | |
| HWADY66 | 1096252 | 243 | blastx.14 | (AF191838) TANK | gi\|6224868\|gb\|AAF05 | 84% | 10 | 183 |
| | | | | binding kinase TBK1 | 989.1\|AF191838_1 | | | |
| | | | | [Homo sapiens] | | | | |
| HWADY66 | 734565 | 560 | HMMER | PFAM: Eukaryotic protein | PF00069 | 28.82 | 1 | 174 |
| | | | 1.8 | kinase domain | | | | |
| HWAFG04 | 952878 | 244 | HMMER | PFAM: Eukaryotic protein | PF00069 | 93.74 | 1655 | 945 |
| | | | 1.8 | kinase domain | | | | |
| | | | blastx.14 | (AC002343) Ser/Thr | gi\|2262107\|gb\|AAB6 | 41% | 1655 | 1383 |
| | | | | protein kinase isolog | 3615.1\| | 48% | 1319 | 1185 |
| | | | | [Arabidopsis thaliana] | | 42% | 1046 | 933 |
| | | | | | | 75% | 1355 | 1332 |
| HWAFS18 | 948434 | 245 | HMMER | PFAM: Eukaryotic protein | PF00069 | 115.98 | 225 | 632 |
| | | | 1.8 | kinase domain | | | | |
| | | | blastx.14 | (AF156884) RIP-like | gi\|5059425\|gb\|AAD3 | 91% | 165 | 632 |
| | | | | kinase [Homo sapiens] | 9005.1\|AF156884_1 | 66% | 702 | 773 |
| | | | | | | 100% | 632 | 661 |
| HWAGS73 | 1150212 | 246 | blastx.14 | (AF156884) RIP-like | gi\|5059425\|gb\|AAD3 | 82% | 1 | 273 |
| | | | | kinase [Homo sapiens] | 9005.1\|AF156884_1 | | | |
| HWAGS73 | 894404 | 561 | HMMER | PFAM: Eukaryotic protein | PF00069 | 64.17 | 4 | 273 |
| | | | 1.8 | kinase domain | | | | |
| HWLEA48 | 927676 | 247 | HMMER | PFAM: Eukaryotic protein | PF00069 | 32.82 | 190 | 381 |
| | | | 1.8 | kinase domain | | | | |
| | | | blastx.2 | (AF169034) protein | gb\|AAF12757.2\|AF1 | 59% | 154 | 429 |
| | | | | kinase [Homo sapiens] | 69034_1 | 100% | 89 | 166 |
| | | | | | | 51% | 287 | 415 |
| HWLHS82 | 934505 | 248 | HMMER | PFAM: Eukaryotic protein | PF00069 | 147.2 | 2 | 319 |
| | | | 2.1.1 | kinase domain | | | | |
| | | | blastx.2 | (AC005581) R31237_1, | gb\|AAC33487.1\| | 90% | 68 | 364 |
| | | | | partial CDS [Homo | | 100% | 2 | 76 |
| | | | | sapiens] | | 40% | 306 | 422 |
| HWMIB81 | 955336 | 249 | HMMER | PFAM: Eukaryotic protein | PF00069 | 122.85 | 1458 | 934 |
| | | | 1.8 | kinase domain | | | | |
| | | | blastx.2 | (AK000528) unnamed | dbj\|BAA91232.1\| | 100% | 3 | 572 |
| | | | | protein product [Homo | | | | |
| | | | | sapiens] | | | | |
| HCWDV17 | 1105673 | 250 | blastx.14 | BvgA positive | gi\|144039\|gb\|AAA22 | 57% | 203 | 604 |
| | | | | transcription regulator | 969.1\| | 70% | 77 | 187 |
| | | | | (put); putative [Bordetella | | | | |
| | | | | pertussis] | | | | |
| HCWDV17 | 974478 | 562 | HMMER | PFAM: Bacterial | PF00196 | 81.59 | 416 | 613 |
| | | | 1.8 | regulatory proteins, luxR | | | | |
| | | | | family | | | | |
| HELDI95 | 1103374 | 251 | blastx.14 | Regulatory protein KdpD. | gi\|1651302\|dbj\|BAA3 | 100% | 103 | 525 |
| | | | | [Escherichia coli] | 5352.1\| | | | |
| HELDI95 | 953059 | 563 | HMMER | PFAM: Response | PF00072 | 123.84 | 482 | 766 |
| | | | 1.8 | regulator receiver domain | | | | |
| | | | blastx.14 | Regulatory protein KdpD. | gi\|1651302\|dbj\|BAA3 | 98% | 1 | 432 |
| | | | | [Escherichia coli] | 5352.1\| | | | |
| HAGFO25 | 1150845 | 252 | blastx.14 | (AF062595) adenylate | gi\|4691541\|gb\|AAD2 | 92% | 145 | 732 |
| | | | | kinase 5 [Homo sapiens] | 7956.1\|AF062595_1 | | | |
| HAGFO25 | 957992 | 564 | HMMER | PFAM: Adenylate kinases | PF00406 | 206.82 | 180 | 650 |
| | | | 1.8 | | | | | |
| | | | blastx.14 | (AF062595) adenylate | gi\|4691541\|gb\|AAD2 | 90% | 135 | 728 |
| | | | | kinase 5 [Homo sapiens] | 7956.1\|AF062595_1 | | | |
| HAWAB54 | 1149319 | 253 | blastx.14 | (AF062595) adenylate | gi\|4691541\|gb\|AAD2 | 92% | 876 | 283 |
| | | | | kinase 5 [Homo sapiens] | 7956.1\|AF062595_1 | 30% | 1341 | 1012 |
| | | | | | | 29% | 1413 | 1321 |
| HAWAB54 | 957993 | 565 | HMMER | PFAM: Adenylate kinase | PF00406 | 40.1 | 111 | 296 |
| | | | 2.1.1 | | | | | |
| | | | blastx.14 | (AF062595) adenylate | gi\|4691541\|gb\|AAD2 | 98% | 111 | 374 |
| | | | | kinase 5 [Homo sapiens] | 7956.1\|AF062595_1 | | | |
| HLIBV06 | 934887 | 254 | HMMER | PFAM: Adenylate kinase | PF00406 | 100.8 | 81 | 245 |
| | | | 2.1.1 | | | | | |
| | | | blastx.14 | (AB020203) adenylate | gi\|4760600\|dbj\|BAA7 | 90% | 81 | 350 |
| | | | | kinase isozyme 3 [Mus | 7360.1\| | | | |
| | | | | musculus] | | | | |
| HMALL66 | 1105097 | 255 | blastx.14 | adenylate kinase (EC | pir\|S45634\|S45634 | 45% | 71 | 292 |
| | | | | 2.7.4.3), chloroplast - | | | | |
| | | | | maize | | | | |
| HMALL66 | 956195 | 566 | HMMER | PFAM: Adenylate kinases | PF00406 | 50.17 | 63 | 296 |
| | | | 1.8 | | | | | |
| HOACE12 | 858976 | 256 | HMMER | PFAM: Adenylate kinase | PF00406 | 46.1 | 20 | 235 |
| | | | 2.1.1 | | | | | |
| HOGCG69 | 924848 | 257 | HMMER | PFAM: Adenylate kinases | PF00406 | 76.14 | 858 | 1145 |
| | | | 1.8 | | | | | |
| | | | blastx.14 | adenylate kinase (EC | pir\|S45634\|S45634 | 36% | 480 | 791 |
| | | | | 2.7.4.3), chloroplast - | | 35% | 849 | 1145 |
| | | | | maize | | 33% | 379 | 522 |
| | | | | | | 57% | 214 | 255 |
| HAGAE09 | 525926 | 567 | HMMER | PFAM: Phorbol esters/ | PF00130 | 3.93 | 159 | 185 |
| | | | 1.8 | diacylglycerol binding | | | | |
| | | | | domain | | | | |
| HAGAE34 | 525878 | 568 | HMMER | PFAM: Phorbol esters/ | PF00130 | 8.88 | 191 | 253 |
| | | | 1.8 | diacylglycerol binding | | | | |
| | | | | domain | | | | |
| HARMH78 | 1137572 | 260 | blastx.14 | (AF001435) unknown | gi\|2529709\|gb\|AAB8 | 32% | 237 | 395 |
| | | | | [Homo sapiens] | 1205.1\| | 43% | 135 | 203 |
| | | | | | | 75% | 482 | 505 |
| HARMH78 | 773210 | 569 | HMMER | PFAM: Phorbol esters/ | PF00130 | 4.88 | 192 | 227 |
| | | | 1.8 | diacylglycerol binding | | | | |
| | | | | domain | | | | |
| HBJLB53 | 974122 | 570 | HMMER | PFAM: Phorbol esters/ | PF00130 | 4.62 | 301 | 348 |
| | | | 1.8 | diacylglycerol binding | | | | |
| | | | | domain | | | | |
| HBJNB52 | 726475 | 571 | HMMER | PFAM: Phorbol esters/ | PF00130 | 3.77 | 193 | 252 |
| | | | 1.8 | diacylglycerol binding | | | | |
| | | | | domain | | | | |
| HDABQ83 | 669619 | 572 | HMMER | PFAM: Phorbol esters/ | PF00130 | 6.04 | 255 | 284 |
| | | | 1.8 | diacylglycerol binding | | | | |
| | | | | domain | | | | |
| HDPDC84 | 616980 | 573 | HMMER | PFAM: Phorbol esters/ | PF00130 | 25.6 | 253 | 393 |
| | | | 1.8 | diacylglycerol binding | | | | |
| | | | | domain | | | | |
| HDPUF40 | 1212494 | 265 | blastx.14 | PTPL1-ASSOCIATED | sp\|O15463\|O15463 | 54% | 286 | 867 |
| | | | | RHOGAP. | | 46% | 1018 | 1230 |
| | | | | | | 23% | 1537 | 1662 |
| HDPUF40 | 970586 | 574 | HMMER | PFAM: Phorbol esters/ | PF00130 | 26.42 | 415 | 546 |
| | | | 1.8 | diacylglycerol binding | | | | |
| | | | | domain | | | | |
| | | | blastx.14 | similar to C. elegans | gi\|1504026\|dbj\|BAA1 | 94% | 61 | 651 |
| | | | | protein (Z37093) [Homo | 3212.1\| | 98% | 654 | 806 |
| | | | | sapiens] | | | | |
| HDPWU07 | 952734 | 575 | HMMER | PFAM: Phorbol esters/ | PF00130 | 2.94 | 333 | 356 |
| | | | 1.8 | diacylglycerol binding | | | | |
| | | | | domain | | | | |
| HDTJJ02 | 913787 | 576 | HMMER | PFAM: Phorbol esters/ | PF00130 | 5.7 | 21 | 68 |
| | | | 1.8 | diacylglycerol binding | | | | |
| | | | | domain | | | | |
| HE2GA18 | 1121872 | 268 | blastx.14 | mhpR [Escherichia coli] | gi\|1702880\|emb\|CAA | 98% | 288 | 1 |
| | | | | | 70746.1\| | | | |
| HE2GA18 | 867276 | 577 | HMMER | PFAM: Phorbol esters/ | PF00130 | 4.09 | 74 | 109 |
| | | | 1.8 | diacylglycerol binding | | | | |
| | | | | domain | | | | |
| HE2SY03 | 947947 | 578 | HMMER | PFAM: Phorbol esters/ | PF00130 | 2.97 | 387 | 437 |
| | | | 1.8 | diacylglycerol binding | | | | |
| | | | | domain | | | | |
| | | | blastx.14 | (AF118023) SH3 domain- | gi\|4836401\|gb\|AAD3 | 46% | 456 | 301 |
| | | | | binding protein SNP70 | 0425.1\|AF118023_1 | | | |
| | | | | [Homo sapiens] | | | | |
| HELGY64 | 934511 | 579 | HMMER | PFAM: Phorbol esters/ | PF00130 | 76.38 | 241 | 390 |
| | | | 1.8 | diacylglycerol binding | | | | |
| | | | | domain | | | | |
| HFIYW31 | 697730 | 580 | HMMER | PFAM: Phorbol esters/ | PF00130 | 3.29 | 29 | 67 |
| | | | 1.8 | diacylglycerol binding | | | | |
| | | | | domain | | | | |
| HFVIP88 | 960741 | 581 | HMMER | PFAM: Phorbol esters/ | PF00130 | 7.32 | 147 | 206 |
| | | | 1.8 | diacylglycerol binding | | | | |
| | | | | domain | | | | |
| HGBAS76 | 771320 | 582 | HMMER | PFAM: Phorbol esters/ | PF00130 | 3.23 | 322 | 348 |
| | | | 1.8 | diacylglycerol binding | | | | |
| | | | | domain | | | | |
| HHEBB62 | 1151481 | 274 | blastx.14 | (AK000193) unnamed | gi\|7020117\|dbj\|BAA9 | 100% | 1 | 375 |
| | | | | protein product [Homo | 1000.1\| | | | |
| | | | | sapiens] | | | | |
| HHEBB62 | 791469 | 583 | HMMER | PFAM: Phorbol esters/ | PF00130 | 6.2 | 292 | 236 |
| | | | 1.8 | diacylglycerol binding | | | | |
| | | | | domain | | | | |
| HHEHU73 | 923895 | 584 | HMMER | PFAM: Phorbol esters/ | PF00130 | 4.1 | 115 | 156 |
| | | | 1.8 | diacylglycerol binding | | | | |
| | | | | domain | | | | |
| HHEMA11 | 966924 | 585 | HMMER | PFAM: Phorbol esters/ | PF00130 | 10.16 | 354 | 395 |
| | | | 1.8 | diacylglycerol binding | | | | |
| | | | | domain | | | | |
| HHEQK01 | 1107392 | 277 | blastx.14 | ORF 3 [Homo sapiens] | gi\|182221\|gb\|AAA58 | 37% | 165 | 22 |
| | | | | | 464.1\| | 55% | 266 | 213 |
| | | | | | | 39% | 342 | 274 |
| HHEQK01 | 871911 | 586 | HMMER | PFAM: Phorbol esters/ | PF00130 | 3.27 | 64 | 90 |
| | | | 1.8 | diacylglycerol binding | | | | |
| | | | | domain | | | | |
| HHPEM84 | 915639 | 278 | HMMER | PFAM: Phorbol esters/ | PF00130 | 12.35 | 146 | 187 |
| | | | 1.8 | diacylglycerol binding | | | | |
| | | | | domain | | | | |
| HHSED84 | 706739 | 587 | HMMER | PFAM: Sterol O- | PF01800 | 276.4 | 2 | 364 |
| | | | 2.1.1 | acyltransferase | | | | |
| HIBCC94 | 504326 | 588 | HMMER | PFAM: Phorbol esters/ | PF00130 | 3.12 | 177 | 206 |
| | | | 1.8 | diacylglycerol binding | | | | |
| | | | | domain | | | | |
| HKADN56 | 1220254 | 281 | blastx.14 | CG5276 PROTEIN. | sp\|Q9VGN8\|Q9VGN | 58% | 904 | 1257 |
| | | | | | 8 | 68% | 1465 | 1617 |
| | | | | | | 54% | 1279 | 1437 |
| | | | | | | 43% | 796 | 891 |
| | | | | | | 63% | 754 | 810 |
| | | | | | | 47% | 706 | 756 |
| | | | | | | 87% | 1627 | 1650 |
| | | | | | | 42% | 102 | 158 |
| HKADN56 | 968619 | 590 | HMMER | PFAM: Phorbol esters/ | PF00130 | 5.32 | 207 | 233 |
| | | | 1.8 | diacylglycerol binding | | | | |
| | | | | domain | | | | |
| HKIXG58 | 464241 | 591 | HMMER | PFAM: Phorbol esters/ | PF00130 | 3.59 | 84 | 137 |
| | | | 1.8 | diacylglycerol binding | | | | |
| | | | | domain | | | | |
| HLICI13 | 626559 | 592 | HMMER | PFAM: Phorbol esters/ | PF00130 | 4.83 | 328 | 378 |
| | | | 1.8 | diacylglycerol binding | | | | |
| | | | | domain | | | | |
| HLTGFI7 | 662405 | 284 | HMMER | PFAM: Phorbol esters/ | PF00130 | 3.46 | 136 | 183 |
| | | | 1.8 | diacylglycerol binding | | | | |
| | | | | domain | | | | |
| HLYDC50 | 1151494 | 285 | blastx.14 | similar to C. elegans | gi\|1504026\|dbj\|BAA1 | 59% | 275 | 652 |
| | | | | protein (Z37093) [Homo | 3212.1\| | 52% | 719 | 871 |
| | | | | sapiens] | | 37% | 32 | 127 |
| HLYDC50 | 677050 | 593 | HMMER | PFAM: Phorbol esters/ | PF00130 | 29.67 | 191 | 319 |
| | | | 1.8 | diacylglycerol binding | | | | |
| | | | | domain | | | | |
| HMADD49 | 1217031 | 286 | blastx.14 | L-aspartate oxidase (EC | pir\|E65035\|OXECLD | 100% | 2212 | 803 |
| | | | | 1.4.3.16) nadB [validated] | | | | |
| | | | | - 1 | | | | |
| HMADD49 | 867481 | 594 | HMMER | PFAM: Phorbol esters/ | PF00130 | 3.79 | 131 | 175 |
| | | | 1.8 | diacylglycerol binding | | | | |
| | | | | domain | | | | |
| HMEKE78 | 792383 | 595 | HMMER | PFAM: Phorbol esters/ | PF00130 | 3.04 | 3 | 35 |
| | | | 1.8 | diacylglycerol binding | | | | |
| | | | | domain | | | | |
| HMSHU26 | 681745 | 596 | HMMER | PFAM: Phorbol esters/ | PF00130 | 6.77 | 158 | 226 |
| | | | 1.8 | diacylglycerol binding | | | | |
| | | | | domain | | | | |
| HNEEB82 | 778884 | 597 | HMMER | PFAM: Phorbol esters/ | PF00130 | 3.33 | 126 | 152 |
| | | | 1.8 | diacylglycerol binding | | | | |
| | | | | domain | | | | |
| HNHIA06 | 859932 | 598 | HMMER | PFAM: Phorbol esters/ | PF00130 | 3.13 | 123 | 146 |
| | | | 1.8 | diacylglycerol binding | | | | |
| | | | | domain | | | | |
| HODFY16 | 958329 | 599 | HMMER | PFAM:Phorbol esters/ | PF00130 | 3.15 | 175 | 213 |
| | | | 1.8 | diacylglycerol binding | | | | |
| | | | | domain | | | | |
| HPQSB68 | 740087 | 600 | HMMER | PFAM: Phorbol esters/ | PF00130 | 3.9 | 170 | 247 |
| | | | 1.8 | diacylglycerol binding | | | | |
| | | | | domain | | | | |
| HRDBH04 | 922022 | 601 | HMMER | PFAM: Phorbol esters/ | PF00130 | 5.19 | 600 | 632 |
| | | | 1.8 | diacylglycerol binding | | | | |
| | | | | domain | | | | |
| HSICR69 | 531061 | 602 | HMMER | PFAM: Phorbol esters/ | PF00130 | 3.1 | 190 | 213 |
| | | | 1.8 | diacylglycerol binding | | | | |
| | | | | domain | | | | |
| HSIGJ94 | 793624 | 603 | HMMER | PFAM: Phorbol esters/ | PF00130 | 3.15 | 207 | 239 |
| | | | 1.8 | diacylglycerol binding | | | | |
| | | | | domain | | | | |
| HSYBL15 | 1104299 | 296 | blastx.14 | (AF021935) mytonic | gi\|2736151\|gb\|AAC0 | 94% | 2 | 931 |
| | | | | dystrophy kinase-related | 2941.1\| | | | |
| | | | | Cdc42-binding kinase | | | | |
| | | | | [Rattus norvegicus] | | | | |
| HSYBL15 | 660053 | 604 | HMMER | PFAM: Phorbol esters/ | PF00130 | 22.31 | 2 | 70 |
| | | | 1.8 | diacylglycerol binding | | | | |
| | | | | domain | | | | |
| HTEKH29 | 855660 | 297 | HMMER | PFAM: Phorbol | PF00130 | 42.4 | 1660 | 1803 |
| | | | 2.1.1 | esters/diacylglycerol | | | | |
| | | | | binding domain (C1 | | | | |
| | | | | domain) | | | | |
| HTGEL46 | 685425 | 605 | HMMER | PFAM: Phorbol esters/ | PF00130 | 7.26 | 398 | 433 |
| | | | 1.8 | diacylglycerol binding | | | | |
| | | | | domain | | | | |
| HTGFA05 | 972982 | 606 | HMMER | PFAM: Phorbol esters/ | PF00130 | 4.17 | 905 | 855 |
| | | | 1.8 | diacylglycerol binding | | | | |
| | | | | domain | | | | |
| | | | blastx.2 | phosphorylation | pir\|A61382\|A61382 | 99% | 214 | 909 |
| | | | | regulatory protein HP-10- | | 100% | 1080 | 1259 |
| | | | | human | | 74% | 827 | 1078 |
| | | | | | | 100% | 67 | 213 |
| HTLDU61 | 530316 | 607 | HMMER | PFAM: Phorbol esters/ | PF00130 | 5.45 | 102 | 125 |
| | | | 1.8 | diacylglycerol binding | | | | |
| | | | | domain | | | | |
| HTOFT34 | 527144 | 608 | HMMER | PFAM: Phorbol esters/ | PF00130 | 4.53 | 235 | 264 |
| | | | 1.8 | diacylglycerol binding | | | | |
| | | | | domain | | | | |
| HTTDH46 | 1152491 | 302 | blastx.14 | F10B5.8 [Caenorhabditis | gi\|5824432\|emb\|CAB | 74% | 32 | 607 |
| | | | | elegans] | 54223.1\| | 70% | 623 | 1144 |
| HTTDH46 | 951114 | 609 | HMMER | PFAM: Phorbol esters/ | PF00130 | 3.36 | 420 | 470 |
| | | | 1.8 | diacylglycerol binding | | | | |
| | | | | domain | | | | |
| | | | blastx.14 | F10B5.8 [Caenorhabditis | gi\|5824432\|emb\|CAB | 73% | 117 | 437 |
| | | | | elegans] | 54223.1\| | 73% | 2 | 124 |
| HTTIO05 | 931037 | 610 | HMMBR | PFAM: Phorbol esters/ | PF00130 | 4.25 | 1289 | 1330 |
| | | | 1.8 | diacylglycerol binding | | | | |
| | | | | domain | | | | |
| HWHGY45 | 911621 | 304 | HMMER | PFAM: Phorbol esters/ | PF00130 | 10.67 | 123 | 203 |
| | | | 1.8 | diacylglycerol binding | | | | |
| | | | | domain | | | | |
| HWLQR48 | 914556 | 611 | HMMER | PFAM: Phorbol esters/ | PF00130 | 4.03 | 359 | 391 |
| | | | 1.8 | diacylglycerol binding | | | | |
| | | | | domain | | | | |
| HWLQX76 | 894607 | 612 | HMMER | PFAM: RhoGAP domain | PF00620 | 97.4 | 715 | 963 |
| | | | 2.1.1 | | | | | |
| HATDD09 | 1165331 | 307 | blastx.14 | (AK000239) unnamed | gi\|7020190\|dbj\|BAA9 | 52% | 3 | 260 |
| | | | | protein product [Homo | 1027.1\| | | | |
| | | | | sapiens] | | | | |
| HATDD09 | 573794 | 613 | HMMER | PFAM: Cyclic nucleotide- | PF00027 | 9.43 | 59 | 124 |
| | | | 1.8 | binding domain | | | | |
| HBJGT03 | 923800 | 614 | HMMER | PFAM: Cyclic nucleotide- | PF00027 | 8.96 | 41 | 100 |
| | | | 1.8 | binding domain | | | | |
| HMTMF45 | 1141737 | 309 | blastx.14 | (AL109657) dJ842G6.1 | gi\|6691957\|emb\|CAB | 96% | 108 | 377 |
| | | | | (novel protein) [Homo | 65791.1\| | 100% | 476 | 700 |
| | | | | sapiens] | | | | |
| HMTMF45 | 553382 | 615 | HMMER | PFAM: Cyclic nucleotide- | PF00027 | 8.27 | 230 | 292 |
| | | | 1.8 | binding domain | | | | |
| HHPDV86 | 522953 | 310 | HMMER | PFAM: PH domain | PF00169 | 33 | 196 | 531 |
| | | | 2.1.1 | | | | | |
| HE8BT56 | 732602 | 311 | HMMER | PFAM: Ras family | PF00071 | 46.1 | 138 | 248 |
| | | | 2.1.1 | | | | | |
| HUJDH06 | 907613 | 312 | HMMER | PFAM: ADP-ribosylation | PF00025 | 62.3 | 433 | 669 |
| | | | 2.1.1 | factor family | | | | |
| | | | blastx.14 | (AF143680) arf-like | gi\|4929218\|gb\|AAD3 | 32% | 421 | 663 |
| | | | | protein 2 [Mus musculus] | 3908.1\|AF143680_1 | 48% | 264 | 356 |
| HOEJG61 | 907614 | 313 | HMMER | PFAM: ADP-ribosylation | PF00025 | 45.6 | 399 | 566 |
| | | | 2.1.1 | factor family | | | | |
| | | | blastx.14 | (AF031903) ADP- | gi\|3687625\|gb\|AAC6 | 75% | 399 | 566 |
| | | | | ribosylation-like factor | 2194.1\| | 48% | 566 | 652 |
| | | | | homolog ARL6 [Mus | | | | |
| | | | | musculus] | | | | |
| HE8PN24 | 907620 | 314 | HMMER | PFAM: ADP-ribosylation | PF00025 | 104.77 | 197 | 568 |
| | | | 1.8 | factors (Arf family) | | | | |
| | | | | (contains ATP/GTP | | | | |
| | | | | binding P-loop) | | | | |
| | | | blastx.14 | ADP-ribosylation factor | gi\|727191\|gb\|AAA64 | 38% | 191 | 430 |
| | | | | [Candida albicans] | 266.1\| | 34% | 386 | 568 |
| HGBHI37 | 909745 | 315 | HMMER | PFAM: PH domain | PF00169 | 30.1 | 107 | 259 |
| | | | 2.1.1 | | | | | |
| | | | blastx.14 | (AF017368) faciogenital | gi\|3599940\|gb\|AAC3 | 82% | 14 | 151 |
| | | | | dysplasia protein 2 [Mus | 5430.1\| | 63% | 145 | 201 |
| | | | | musculus] | | | | |
| HCHOK82 | 909755 | 316 | HMMER | PFAM: RhoGEF domain | PF00621 | 176.8 | 40 | 519 |
| | | | 2.1.1 | | | | | |
| | | | blastx.14 | (AF017369) faciogenital | gi\|3599942\|gb\|AAC3 | 90% | 31 | 849 |
| | | | | dysplasia protein 3 [Mus | 5431.1\| | 79% | 855 | 941 |
| | | | | musculus] | | 100% | 1062 | 1082 |
| HFPCH24 | 912608 | 317 | HMMER | PFAM: Ras family | PF00071 | 43.25 | 47 | 307 |
| | | | 1.8 | (contains ATP/GTP | | | | |
| | | | | binding P-loop) | | | | |
| | | | blastx.14 | rap2b gene product (AA | gi\|35863\|emb\|CAA37 | 41% | 35 | 229 |
| | | | | 1-183) [Homo sapiens] | 178.1\| | 40% | 337 | 441 |
| | | | | | | 35% | 266 | 325 |
| | | | | | | 53% | 443 | 487 |
| HTTKF86 | 912689 | 318 | HMMER | PFAM: Ras family | PF00071 | 29.6 | 98 | 223 |
| | | | 2.1.1 | | | | | |
| HCESA79 | 912709 | 319 | HMMER | PFAM: Ras family | PF00071 | 45.1 | 67 | 243 |
| | | | 2.1.1 | | | | | |
| | | | blastx.14 | (AB027137) RAB-26 | gi\|5931612\|dbj\|BAA8 | 92% | 52 | 246 |
| | | | | [Homo sapiens] | 4707.1\| | | | |
| HDTBJ28 | 912714 | 320 | HMMER | PFAM: Ras family | PF00071 | 28.1 | 21 | 137 |
| | | | 2.1.1 | | | | | |
| | | | blastx.14 | Rab12 protein [Canis | gi\|437985\|emb\|CAA8 | 88% | 21 | 98 |
| | | | | familiaris] | 0471.1\| | | | |
| HDPBF48 | 912783 | 321 | HMMER | PFAM: Ras family | PF00071 | 26.1 | 33 | 101 |
| | | | 2.1.1 | | | | | |
| | | | blastx.14 | (AL117204) predicted | gi\|5832782\|emb\|CAB | 48% | 123 | 209 |
| | | | | using Genefinder | 55120.1\| | 55% | 258 | 338 |
| | | | | [Caenorhabditis elegans] | | 68% | 33 | 89 |
| | | | | | | 53% | 429 | 467 |
| HTPFY55 | 912928 | 322 | HMMER | PFAM: Ras family | PF00071 | 27.2 | 240 | 386 |
| | | | 2.1.1 | | | | | |
| | | | blastx.14 | similar to the RAS gene | gi\|1572819\|gb\|AAB0 | 48% | 117 | 383 |
| | | | | family [Caenorhabditis | 9163.1\| | 60% | 396 | 524 |
| | | | | elegans] | | | | |
| HMSCM47 | 923632 | 323 | HMMER | PFAM: ATPases | PF00004 | 121.1 | 65 | 652 |
| | | | 2.1.1 | associated with various | | | | |
| | | | | cellular activities (AAA) | | | | |
| | | | blastx.2 | (AF033862) Lon protease | gb\|AAC05085.1\| | 65% | 5 | 673 |
| | | | | [Arabidopsis thaliana] | | | | |
| HEOQA56 | 925132 | 324 | HMMER | PFAM: Ras family | PF00071 | 62.8 | 53 | 154 |
| | | | 1.8 | (contains ATP/GTP | | | | |
| | | | | binding P-loop) | | | | |
| | | | blastx.14 | GTP-binding protein | gi\|213115\|gb\|AAA49 | 76% | 23 | 202 |
| | | | | [Discopyge ommata] | 230.1\| | | | |
| HTPCQ24 | 925349 | 325 | HMMER | PFAM: PH domain | PF00169 | 31 | 217 | 438 |
| | | | 2.1.1 | | | | | |
| HWAEI37 | 929481 | 326 | HMMER | PFAM: MCM2/3/5 family | PF00493 | 59.7 | 8 | 415 |
| | | | 2.1.1 | | | | | |
| | | | blastx.14 | (AL035461) dJ967N21.5 | gi\|5834569\|emb\|CAB | 100% | 323 | 415 |
| | | | | (novel MCM2/3/5 family | 55276.1\| | 92% | 2 | 85 |
| | | | | member) [Homo sapiens] | | | | |
| HDPSF03 | 969536 | 327 | HMMER | PFAM: ATPases | PF00004 | 47.2 | 61 | 399 |
| | | | 2.1.1 | associated with various | | | | |
| | | | | cellular activities (AAA) | | | | |
| | | | blastx.14 | LON1 protease [Zea | gi\|1816586\|gb\|AAC5 | 58% | 46 | 447 |
| | | | | mays] | 0011.1\| | 62% | 865 | 1200 |
| | | | | | | 41% | 622 | 846 |
| | | | | | | 36% | 580 | 636 |
| | | | | | | 30% | 642 | 710 |
| HLHST63 | 581528 | 328 | HMMER | PFAM: Ras family | PF00071 | 30.6 | 213 | 85 |
| | | | 2.1.1 | | | | | |
| HFAAJ44 | 489201 | 329 | HMMER | PFAM: Rhomboid family | PF01694 | 49.5 | 6 | 299 |
| | | | 2.1.1 | | | | | |
| HSLEM44 | 506604 | 330 | HMMER | PFAM: AcrB/AcrD/AcrF | PF00873 | 137.4 | 2 | 256 |
| | | | 2.1.1 | family | | | | |
| HETCL79 | 522826 | 331 | HMMER | PFAM: PDZ domain | PF00595 | 28.1 | 242 | 457 |
| | | | 2.1.1 | (Also known as DHR or | | | | |
| | | | | GLGF). | | | | |
| HFTAR20 | 670041 | 332 | HMMER | PFAM: Glypican | PF01153 | 170.7 | 12 | 308 |
| | | | 2.1.1 | | | | | |
| HCUFD32 | 699379 | 333 | HMMER | PFAM: PDZ domain | PF00595 | 29.3 | 124 | 369 |
| | | | 2.1.1 | (Also known as DHR or | | | | |
| | | | | GLGF). | | | | |
| HKAEO39 | 705332 | 334 | HMMER | PFAM: PDZ domain | PF00595 | 25.7 | 239 | 430 |
| | | | 2.1.1 | (Also known as DHR or | | | | |
| | | | | GLGF). | | | | |
| HLWBR95 | 734474 | 335 | HMMER | PFAM: PDZ domain | PF00595 | 46.8 | 270 | 434 |
| | | | 2.1.1 | (Also known as DHR or | | | | |
| | | | | GLGF). | | | | |
| HPWCJ63 | 772553 | 336 | HMMER | PFAM: DedA family | PF00597 | 228 | 235 | 717 |
| | | | 2.1.1 | | | | | |
| | | | blastx.2 | (AE000391) orf, | gb\|AAC76130.1\| | 100% | 148 | 807 |
| | | | | hypothetical protein | | | | |
| | | | | [Escherichia coli] | | | | |
| HPWCJ63 | 957495 | 618 | HMMER | PFAM: DedA family | PF00597 | 228 | 1152 | 670 |
| | | | 2.1.1 | | | | | |
| | | | blastx.2 | (AE000391) orf, | gb\|AAC76130.1\| | 100% | 144 | 803 |
| | | | | hypothetical protein | | | | |
| | | | | [Escherichia coli] | | | | |
| HBXCM35 | 782911 | 337 | HMMER | PFAM: PDZ domain | PF00595 | 27.5 | 251 | 397 |
| | | | 2.1.1 | (Also known as DHR or | | | | |
| | | | | GLGF). | | | | |
| HULBN83 | 857836 | 338 | HMMER | PFAM: PDZ domain | PF00595 | 38 | 133 | 363 |
| | | | 2.1.1 | (Also known as DHR or | | | | |
| | | | | GLGF). | | | | |
| HAGET77 | 885265 | 339 | HMMER | PFAM: | PF00769 | 37.6 | 770 | 841 |
| | | | 2.1.1 | Ezrin/radixin/moesin | | | | |
| | | | | family | | | | |
| HMSOZ55 | 910911 | 340 | HMMER | PFAM: PDZ domain | PF00595 | 66.7 | 276 | 500 |
| | | | 2.1.1 | (Also known as DHR or | | | | |
| | | | | GLGF). | | | | |
| | | | blastx.14 | (AF090136) lin-7-C | gi\|3885834\|gb\|AAC7 | 89% | 3 | 500 |
| | | | | [Rattus norvegicus] | 8075.1\| | 74% | 461 | 589 |
| HAPOR42 | 911292 | 341 | HMMER | PFAM: PDZ domain | PF00595 | 33.7 | 456 | 671 |
| | | | 2.1.1 | (Also known as DHR or | | | | |
| | | | | GLGF). | | | | |
| | | | blastx.14 | (AF061262) semaF | gi\|3851518\|gb\|AAC7 | 88% | 249 | 644 |
| | | | | cytoplasmic domain | 2310.1\| | 83% | 679 | 966 |
| | | | | associated protein 2 [Mus | | 80% | 968 | 1012 |
| | | | | musculus] | | 50% | 1009 | 1050 |
| HMVAU10 | 911449 | 342 | HMMER | PFAM: PDZ domain | PF00595 | 68.6 | 140 | 394 |
| | | | 2.1.1 | (Also known as DHR or | | | | |
| | | | | GLGF). | | | | |
| HTTFY29 | 911454 | 343 | HMMER | PFAM: PDZ domain | PF00595 | 101 | 180 | 428 |
| | | | 2.1.1 | (Also known as DHR or | | | | |
| | | | | GLGF). | | | | |
| | | | blastx.14 | (AF034746) LNXp70 | gi\|3041881\|gb\|AAC4 | 55% | 150 | 467 |
| | | | | [Mus musculus] | 0076.1\| | 58% | 3 | 146 |
| | | | | | | 34% | 258 | 422 |
| | | | | | | 60% | 552 | 626 |
| | | | | | | 26% | 255 | 413 |
| | | | | | | 32% | 99 | 173 |
| HHFJY06 | 911456 | 344 | HMMER | PFAM: PDZ domain | PF00595 | 59.7 | 99 | 326 |
| | | | 2.1.1 | (Also known as DHR or | | | | |
| | | | | GLGF). | | | | |
| | | | blastx.14 | (AJ001320) multi PDZ | gi\|2959979\|emb\|CAA | 40% | 132 | 359 |
| | | | | domain protein 1 [Rattus | 04681.1\| | 29% | 427 | 519 |
| | | | | norvegicus] | | | | |
| HPCIK72 | 911459 | 345 | HMMER | PFAM: PDZ domain | PF00595 | 72 | 36 | 260 |
| | | | 2.1.1 | (Also known as DHR or | | | | |
| | | | | GLGF). | | | | |
| | | | blastx.14 | neuroendocrine-dlg | gi\|1515355\|gb\|AAB6 | 58% | 180 | 266 |
| | | | | [Homo sapiens] | 1453.1\| | 48% | 180 | 260 |
| | | | | | | 43% | 15 | 110 |
| | | | | | | 40% | 105 | 179 |
| | | | | | | 33% | 21 | 110 |
| | | | | | | 45% | 36 | 95 |
| | | | | | | 40% | 114 | 179 |
| HFIDT84 | 919878 | 346 | HMMER | PFAM: PDZ domain | PF00595 | 225.5 | 1879 | 2127 |
| | | | 2.1.1 | (Also known as DHR or | | | | |
| | | | | GLGF). | | | | |
| | | | blastx.14 | (AF034746) LNXp70 | gi\|3041881\|gb\|AAC4 | 88% | 256 | 1455 |
| | | | | [Mus musculus] | 0076.1\| | 91% | 1774 | 2151 |
| | | | | | | 82% | 1462 | 1782 |
| | | | | | | 30% | 1462 | 1728 |
| | | | | | | 34% | 1597 | 1779 |
| | | | | | | 29% | 1876 | 2121 |
| | | | | | | 50% | 895 | 1002 |
| | | | | | | 25% | 1183 | 1422 |
| | | | | | | 26% | 1570 | 1728 |
| | | | | | | 57% | 808 | 849 |
| | | | | | | 50% | 1504 | 1545 |
| | | | | | | 36% | 1507 | 1596 |
| HMCAV88 | 924874 | 347 | HMMER | PFAM: PDZ domain | PF00595 | 70.4 | 235 | 471 |
| | | | 2.1.1 | (Also known as DHR or | | | | |
| | | | | GLGF). | | | | |
| | | | blastx.14 | (AL110228) hypothetical | gi\|5817167\|emb\|CAB | 41% | 232 | 471 |
| | | | | protein [Homo sapiens] | 53685.1\| | 37% | 574 | 645 |
| HKAIP73 | 928809 | 348 | HMMER | PFAM: PDZ domain | PF00595 | 48.9 | 1041 | 805 |
| | | | 2.1.1 | (Also known as DHR or | | | | |
| | | | | GLGF). | | | | |
| | | | blastx.14 | (AF131809) Unknown | gi\|4406642\|gb\|AAD2 | 99% | 1107 | 487 |
| | | | | [Homo sapiens] | 0049.1\| | | | |
| HFVHV40 | 945849 | 349 | HMMER | PFAM: Adaptor | PF00928 | 349.2 | 123 | 680 |
| | | | 2.1.1 | complexes medium | | | | |
| | | | | subunit family | | | | |
| | | | blastx.2 | clathrin-associated protein | gb\|AAA37244.1\| | 98% | 108 | 680 |
| | | | | [Mus musculus] | | | | |
| HTJNI80 | 952231 | 350 | HMMER | PFAM: PDZ domain | PF00595 | 271 | 92 | 316 |
| | | | 2.1.1 | (Also known as DHR or | | | | |
| | | | | GLGF). | | | | |
| HEAAE08 | 959970 | 351 | HMMER | PFAM: PDZ domain | PF00595 | 78.5 | 277 | 516 |
| | | | 2.1.1 | (Also known as DHR or | | | | |
| | | | | GLGF). | | | | |
| | | | blastx.14 | (AF090133) lin-7-A | gi\|3885828\|gb\|AAC7 | 96% | 223 | 612 |
| | | | | [Rattus norvegicus] | 8072.1\| | | | |
| HDPLU91 | 963199 | 352 | HMMER | PFAM: GNS1/SUR4 | PF01151 | 27.2 | 452 | 550 |
| | | | 2.1.1 | family | | | | |
| | | | blastx.2 | (AL034374) dJ483K16.1 | emb\|CAB41293.1\| | 100% | 305 | 700 |
| | | | | (novel protein) [Homo | | | | |
| | | | | sapiens] | | | | |
| HAPRM21 | 963200 | 353 | HMMER | PFAM: GNS1/SUR4 | PF01151 | 43.3 | 244 | 378 |
| | | | 2.1.1 | family | | | | |
| | | | blastx.14 | (AL034374) dJ483K16.1 | gi\|4680391\|emb\|CAB | 100% | 1 | 630 |
| | | | | (novel protein) [Homo | 41293.1\| | | | |
| | | | | sapiens] | | | | |
| HTDAB30 | 965320 | 354 | HMMER | PFAM: Adaptor | PF00928 | 493.4 | 81 | 896 |
| | | | 2.1.1 | complexes medium | | | | |
| | | | | subunit family | | | | |
| H2CBN90 | 966919 | 355 | HMMER | PFAM: PDZ domain | PF00595 | 62.4 | 609 | 821 |
| | | | 2.1.1 | (Also known as DHR or | | | | |
| | | | | GLGF). | | | | |
| | | | blastx.14 | (AB005549) atypical PKC | gi\|3868778\|dbj\|BAA3 | 78% | 6 | 821 |
| | | | | specific binding protein | 4216.1\| | | | |
| | | | | [Rattus norvegicus] | | | | |
| HETFJ47 | 971305 | 356 | HMMER | PFAM: Adaptor | PF00928 | 797.6 | 75 | 1325 |
| | | | 2.1.1 | complexes medium | | | | |
| | | | | subunit family | | | | |
| | | | blastx.14 | (AF020797) AP-mu chain | gi\|4587714\|gb\|AAD2 | 99% | 60 | 950 |
| | | | | family member mu1B | 5870.1\|AF020797_1 | 100% | 1155 | 1328 |
| | | | | [Homo sapiens] | | | | |
| HADEX52 | 971351 | 357 | HMMER | PFAM: PDZ domain | PF00595 | 63.3 | 134 | 388 |
| | | | 2.1.1 | (Also known as DHR or | | | | |
| | | | | GLGF). | | | | |
| HTADZ74 | 811489 | 358 | HMMER | PFAM: TIR domain | PF01582 | 53.1 | 305 | 538 |
| | | | 2.1.1 | | | | | |
| HAPNZ77 | 887072 | 359 | HMMER | PFAM: TIR domain | PF01582 | 31.9 | 292 | 483 |
| | | | 2.1.1 | | | | | |
| HELDR74 | 963001 | 360 | HMMER | PFAM: TIR domain | PF01582 | 46.5 | 492 | 779 |
| | | | 2.1.1 | | | | | |
| | | | blastx.2 | (AF113795) | gb\|AAF26200.1\|AF1 | 74% | 201 | 1223 |
| | | | | toll/interleukin-1 receptor | 13795_1 | | | |
| | | | | 8 [Mus musculus] | | | | |
| HDPLJ22 | 859915 | 361 | HMMER | PFAM: Cullin family | PF00888 | 39.1 | 86 | 409 |
| | | | 2.1.1 | | | | | |
| HPMLD11 | 890204 | 362 | HMMER | PFAM: Scavenger | PF00530 | 119.6 | 57 | 350 |
| | | | 2.1.1 | receptor cysteine-rich | | | | |
| | | | | domain | | | | |
| HMVDZ78 | 938574 | 363 | HMMER | PFAM: IPT/TIG domain | PF01833 | 52.6 | 104 | 244 |
| | | | 2.1.1 | | | | | |
| HTSFJ40 | 722406 | 364 | HMMER | PFAM: GTPase of | PF01926 | 37.5 | 96 | 356 |
| | | | 2.1.1 | unknown function | | | | |
| HEMBZ62 | 742551 | 365 | HMMER | PFAM: GTPase of | PF01926 | 42.4 | 23 | 175 |
| | | | 2.1.1 | unknown function | | | | |
| HHFGZ38 | 785591 | 366 | HMMER | PFAM: GTPase of | PF01926 | 97.2 | 338 | 799 |
| | | | 2.1.1 | unknown function | | | | |
| HDPLN70 | 854010 | 367 | HMMER | PFAM: WH1 domain | PF00568 | 33.1 | 400 | 573 |
| | | | 2.1.1 | | | | | |
| HSDJH12 | 876344 | 368 | HMMER | PFAM: GTPase of | PF01926 | 115.7 | 207 | 572 |
| | | | 2.1.1 | unknown function | | | | |
| HNBUT01 | 913838 | 369 | HMMER | PFAM: GTPase of | PF01926 | 149.3 | 30 | 503 |
| | | | 2.1.1 | unknown function | | | | |
| | | | blastx.14 | (AL035632) | gi\|4481810\|emb\|CAB | 71% | 30 | 506 |
| | | | | BACN32G11.d | 38462.1\| | 36% | 768 | 824 |
| | | | | [Drosophila melanogaster] | | | | |
| HEOQN14 | 923752 | 370 | HMMER | PFAM: GTPase of | PF01926 | 33.9 | 927 | 562 |
| | | | 2.1.1 | unknown function | | | | |
| | | | blastx.14 | (AC002S10) unknown | gi\|2618702\|gb\|AAB8 | 54% | 951 | 787 |
| | | | | protein [Arabidopsis | 4349.1\| | | | |
| | | | | thaliana] | | | | |
| HTXKL86 | 928194 | 371 | HMMER | PFAM: GTPase of | PF01926 | 133.3 | 10 | 636 |
| | | | 2.1.1 | unknown function | | | | |
| | | | blastx.14 | similar to hypothetical | gi\|2633977emb\|CAB | 37% | 4 | 219 |
| | | | | proteins [Bacillus subtilis] | 13478.1\| | 33% | 493 | 690 |
| | | | | | | 54% | 334 | 405 |
| | | | | | | 31% | 229 | 285 |
| | | | | | | 30% | 355 | 444 |
| HDQGV77 | 937546 | 372 | HMMER | PFAM: WH1 domain | PF00568 | 140.5 | 132 | 458 |
| | | | 2.1.1 | | | | | |
| | | | blastx.14 | ena-VASP like protein | gi\|1644453\|gb\|AAC5 | 97% | 135 | 539 |
| | | | | [Mus musculus] | 2862.1\| | 78% | 771 | 1157 |
| | | | | | | 91% | 1215 | 1358 |
| | | | | | | 27% | 751 | 879 |
| | | | | | | 35% | 1266 | 1316 |
| | | | | | | 26% | 1035 | 1148 |
| | | | | | | 38% | 880 | 933 |
| HE8TM80 | 955022 | 373 | HMMER | PFAM: GTPase of | PF01926 | 51.1 | 460 | 624 |
| | | | 2.1.1 | unknown function | | | | |
| | | | blastx.14 | similar to GTP-binding | gi\|3878119\|emb\|CAA | 59% | 463 | 624 |
| | | | | protein; cDNAEST 1 1 1 | 88860.1\| | 55% | 4 | 90 |
| | | | | this gene | | | | |
| HWLEY40 | 957875 | 374 | HMMER | PFAM: GTPase of | PF01926 | 103.9 | 192 | 632 |
| | | | 2.1.1 | unknown function | | | | |
| | | | blastx.14 | (AC002510) unknown | gi\|2618702\|gb\|AAB8 | 54% | 1209 | 1373 |
| | | | | protein [Arabidopsis | 4349.1\| | 50% | 168 | 347 |
| | | | | thaliana] | | 70% | 516 | 575 |
| HDPPD36 | 964320 | 620 | HMMER | PFAM: WH1 domain | PF00568 | 32.6 | 200 | 361 |
| | | | 2.1.1 | | | | | |
| | | | blastx.14 | AE33 protein - fruit fly | pir\|JC5909\|JC5909 | 48% | 170 | 391 |
| | | | | (Drosophila melanogaster) | | 80% | 50 | 79 |
| HOUBZ94 | 527876 | 376 | HMMER | PFAM: Phosphotyrosine | PF00640 | 41.1 | 7 | 129 |
| | | | 2.1.1 | interaction domain | | | | |
| | | | | (PTB/PID). | | | | |
| HMIAH32 | 550977 | 377 | HMMER | PFAM: Guanine | PF00618 | 28.9 | 253 | 441 |
| | | | 2.1.1 | nucleotide exchange | | | | |
| | | | | factor for Ras-like | | | | |
| | | | | GTPases; N-terminal | | | | |
| | | | | motif | | | | |
| HDPTH43 | 573418 | 378 | HMMER | PFAM:PXdomain | PF00787 | 38.5 | 13 | 336 |
| | | | 2.1.1 | | | | | |
| HCE3W04 | 615501 | 379 | HMMER | PFAM: RhoGEF domain | PF00621 | 46.1 | 535 | 804 |
| | | | 2.1.1 | | | | | |
| HMUBZ20 | 670393 | 380 | HMMER | PFAM: PX domain | PF00787 | 48.8 | 2 | 184 |
| | | | 2.1.1 | | | | | |
| HDPAB51 | 685665 | 381 | HMMER | PFAM: RhoGAP domain | PF00620 | 114.9 | 402 | 884 |
| | | | 2.1.1 | | | | | |
| HPJAP28 | 686349 | 382 | HMMER | PFAM: RhoGAP domain | PF00620 | 28.9 | 302 | 391 |
| | | | 2.1.1 | | | | | |
| HIBEC79 | 703000 | 383 | HMMER | PFAM: RhoGAP domain | PF00620 | 31.2 | 308 | 99 |
| | | | 2.1.1 | | | | | |
| HOQBF64 | 703177 | 384 | HMMER | PFAM: Regulator of G | PF00615 | 38.9 | 48 | 167 |
| | | | 2.1.1 | protein signaling domain | | | | |
| HTEDL38 | 761609 | 385 | HMMER | PFAM: SAM domain | PF00536 | 56.3 | 256 | 441 |
| | | | 2.1.1 | (Sterile alpha motif) | | | | |
| HE9HI71 | 779375 | 386 | HMMER | PFAM: SAM domain | PF00536 | 67.7 | 290 | 466 |
| | | | 2.1.1 | (Sterile alpha motif) | | | | |
| HNFHS82 | 779946 | 387 | HMMER | PFAM: PX domain | PF00787 | 28.7 | 53 | 259 |
| | | | 2.1.1 | | | | | |
| HOUHO89 | 786548 | 388 | HMMER | PFAM: RhoGEF domain | PF00621 | 56 | 463 | 750 |
| | | | 2.1.1 | | | | | |
| HFPBB28 | 844526 | 389 | HMMER | PFAM: Domain found in | PF00672 | 43 | 60 | 236 |
| | | | 2.1.1 | bacterial signal proteins | | | | |
| HHEWQ61 | 876063 | 390 | HMMER | PFAM: PX domain | PF00787 | 36.5 | 135 | 353 |
| | | | 2.1.1 | | | | | |
| HUFGH09 | 877078 | 391 | HMMER | PFAM: PX domain | PF00787 | 58.6 | 363 | 638 |
| | | | 2.1.1 | | | | | |
| HLICA79 | 880881 | 392 | HMMER | PFAM: Domain found in | PF00610 | 79.9 | 103 | 327 |
| | | | 2.1.1 | Dishevelled, Egl-10, and | | | | |
| | | | | Pleckstrin | | | | |
| HSLIH01 | 884251 | 393 | HMMER | PFAM: Domain found in | PF00610 | 30.9 | 83 | 304 |
| | | | 2.1.1 | Dishevelled, Egl-10, and | | | | |
| | | | | Pleckstrin | | | | |
| HE90V91 | 887364 | 394 | HMMER | PFAM: SPRY domain | PF00622 | 80.6 | 313 | 633 |
| | | | 2.1.1 | | | | | |
| HHEDS85 | 894602 | 395 | HMMER | PFAM: RhoGAP domain | PF00620 | 26.2 | 11 | 121 |
| | | | 2.1.1 | | | | | |
| HNTDJ68 | 899624 | 396 | HMMER | PFAM: SAM domain | PF00536 | 42.3 | 1375 | 1569 |
| | | | 2.1.1 | (Sterile alpha motif) | | | | |
| HKAHO77 | 906671 | 397 | HMMER | PFAM: RhoGAP domain | PF00620 | 24.7 | 63 | 248 |
| | | | 2.1.1 | | | | | |
| | | | blastx.14 | GTPASE-ACTIVATING | gi\|2276308\|emb\|CAB | 69% | 64 | 171 |
| | | | | PROTEIN [Homo | 06085.1\| | 95% | 180 | 248 |
| | | | | sapiens] | 95% | 248 | 319 | |
| | | | | | | 100% | 417 | 479 |
| | | | | | | 72% | 313 | 366 |
| | | | | | | 81% | 497 | 544 |
| | | | | | | 81% | 4 | 36 |
| | | | | | | 81% | 481 | 513 |
| HTFNP84 | 909687 | 398 | HMMER | PFAM: RhoGEF domain | PF00621 | 84.7 | 70 | 405 |
| | | | 2.1.1 | | | | | |
| | | | blastx.14 | ect2 [Mus musculus] | gi\|293332\|gb\|AAA37 | 91% | 73 | 1131 |
| | | | | | 536.1\| | 62% | 1042 | 1227 |
| | | | | | | 100% | 27 | 56 |
| | | | | | | 17% | 62 | 265 |
| HDQGZ78 | 909735 | 399 | HMMER | PFAM: RhoGEF domain | PF00621 | 85.2 | 5 | 277 |
| | | | 2.1.1 | | | | | |
| | | | blastx.14 | (AF038388) actin- | gi\|3342246\|gb\|AAC2 | 93% | 5 | 442 |
| | | | | filament binding protein | 7698.1\| | | | |
| | | | | Frabin [Rattus norvegicus] | | | | |
| HHEMD52 | 909742 | 400 | HMMER | PFAM: RhoGEF domain | PF00621 | 64.3 | 1295 | 1501 |
| | | | 2.1.1 | | | | | |
| | | | blastx.14 | (AF017369) faciogenital | gi\|3599942\|gb\|AAC3 | 70% | 998 | 1510 |
| | | | | dysplasia protein 3 [Mus | 5431.1\| | 62% | 854 | 982 |
| | | | | musculus] | | 100% | 1516 | 1545 |
| | | | | | | 80% | 815 | 844 |
| | | | | | | 77% | 1573 | 1599 |
| HSIDQ38 | 909854 | 401 | HMMER | PFAM: RhoGAP domain | PF00620 | 175.6 | 270 | 686 |
| | | | 2.1.1 | | | | | |
| | | | blastx.14 | carboxyl terminus of the | gi\|3874826\|emb\|CAA | 37% | 381 | 659 |
| | | | | predicted protein shows 1 | 86318.1\| | 55% | 270 | 350 |
| | | | | 1 comes from this gene; | | 25% | 654 | 737 |
| | | | | cDNA EST | | 33% | 14 | 67 |
| | | | | EMBL:D32994 comes | | | | |
| | | | | from this gen | | | | |
| HSKBF02 | 909855 | 402 | HMMER | PFAM: RhoGAP domain | PF00620 | 130.6 | 9 | 386 |
| | | | 2.1.1 | | | | | |
| | | | blastx.14 | p115 [Homo sapiens] | gi\|840786\|emb\|CAA5 | 59% | 6 | 386 |
| | | | | | 5394.1\| | 66% | 364 | 390 |
| HIBDE74 | 909876 | 621 | HMMER | PFAM: RhoGEF domain | PF00621 | 152.7 | 44 | 604 |
| | | | 2.1.1 | | | | | |
| | | | blastx.14 | (AB001770) PEM-2 | gi\|4107011\|dbj\|BAA3 | 58% | 428 | 628 |
| | | | | [Ciona savignyi] | 6290.1\| | 41% | 161 | 421 |
| | | | | | | 33% | 29 | 127 |
| HWMAE53 | 909877 | 404 | HMMER | PFAM: RhoGEF domain | PF00621 | 53 | 112 | 267 |
| | | | 2.1.1 | | | | | |
| | | | blastx.14 | (AF132481) Ese1L | gi\|4378891\|gb\|AAD1 | 44% | 112 | 285 |
| | | | | protein [Mus musculus] | 9749.1\| | | | |
| HFXCG28 | 909961 | 405 | HMMER | PFAM: RasGEF domain | PF00617 | 162.7 | 225 | 593 |
| | | | 2.1.1 | | | | | |
| | | | blastx.14 | (AL080117) hypothetical | gi\|5262547\|emb\|CAB | 98% | 225 | 593 |
| | | | | protein [Homo sapiens] | 45716.1\| | 50% | 149 | 220 |
| HFTCU45 | 910053 | 406 | HMMER | PFAM: RhoGEF domain | PF00621 | 80.9 | 82 | 474 |
| | | | 2.1.1 | | | | | |
| | | | blastx.14 | Trio [Homo sapiens] | gi\|3522970\|gb\|AAC3 | 70% | 1 | 501 |
| | | | | | 4245.1\| | 41% | 34 | 387 |
| | | | | | | 35% | 421 | 540 |
| | | | | | | 57% | 488 | 529 |
| HFTBL33 | 910055 | 407 | HMMER | PFAM: RhoGEF domain | PF00621 | 40.3 | 223 | 387 |
| | | | 2.1.1 | | | | | |
| | | | blastx.14 | (AF091395) Trio isoform | gi\|3644048\|gb\|AAC4 | 60% | 199 | 483 |
| | | | | [Homo sapiens] | 3042.1\| | 61% | 31 | 207 |
| | | | | | | 52% | 703 | 840 |
| | | | | | | 67% | 586 | 687 |
| | | | | | | 33% | 598 | 786 |
| | | | | | | 42% | 334 | 483 |
| | | | | | | 31% | 37 | 189 |
| | | | | | | 47% | 199 | 267 |
| | | | | | | 35% | 1128 | 1187 |
| | | | | | | 46% | 1175 | 1219 |
| HTXJA84 | 911387 | 408 | HMMER | PFAM: Fes/CIP4 | PF00611 | 42.2 | 101 | 373 |
| | | | 2.1.1 | homology domain | | | | |
| | | | blastx.14 | macrophage actin- | gi\|3947712\|emb\|CAA | 88% | 80 | 604 |
| | | | | associated-tyrosine- | 77027.1 | 82% | 592 | 726 |
| | | | | phosphorylated protein | | 60% | 725 | 808 |
| | | | | [Mus musculus] | | | | |
| HKAAW89 | 911389 | 409 | HMMER | PFAM: Fes/CIP4 | PF00611 | 44.7 | 88 | 345 |
| | | | 2.1.1 | homology domain | | | | |
| HSXDD55 | 911460 | 410 | HMMER | PFAM: RasGEF domain | PF00617 | 146.2 | 333 | 695 |
| | | | 2.1.1 | | | | | |
| | | | blastx.14 | similar to phorbol ester | gi\|3876235\|emb\|CAA | 38% | 285 | 608 |
| | | | | and DAG binding domain; | 94755.1\| | 56% | 857 | 904 |
| | | | | 1 | | | | |
| HUFCI64 | 911558 | 411 | HMMER | PFAM: RhoGAP domain | PF00620 | 158 | 3 | 500 |
| | | | 2.1.1 | | | | | |
| | | | blastx.14 | similar to C. elegans | gi\|1504026\|dbj\|BAA1 | 87% | 3 | 773 |
| | | | | protein (Z37093) [Homo | 3212.1\| | 50% | 8 | 43 |
| | | | | sapiens] | | | | |
| HWAFT84 | 911559 | 412 | HMMER | PFAM: RhoGAP domain | PF00620 | 34.3 | 34 | 135 |
| | | | 2.1.1 | | | | | |
| | | | blastx.14 | similar to C. elegans | gi\|1504026\|dbj\|BAA1 | 90% | 40 | 702 |
| | | | | protein (Z37093) [Homo | 3212.1\| | | | |
| | | | | sapiens] | | | | |
| HETCL18 | 914535 | 413 | HMMER | PFAM: Domain found in | PF00610 | 79.9 | 16 | 240 |
| | | | 2.1.1 | Dishevelled, Egl-10, and | | | | |
| | | | | Pleckstrin | | | | |
| | | | blastx.2 | (AF115480) cAMP- | gb\|AAD09132.1\| | 39% | 28 | 276 |
| | | | | dependent Rap 1 guanine- | | | | |
| | | | | nucleotide exchange | | | | |
| | | | | factor [Mus musculus] | | | | |
| HCRNK75 | 914536 | 414 | HMMER | PFAM: Domain found in | PF00610 | 79.9 | 2006 | 1782 |
| | | | 2.1.1 | Dishevelled, Egl-10, and | | | | |
| | | | | Pleckstrin | | | | |
| | | | blastx.2 | (AF115480) cAMP- | gb\|AAD09132.1\| | 36% | 226 | 525 |
| | | | | dependent Rap 1 guanine- | | 35% | 1707 | 1790 |
| | | | | nucleotide exchange | | | | |
| | | | | factor [Mus musculus] | | | | |
| HTPFA03 | 922765 | 415 | HMMER | PFAM: RhoGAP domain | PF00620 | 54.5 | 2 | 292 |
| | | | 2.1.1 | | | | | |
| | | | blastx.14 | (AC004794) F02569_2 | gi\|3184264\|gb\|AAC1 | 84% | 50 | 295 |
| | | | | [Homo sapiens] | 8917.1\| | | | |
| HWADR60 | 926487 | 416 | HMMER | PFAM: RhoGAP domain | PF00620 | 148.8 | 153 | 605 |
| | | | 2.1.1 | | | | | |
| | | | blastx.14 | (AF003389) contains | gi\|2088864\|gb\|AAC7 | 33% | 297 | 611 |
| | | | | similarity to N-chimaerins | 1136.1\| | 30% | 33 | 275 |
| | | | | [Caenorhabditis elegans] | | | | |
| HWLFJ01 | 928017 | 417 | HMMER | PFAM: Phosphotyrosine | PF00640 | 40.6 | 202 | 612 |
| | | | 2.1.1 | interaction domain | | | | |
| | | | | (PTB/PID). | | | | |
| | | | blastx.14 | (AL117654) hypothetical | gi\|5912247\|emb\|CAB | 91% | 43 | 675 |
| | | | | protein [Homo sapiens] | 56030.1\| | 46% | 691 | 774 |
| | | | | | | 37% | 683 | 763 |
| HTXNG95 | 928577 | 418 | HMMER | PFAM: SPRY domain | PF00622 | 105.7 | 208 | 585 |
| | | | 2.1.1 | | | | | |
| | | | blastx.14 | zinc finger protein [Mus | gi\|406748\|emb\|CAA5 | 57% | 139 | 492 |
| | | | | musculus] | 3092.1\| | 54% | 52 | 123 |
| | | | | | | 61% | 541 | 579 |
| HPCIG66 | 930886 | 419 | HMMER | PFAM: SPRY domain | PF00622 | 80.4 | 90 | 455 |
| | | | 2.1.1 | | | | | |
| | | | blastx.14 | (AC007019) hypothetical | gi\|4417294\|gb\|AAD2 | 46% | 57 | 377 |
| | | | | protein [Arabidopsis | 0419.1\| | 51% | 378 | 464 |
| | | | | thaliana] | | 50% | 825 | 866 |
| | | | | | | 38% | 550 | 603 |
| | | | | | | 52% | 780 | 830 |
| HCRPU72 | 931140 | 420 | HMMER | PFAM: RhoGAP domain | PF00620 | 94.9 | 314 | 715 |
| | | | 2.1.1 | | | | | |
| | | | blastx.2 | similar to human GTPase- | dbj\|BAA13442.1\| | 97% | 77 | 799 |
| | | | | activating | | | | |
| | | | | protein(A49869) [Homo | | | | |
| | | | | sapiens] | | | | |
| HE9RT95 | 934556 | 421 | HMMER | PFAM: RhoGAP domain | PF00620 | 36.8 | 1 | 231 |
| | | | 2.1.1 | | | | | |
| | | | blastx.14 | carboxyl terminus of the | gi\|3874826\|emb\|CAA | 34% | 1 | 237 |
| | | | | predicted protein shows 1 | 86318.1\| | | | |
| | | | | 1 comes from this gene; | | | | |
| | | | | cDNA EST | | | | |
| | | | | EMBL:D32994 comes | | | | |
| | | | | from this gen | | | | |
| HFXJM13 | 935725 | 422 | HMMER | PFAM: PX domain | PF00787 | 35.8 | 85 | 393 |
| | | | 2.1.1 | | | | | |
| | | | blastx.14 | similar to RNA | gi\|3879784\|emb\|CAA | 41% | 184 | 348 |
| | | | | recognition motif. (aka | 93419.1\| | 40% | 66 | 155 |
| | | | | RRM, RBD, or 11 | | | | |
| HDPWU37 | 940705 | 423 | HMMER | PFAM: RhoGAP domain | PF00620 | 50.2 | 3 | 116 |
| | | | 2.1.1 | | | | | |
| | | | blastx.14 | similar to SH3-binding | gi\|4826478\|emb\|CAB | 79% | 3 | 491 |
| | | | | protein [Homo sapiens] | 42896.1\| | 77% | 503 | 529 |
| | | | | | | 66% | 509 | 535 |
| HHSDL85 | 942246 | 424 | HMMER | PFAM: RasGEF domain | PF00617 | 31 | 2 | 55 |
| | | | 2.1.1 | | | | | |
| | | | blastx.2 | (AF053308) putative | gb\|AAC06257.1\| | 50% | 2 | 472 |
| | | | | guanine nucleotide | | | | |
| | | | | releasing factor | | | | |
| | | | | [Drosophila affinis] | | | | |
| HTJMD31 | 942848 | 425 | HMMER | PFAM: SPRY domain | PF00622 | 40.2 | 58 | 423 |
| | | | 2.1.1 | | | | | |
| | | | blastx.14 | (AL117386) putative | gi\|5881779\|emb\|CAB | 33% | 49 | 279 |
| | | | | protein [Arabidopsis | 55697.1\| | | | |
| | | | | thaliana] | | | | |
| HWADD57 | 943039 | 426 | HMMER | PFAM: GTPase-activator | PF00616 | 56.1 | 212 | 343 |
| | | | 2.1.1 | protein for Ras-like | | | | |
| | | | | GTPase | | | | |
| | | | blastx.14 | (AB016962) synGAP-b1 | gi\|4417207\|dbj\|BAA7 | 45% | 116 | 598 |
| | | | | [Rattus norvegicus] | 4972.1\| | 69% | 2 | 70 |
| | | | | | | 35% | 739 | 855 |
| HLWAH05 | 944904 | 427 | HMMER | PFAM: RhoGAP domain | PF00620 | 224.3 | 470 | 925 |
| | | | 2.1.1 | | | | | |
| | | | blastx.2 | dJ37E16.2 (SH3-domain | emb\|CAB42896.1\| | 96% | 413 | 1291 |
| | | | | binding protein 1) [Homo | | 98% | 66 | 428 |
| | | | | sapiens] | | 41% | 1103 | 1249 |
| | | | | | | 31% | 1091 | 1258 |
| | | | | | | 26% | 1091 | 1327 |
| | | | | | | 30% | 1100 | 1273 |
| | | | | | | 37% | 1103 | 1228 |
| | | | | | | 28% | 733 | 924 |
| | | | | | | 26% | 1040 | 1258 |
| | | | | | | 30% | 721 | 834 |
| | | | | | | 20% | 1046 | 1267 |
| | | | | | | 26% | 999 | 1136 |
| HDPCI84 | 945527 | 428 | HMMER | PFAM: RhoGAP domain | PF00620 | 103.4 | 85 | 519 |
| | | | 2.1.1 | | | | | |
| | | | blastx.2 | (AK001174) unnamed | dbj\|BAA91533.1\| | 43% | 64 | 882 |
| | | | | protein product [Homo | | | | |
| | | | | sapiens] | | | | |
| HBXDJ07 | 946830 | 429 | HMMER | PFAM: Synaptophysin/ | PF01284 | 406.7 | 125 | 604 |
| | | | 2.1.1 | synaptoporin | | | | |
| | | | blastx.2 | synaptoporin - rat | pir\|JH0300\|JH0300 | 90% | 125 | 643 |
| | | | | | | 91% | 610 | 921 |
| HAMFD12 | 952438 | 430 | HMMER | PFAM: Guanine | PF00618 | 40.7 | 3 | 77 |
| | | | 2.1.1 | nucleotide exchange | | | | |
| | | | | factor for Ras-like | | | | |
| | | | | GTPases; N-terminal | | | | |
| | | | | motif | | | | |
| | | | blastx.14 | guanine nucleotide | gi\|193573\|gb\|AAA37 | 84% | 3 | 434 |
| | | | | dissociation stimulator | 714.1\| | | | |
| | | | | [Mus musculus] | | | | |
| HFKHR40 | 952470 | 431 | HMMER | PFAM: RhoGAP domain | PF00620 | 88.9 | 1376 | 1708 |
| | | | 2.1.1 | | | | | |
| | | | blastx.14 | carboxyl terminus of the | gi\|3874826\|emb\|CAA | 46% | 1319 | 1498 |
| | | | | predicted protein shows 1 | 86318.1\| | 49% | 1683 | 1865 |
| | | | | 1 comes from this gene; | | 81% | 1583 | 1630 |
| | | | | cDNA EST | | 47% | 232 | 300 |
| | | | | EMBL:D32994 comes | | 37% | 1253 | 1324 |
| | | | | from this gen | | 23% | 962 | 1078 |
| | | | | | | 37% | 1211 | 1282 |
| | | | | | | 50% | 643 | 696 |
| HDTAI08 | 953265 | 432 | HMMER | PFAM: SAM domain | PF00536 | 29.1 | 367 | 534 |
| | | | 2.1.1 | (Sterile alpha motif) | | | | |
| HMKCX80 | 956254 | 433 | HMMER | PFAM: PX domain | PF00787 | 47.3 | 425 | 613 |
| | | | 2.1.1 | | | | | |
| | | | blastx.14 | Unknown gene product | gi\|3417291\|gb\|AAC3 | 96% | 613 | 699 |
| | | | | [Homo sapiens] | 1664.1\| | 68% | 533 | 607 |
| HCEMF69 | 961308 | 434 | HMMER | PFAM: PX domain | PF00787 | 54.8 | 14 | 247 |
| | | | 2.1.1 | | | | | |
| HWLHF10 | 963422 | 435 | HMMER | PFAM: RhoGAP domain | PF00620 | 121 | 640 | 975 |
| | | | 2.1.1 | | | | | |
| | | | blastx.14 | similar to SH3-binding | gi\|4826478\|emb\|CAB | 49% | 661 | 978 |
| | | | | protein [Homo sapiens] | 42896.1\| | 43% | 349 | 591 |
| | | | | | | 39% | 118 | 339 |
| | | | | | | 68% | 592 | 696 |
| | | | | | | 30% | 536 | 604 |
| HOEMG82 | 963855 | 436 | HMMER | PFAM: IQ calmodulin- | PF00612 | 64.9 | 230 | 292 |
| | | | 2.1.1 | binding motif | | | | |
| HFXDR37 | 965915 | 437 | HMMER | PFAM: PX domain | PF00787 | 39.9 | 1437 | 1189 |
| | | | 2.1.1 | | | | | |
| | | | blastx.14 | (AF121862) sorting nexin | gi\|4689264\|gb\|AAD2 | 35% | 957 | 631 |
| | | | | 13 [Homo sapiens] | 7835.1\|AF121862_1 | 36% | 1002 | 928 |
| | | | | | | 33% | 2263 | 2174 |
| HNNAS46 | 969470 | 438 | HMMER | PFAM: PX domain | PF00787 | 70.2 | 232 | 573 |
| | | | 2.1.1 | | | | | |
| | | | blastx.14 | (AF121858) sorting nexin | gi\|4689256\|gb\|AAD2 | 99% | 770 | 1435 |
| | | | | 8 [Homo sapiens] | 7831.1\|AF121858_1 | 99% | 136 | 768 |
| HRAAS26 | 971219 | 439 | HMMER | PFAM: PX domain | PF00787 | 52.9 | 89 | 367 |
| | | | 2.1.1 | | | | | |
| | | | blastx.14 | (AF139461) hypothetical | gi\|4894946\|gb\|AAD3 | 100% | 59 | 499 |
| | | | | protein SBBI31 [Homo | 2668.1\|AF139461_1 | | | |
| | | | | sapiens] | | | | |
| HHEEL28 | 973096 | 440 | HMMER | PFAM: GTPase-activator | PF00616 | 47.4 | 148 | 372 |
| | | | 2.1.1 | protein for Ras-like | | | | |
| | | | | GTPase | | | | |
| | | | blastx.14 | (AF047711) nGAP | gi\|4105589\|gb\|AAD0 | 51% | 4 | 375 |
| | | | | [Homo sapiens] | 4814.1\| | | | |
| HCETF22 | 973324 | 441 | HMMER | PFAM: Diacylglycerol | PF00781 | 202.1 | 112 | 468 |
| | | | 2.1.1 | kinase catalytic domain | | | | |
| | | | | (presumed) | | | | |
| HCMSFS5 | 975280 | 623 | HMMER | PFAM: PDZ domain | PF00595 | 69.3 | 154 | 393 |
| | | | 2.1.1 | (Also known as DHR or | | | | |
| | | | | GLGF). | | | | |

[0068] Table 2 further characterizes certain encoded polypeptides of the invention, by providing the results of comparisons to protein and protein family databases. The first column provides a unique clone identifier, “Clone ID NO:”, corresponding to a cDNA clone disclosed in Table 1A. The second column provides the unique contig identifier, “Contig ID:” which allows correlation with the information in Table 1A. The third column provides the sequence identifier, “SEQ ID NO:”, for the contig polynucleotide sequences. The fourth column provides the analysis method by which the homology/identity disclosed in the Table was determined. The fifth column provides a description of the PFAM/NR hit identified by each analysis. Column six provides the accession number of the PFAM/NR hit disclosed in the fifth column. Column seven, score/percent identity, provides a quality score or the percent identity, of the hit disclosed in column five. Comparisons were made between polypeptides encoded by polynucleotides of the invention and a non-redundant protein database (herein referred to as “NR”), or a database of protein families (herein referred to as “PFAM”), as described below.

[0069] The NR database, which comprises the NBRF PIR database, the NCBI GenPept database, and the SIB SwissProt and TrEMBL databases, was made non-redundant using the computer program nrdb2 (Warren Gish, Washington University in Saint Louis). Each of the polynucleotides shown in Table 1A, column 3 (e.g., SEQ ID NO:X or the ‘Query’ sequence) was used to search against the NR database. The computer program BLASTX was used to compare a 6-frame translation of the Query sequence to the NR database (for information about the BLASTX algorithm please see Altshul et al., J. Mol. Biol. 215:403-410 (1990); and Gish and States, Nat. Genet. 3:266-272 (1993). A description of the sequence that is most similar to the Query sequence (the highest scoring ‘Subject’) is shown in column five of Table 2 and the database accession number for that sequence is provided in column six. The highest scoring ‘Subject’ is reported in Table 2 if (a) the estimated probability that the match occurred by chance alone is less than 1.0e-07, and (b) the match was not to a known repetitive element. BLASTX returns alignments of short polypeptide segments of the Query and Subject sequences which share a high degree of similarity; these segments are known as High-Scoring Segment Pairs or HSPs. Table 2 reports the degree of similarity between the Query and the Subject for each HSP as a percent identity in Column 7. The percent identity is determined by dividing the number of exact matches between the two aligned sequences in the HSP, dividing by the number of Query amino acids in the HSP and multiplying by 100. The polynucleotides of SEQ ID NO:X which encode the polypeptide sequence that generates an HSP are delineated by columns 8 and 9 of Table 2.

[0070] The PFAM database, PFAM version 2.1, (Sonnhammer et al., Nucl. Acids Res., 26:320-322, 1998)) consists of a series of multiple sequence alignments; one alignment for each protein family. Each multiple sequence alignment is converted into a probability model called a Hidden Markov Model, or HMM, that represents the position-specific variation among the sequences that make up the multiple sequence alignment (see, e.g., Durbin et al., Biological sequence analysis: probabilistic models of proteins and nucleic acids, Cambridge University Press, 1998 for the theory of HMMs). The program HMMER version 1.8 (Sean Eddy, Washington University in Saint Louis) was used to compare the predicted protein sequence for each Query sequence (SEQ ID NO:Y in Table 1A) to each of the HMMs derived from PFAM version 2.1. A HMM derived from PFAM version 2.1 was said to be a significant match to a polypeptide of the invention if the score returned by HMMER 1.8 was greater than 0.8 times the HMMER 1.8 score obtained with the most distantly related known member of that protein family. The description of the PFAM family which shares a significant match with a polypeptide of the invention is listed in column 5 of Table 2, and the database accession number of the PFAM hit is provided in column 6. Column 7 provides the score returned by HMMER version 1.8 for the alignment. Columns 8 and 9 delineate the polynucleotides of SEQ ID NO:X which encode the polypeptide sequence which show a significant match to a PFAM protein family.

[0071] As mentioned, columns 8 and 9 in Table 2, “NT From” and “NT To”, delineate the polynucleotides of “SEQ ID NO:X” that encode a polypeptide having a significant match to the PFAM/NR database as disclosed in the fifth column. In one embodiment, the invention provides a protein comprising, or alternatively consisting of, a polypeptide encoded by the polynucleotides of SEQ ID NO:X delineated in columns 8 and 9 of Table 2. Also provided are polynucleotides encoding such proteins, and the complementary strand thereto.

[0072] The nucleotide sequence SEQ ID NO:X and the translated SEQ ID NO:Y are sufficiently accurate and otherwise suitable for a variety of uses well known in the art and described further below. For instance, the nucleotide sequences of SEQ ID NO:X are useful for designing nucleic acid hybridization probes that will detect nucleic acid sequences contained in SEQ ID NO:X or the cDNA contained in Clone ID NO:Z. These probes will also hybridize to nucleic acid molecules in biological samples, thereby enabling immediate applications in chromosome mapping, linkage analysis, tissue identification and/or typing, and a variety of forensic and diagnostic methods of the invention. Similarly, polypeptides identified from SEQ ID NO:Y may be used to generate antibodies which bind specifically to these polypeptides, or fragments thereof, and/or to the polypeptides encoded by the cDNA clones identified in, for example, Table 1A.

[0073] Nevertheless, DNA sequences generated by sequencing reactions can contain sequencing errors. The errors exist as misidentified nucleotides, or as insertions or deletions of nucleotides in the generated DNA sequence. The erroneously inserted or deleted nucleotides cause frame shifts in the reading frames of the predicted amino acid sequence. In these cases, the predicted amino acid sequence diverges from the actual amino acid sequence, even though the generated DNA sequence may be greater than 99.9% identical to the actual DNA sequence (for example, one base insertion or deletion in an open reading frame of over 1000 bases).

[0074] Accordingly, for those applications requiring precision in the nucleotide sequence or the amino acid sequence, the present invention provides not only the generated nucleotide sequence identified as SEQ ID NO:X, and a predicted translated amino acid sequence identified as SEQ ID NO:Y, but also a sample of plasmid DNA containing cDNA Clone ID NO:Z (deposited with the ATCC on Oct. 5, 2000, and receiving ATCC designation numbers PTA 2574 and PTA 2575; deposited with the ATCC on Jan. 5, 2001, and having depositor reference numbers TS-1, TS-2, AC-1, and AC-2; and/or as set forth, for example, in Table 1A, 6 and 7). The nucleotide sequence of each deposited clone can readily be determined by sequencing the deposited clone in accordance with known methods. Further, techniques known in the art can be used to verify the nucleotide sequences of SEQ ID NO:X.

[0075] The predicted amino acid sequence can then be verified from such deposits. Moreover, the amino acid sequence of the protein encoded by a particular clone can also be directly determined by peptide sequencing or by expressing the protein in a suitable host cell containing the deposited human cDNA, collecting the protein, and determining its sequence.

[0076] RACE Protocol For Recovery of Full-Length Genes

[0077] Partial cDNA clones can be made full-length by utilizing the rapid amplification of cDNA ends (RACE) procedure described in Frohman, M. A., et al., Proc. Nat'l. Acad. Sci. USA, 85:8998-9002 (1988). A cDNA clone missing either the 5′ or 3′ end can be reconstructed to include the absent base pairs extending to the translational start or stop codon, respectively. In some cases, cDNAs are missing the start codon of translation, therefor. The following briefly describes a modification of this original 5′ RACE procedure. Poly A+ or total RNA is reverse transcribed with Superscript II (Gibco/BRL) and an antisense or complementary primer specific to the cDNA sequence. The primer is removed from the reaction with a Microcon Concentrator (Amicon). The first-strand cDNA is then tailed with dATP and terminal deoxynucleotide transferase (Gibco/BRL). Thus, an anchor sequence is produced which is needed for PCR amplification. The second strand is synthesized from the dA-tail in PCR buffer, Taq DNA polymerase (Perkin-Elmer Cetus), an oligo-dT primer containing three adjacent restriction sites (XhoI, SalI and ClaI) at the 5′ end and a primer containing just these restriction sites. This double-stranded cDNA is PCR amplified for 40 cycles with the same primers as well as a nested cDNA-specific antisense primer. The PCR products are size-separated on an ethidium bromide-agarose gel and the region of gel containing cDNA products the predicted size of missing protein-coding DNA is removed. cDNA is purified from the agarose with the Magic PCR Prep kit (Promega), restriction digested with XhoI or SalI, and ligated to a plasmid such as pBluescript SKII (Stratagene) at XhoI and EcoRV sites. This DNA is transformed into bacteria and the plasmid clones sequenced to identify the correct protein-coding inserts. Correct 5′ ends are confirmed by comparing this sequence with the putatively identified homologue and overlap with the partial cDNA clone. Similar methods known in the art and/or commercial kits are used to amplify and recover 3′ ends.

[0078] Several quality-controlled kits are commercially available for purchase. Similar reagents and methods to those above are supplied in kit form from Gibco/BRL for both 5′ and 3′ RACE for recovery of full length genes. A second kit is available from Clontech which is a modification of a related technique, SLIC (single-stranded ligation to single-stranded cDNA), developed by Dumas et al., Nucleic Acids Res., 19:5227-32 (1991). The major differences in procedure are that the RNA is alkaline hydrolyzed after reverse transcription and RNA ligase is used to join a restriction site-containing anchor primer to the first-strand cDNA. This obviates the necessity for the dA-tailing reaction which results in a polyT stretch that is difficult to sequence past.

[0079] An alternative to generating 5′ or 3′ cDNA from RNA is to use cDNA library double-stranded DNA. An asymmetric PCR-amplified antisense cDNA strand is synthesized with an antisense cDNA-specific primer and a plasmid-anchored primer. These primers are removed and a symmetric PCR reaction is performed with a nested cDNA-specific antisense primer and the plasmid-anchored primer.

[0080] RNA Ligase Protocol for Generating The 5′ or 3′ End Sequences to Obtain Full Length Genes

[0081] Once a gene of interest is identified, several methods are available for the identification of the 5′ or 3′ portions of the gene which may not be present in the original cDNA plasmid. These methods include, but are not limited to, filter probing, clone enrichment using specific probes and protocols similar and identical to 5′ and 3′ RACE. While the full length gene may be present in the library and can be identified by probing, a useful method for generating the 5′ or 3′ end is to use the existing sequence information from the original cDNA to generate the missing information. A method similar to 5′ RACE is available for generating the missing 5′ end of a desired full-length gene. (This method was published by Fromont-Racine et al., Nucleic Acids Res., 21(7):1683-1684 (1993)). Briefly, a specific RNA oligonucleotide is ligated to the 5′ ends of a population of RNA presumably containing full-length gene RNA transcript and a primer set containing a primer specific to the ligated RNA oligonucleotide and a primer specific to a known sequence of the gene of interest, is used to PCR amplify the 5′ portion of the desired full length gene which may then be sequenced and used to generate the full length gene. This method starts with total RNA isolated from the desired source, poly A RNA may be used but is not a prerequisite for this procedure. The RNA preparation may then be treated with phosphatase if necessary to eliminate 5′ phosphate groups on degraded or damaged RNA which may interfere with the later RNA ligase step. The phosphatase if used is then inactivated and the RNA is treated with tobacco acid pyrophosphatase in order to remove the cap structure present at the 5′ ends of messenger RNAs. This reaction leaves a 5′ phosphate group at the 5′ end of the cap cleaved RNA which can then be ligated to an RNA oligonucleotide using T4 RNA ligase. This modified RNA preparation can then be used as a template for first strand cDNA synthesis using a gene specific oligonucleotide. The first strand synthesis reaction can then be used as a template for PCR amplification of the desired 5′ end using a primer specific to the ligated RNA oligonucleotide and a primer specific to the known sequence of the gene of interest. The resultant product is then sequenced and analyzed to confirm that the 5′ end sequence belongs to the relevant gene.

[0082] The present invention also relates to vectors or plasmids which include such DNA sequences, as well as the use of the DNA sequences. The material deposited with the ATCC (deposited with the ATCC on Oct. 5, 2000, and receiving ATCC designation numbers PTA 2574 and PTA 2575; deposited with the ATCC on Jan. 5, 2001, and receiving ATCC designation numbers TS-1, TS-2, AC-1, and AC-2; and/or as set forth, for example, in Table 1A, Table 6, or Table 7) is a mixture of cDNA clones derived from a variety of human tissue and cloned in either a plasmid vector or a phage vector, as described, for example, in Table 7. These deposits are referred to as “the deposits” herein. The tissues from which some of the clones were derived are listed in Table 7, and the vector in which the corresponding cDNA is contained is also indicated in Table 7. The deposited material includes cDNA clones corresponding to SEQ ID NO:X described, for example, in Table 1A (Clone ID NO:Z). A clone which is isolatable from the ATCC Deposits by use of a sequence listed as SEQ ID NO:X, may include the entire coding region of a human gene or in other cases such clone may include a substantial portion of the coding region of a human gene. Furthermore, although the sequence listing may in some instances list only a portion of the DNA sequence in a clone included in the ATCC Deposits, it is well within the ability of one skilled in the art to sequence the DNA included in a clone contained in the ATCC Deposits by use of a sequence (or portion thereof) described in, for example Tables 1A or 2 by procedures hereinafter further described, and others apparent to those skilled in the art.

[0083] Also provided in Table 7 is the name of the vector which contains the cDNA clone. Each vector is routinely used in the art. The following additional information is provided for convenience.

[0084] Vectors Lambda Zap (U.S. Pat. Nos. 5,128,256 and 5,286,636), Uni-Zap XR (U.S. Pat. Nos. 5,128,256 and 5,286,636), Zap Express (U.S. Pat. Nos. 5,128,256 and 5,286,636), pBluescript (pBS) (Short, J. M. et al., Nucleic Acids Res. 16:7583-7600 (1988); Alting-Mees, M. A. and Short, J. M., Nucleic Acids Res. 17:9494 (1989)) and pBK (Alting-Mees, M. A. et al., Strategies 5:58-61 (1992)) are commercially available from Stratagene Cloning Systems, Inc., 11011 N. Torrey Pines Road, La Jolla, Calif., 92037. pBS contains an ampicillin resistance gene and pBK contains a neomycin resistance gene. Phagemid pBS may be excised from the Lambda Zap and Uni-Zap XR vectors, and phagemid pBK may be excised from the Zap Express vector. Both phagemids may be transformed into E. coli strain XL-1 Blue, also available from Stratagene.

[0085] Vectors pSport1, pCMVSport 1.0, pCMVSport 2.0 and pCMVSport 3.0, were obtained from Life Technologies, Inc., P. O. Box 6009, Gaithersburg, Md. 20897. All Sport vectors contain an ampicillin resistance gene and may be transformed into E. coli strain DH10B, also available from Life Technologies. See, for instance, Gruber, C. E., et al., Focus 15:59- (1993). Vector lafmid BA (Bento Soares, Columbia University, New York, N.Y.) contains an ampicillin resistance gene and can be transformed into E. coli strain XL-1 Blue. Vector pCR®2.1, which is available from Invitrogen, 1600 Faraday Avenue, Carlsbad, Calif. 92008, contains an ampicillin resistance gene and may be transformed into E. coli strain DH10B, available from Life Technologies. See, for instance, Clark, J. M., Nuc. Acids Res. 16:9677-9686 (1988) and Mead, D. et al., Bio/Technology 9: (1991).

[0086] The present invention also relates to the genes corresponding to SEQ ID NO:X, SEQ ID NO:Y, and/or the deposited clone (Clone ID NO:Z). The corresponding gene can be isolated in accordance with known methods using the sequence information disclosed herein. Such methods include preparing probes or primers from the disclosed sequence and identifying or amplifying the corresponding gene from appropriate sources of genomic material.

[0087] Also provided in the present invention are allelic variants, orthologs, and/or species homologs. Procedures known in the art can be used to obtain full-length genes, allelic variants, splice variants, full-length coding portions, orthologs, and/or species homologs of genes corresponding to SEQ ID NO:X or the complement thereof, polypeptides encoded by genes corresponding to SEQ ID NO:X or the complement thereof, and/or the cDNA contained in Clone ID NO:Z, using information from the sequences disclosed herein or the clones deposited with the ATCC. For example, allelic variants and/or species homologs may be isolated and identified by making suitable probes or primers from the sequences provided herein and screening a suitable nucleic acid source for allelic variants and/or the desired homologue.

[0088] The polypeptides of the invention can be prepared in any suitable manner. Such polypeptides include isolated naturally occurring polypeptides, recombinantly produced polypeptides, synthetically produced polypeptides, or polypeptides produced by a combination of these methods. Means for preparing such polypeptides are well understood in the art.

[0089] The polypeptides may be in the form of the secreted protein, including the mature form, or may be a part of a larger protein, such as a fusion protein (see below). It is often advantageous to include an additional amino acid sequence which contains secretory or leader sequences, pro-sequences, sequences which aid in purification, such as,-multiple histidine residues, or an additional sequence for stability during recombinant production.

[0090] The polypeptides of the present invention are preferably provided in an isolated form, and preferably are substantially purified. A recombinantly produced version of a polypeptide, including the secreted polypeptide, can be substantially purified using techniques described herein or otherwise known in the art, such as, for example, by the one-step method described in Smith and Johnson, Gene 67:31-40 (1988). Polypeptides of the invention also can be purified from natural, synthetic or recombinant sources using techniques described herein or otherwise known in the art, such as, for example, antibodies of the invention raised against the polypeptides of the present invention in methods which are well known in the art.

[0091] The present invention provides a polynucleotide comprising, or alternatively consisting of, the nucleic acid sequence of SEQ ID NO:X, and/or the cDNA sequence contained in Clone ID NO:Z. The present invention also provides a polypeptide comprising, or alternatively, consisting of, the polypeptide sequence of SEQ ID NO:Y, a polypeptide encoded by SEQ ID NO:X or a complement thereof, a polypeptide encoded by the cDNA contained in Clone ID NO:Z, and/or the polypeptide sequence encoded by a nucleotide sequence in SEQ ID NO:B as defined in column 6 of Table 1B. Polynucleotides encoding a polypeptide comprising, or alternatively consisting of the polypeptide sequence of SEQ ID NO:Y, a polypeptide encoded by SEQ ID NO:X, a polypeptide encoded by the cDNA contained in Clone ID NO:Z, and/or a polypeptide sequence encoded by a nucleotide sequence in SEQ ID NO:B as defined in column 6 of Table 1B are also encompassed by the invention. The present invention further encompasses a polynucleotide comprising, or alternatively consisting of, the complement of the nucleic acid sequence of SEQ ID NO:X, a nucleic acid sequence encoding a polypeptide encoded by the complement of the nucleic acid sequence of SEQ ID NO:X, and/or the cDNA contained in Clone ID NO:Z.

[0092] Moreover, representative examples of polynucleotides of the invention comprise, or alternatively consist of, one, two, three, four, five, six, seven, eight, nine, ten, or more of the sequences delineated in Table 1B column 6, or any combination thereof. Additional, representative examples of polynucleotides of the invention comprise, or alternatively consist of, one, two, three, four, five, six, seven, eight, nine, ten, or more of the complementary strand(s) of the sequences delineated in Table 1B column 6, or any combination thereof. In further embodiments, the above-described polynucleotides of the invention comprise, or alternatively consist of, sequences delineated in Table 1B, column 6, and have a nucleic acid sequence which is different from that of the BAC fragment having the sequence disclosed in SEQ ID NO:B (see Table 1B, column 5). In additional embodiments, the above-described polynucleotides of the invention comprise, or alternatively consist of, sequences delineated in Table 1B, column 6, and have a nucleic acid sequence which is different from that published for the BAC clone identified as BAC ID NO:A (see Table 1B, column 4). In additional embodiments, the above-described polynucleotides of the invention comprise, or alternatively consist of, sequences delineated in Table 1B, column 6, and have a nucleic acid sequence which is different from that contained in the BAC clone identified as BAC ID NO:A (see Table 1B, column 4). Polypeptides encoded by these polynucleotides, other polynucleotides that encode these polypeptides, and antibodies that bind these polypeptides are also encompassed by the invention. Additionally, fragments and variants of the above-described polynucleotides and polypeptides are also encompassed by the invention.

[0093] Further, representative examples of polynucleotides of the invention comprise, or alternatively consist of, one, two, three, four, five, six, seven, eight, nine, ten, or more of the sequences delineated in column 6 of Table 1B which correspond to the same Clone ID NO:Z (see Table 1B, column 1), or any combination thereof. Additional, representative examples of polynucleotides of the invention comprise, or alternatively consist of, one, two, three, four, five, six, seven, eight, nine, ten, or more of the complementary strand(s) of the sequences delineated in column 6 of Table 1B which correspond to the same Clone ID NO:Z (see Table 1B, column 1), or any combination thereof. In further embodiments, the above-described polynucleotides of the invention comprise, or alternatively consist of, sequences delineated in column 6 of Table 1B which correspond to the same Clone ID NO:Z (see Table 1B, column 1) and have a nucleic acid sequence which is different from that of the BAC fragment having the sequence disclosed in SEQ ID NO:B (see Table 1B, column 5). In additional embodiments, the above-described polynucleotides of the invention comprise, or alternatively consist of, sequences delineated in column 6 of Table 1B which correspond to the same Clone ID NO:Z (see Table 1B, column 1) and have a nucleic acid sequence which is different from that published for the BAC clone identified as BAC ID NO:A (see Table 1B, column 4). In additional embodiments, the above-described polynucleotides of the invention comprise, or alternatively consist of, sequences delineated in column 6 of Table 1B which correspond to the same Clone ID NO:Z (see Table 1B, column 1) and have a nucleic acid sequence which is different from that contained in the BAC clone identified as BAC ID NO:A (see Table 1B, column 4). Polypeptides encoded by these polynucleotides, other polynucleotides that encode these polypeptides, and antibodies that bind these polypeptides are also encompassed by the invention. Additionally, fragments and variants of the above-described polynucleotides and polypeptides are also encompassed by the invention.

[0094] Further, representative examples of polynucleotides of the invention comprise, or alternatively consist of, one, two, three, four, five, six, seven, eight, nine, ten, or more of the sequences delineated in column 6 of Table 1B which correspond to the same contig sequence identifer SEQ ID NO:X (see Table 1B, column 2), or any combination thereof. Additional, representative examples of polynucleotides of the invention comprise, or alternatively consist of, one, two, three, four, five, six, seven, eight, nine, ten, or more of the complementary strand(s) of the sequences delineated in column 6 of Table 1B which correspond to the same contig sequence identifer SEQ ID NO:X (see Table 1B, column 2), or any combination thereof. In further embodiments, the above-described polynucleotides of the invention comprise, or alternatively consist of, sequences delineated in column 6 of Table 1B which correspond to the same contig sequence identifer SEQ ID NO:X (see Table 1B, column 2) and have a nucleic acid sequence which is different from that of the BAC fragment having the sequence disclosed in SEQ ID NO:B (see Table 1B, column 5). In additional embodiments, the above-described polynucleotides of the invention comprise, or alternatively consist of, sequences delineated in column 6 of Table 1B which correspond to the same contig sequence identifer SEQ ID NO:X (see Table 1B, column 2) and have a nucleic acid sequence which is different from that published for the BAC clone identified as BAC ID NO:A (see Table 1B, column 4). In additional embodiments, the above-described polynucleotides of the invention comprise, or alternatively consist of, sequences delineated in column 6 of Table 1B which correspond to the same contig sequence identifer SEQ ID NO:X (see Table 1B, column 2) and have a nucleic acid sequence which is different from that contained in the BAC clone identified as BAC ID NO:A (See Table 1B, column 4). Polypeptides encoded by these polynucleotides, other polynucleotides that encode these polypeptides, and antibodies that bind these polypeptides are also encompassed by the invention. Additionally, fragments and variants of the above-described polynucleotides and polypeptides are also encompassed by the invention.

[0095] Moreover, representative examples of polynucleotides of the invention comprise, or alternatively consist of, one, two, three, four, five, six, seven, eight, nine, ten, or more of the sequences delineated in the same row of Table 1B column 6, or any combination thereof. Additional, representative examples of polynucleotides of the invention comprise, or alternatively consist of, one, two, three, four, five, six, seven, eight, nine, ten, or more of the complementary strand(s) of the sequences delineated in the same row of Table 1B column 6, or any combination thereof. In preferred embodiments, the polynucleotides of the invention comprise, or alternatively consist of, one, two, three, four, five, six, seven, eight, nine, ten, or more of the complementary strand(s) of the sequences delineated in the same row of Table 1B column 6, wherein sequentially delineated sequences in the table (i.e. corresponding to those exons located closest to each other) are directly contiguous in a 5′ to 3′ orientation. In further embodiments, above-described polynucleotides of the invention comprise, or alternatively consist of, sequences delineated in the same row of Table 1B, column 6, and have a nucleic acid sequence which is different from that of the BAC fragment having the sequence disclosed in SEQ ID NO:B (see Table 1B, column 5). In additional embodiments, the above-described polynucleotides of the invention comprise, or alternatively consist of, sequences delineated in the same row of Table 1B, column 6, and have a nucleic acid sequence which is different from that published for the BAC clone identified as BAC ID NO:A (see Table 1B, column 4). In additional embodiments, the above-described polynucleotides of the invention comprise, or alternatively consist of, sequences delineated in the same row of Table 1B, column 6, and have a nucleic acid sequence which is different from that contained in the BAC clone identified as BAC ID NO:A (see Table 1B, column 4). Polypeptides encoded by these polynucleotides, other polynucleotides that encode these polypeptides, and antibodies that bind these polypeptides are also encompassed by the invention.

[0096] In additional specific embodiments, polynucleotides of the invention comprise, or alternatively consist of, one, two, three, four, five, six, seven, eight, nine, ten, or more of the sequences delineated in column 6 of Table 1B, and the polynucleotide sequence of SEQ ID NO:X (e.g., as defined in Table 1B, column 2) or fragments or variants thereof. Polypeptides encoded by these polynucleotides, other polynucleotides that encode these polypeptides, and antibodies that bind these polypeptides are also encompassed by the invention.

[0097] In additional specific embodiments, polynucleotides of the invention comprise, or alternatively consist of, one, two, three, four, five, six, seven, eight, nine, ten, or more of the sequences delineated in column 6 of Table 1B which correspond to the same Clone ID NO:Z (see Table 1B, column 1), and the polynucleotide sequence of SEQ ID NO:X (e.g., as defined in Table 1A or 1B) or fragments or variants thereof. In preferred embodiments, the delineated sequence(s) and polynucleotide sequence of SEQ ID NO:X correspond to the same Clone ID NO:Z. Polypeptides encoded by these polynucleotides, other polynucleotides that encode these polypeptides, and antibodies that bind these polypeptides are also encompassed by the invention.

[0098] In further specific embodiments, polynucleotides of the invention comprise, or alternatively consist of, one, two, three, four, five, six, seven, eight, nine, ten, or more of the sequences delineated in the same row of column 6 of Table 1B, and the polynucleotide sequence of SEQ ID NO:X (e.g., as defined in Table 1A or 1B) or fragments or variants thereof. In preferred embodiments, the delineated sequence(s) and polynucleotide sequence of SEQ ID NO:X correspond to the same row of column 6 of Table 1B. Polypeptides encoded by these polynucleotides, other polynucleotides that encode these polypeptides, and antibodies that bind these polypeptides are also encompassed by the invention.

[0099] In additional specific embodiments, polynucleotides of the invention comprise, or alternatively consist of a polynucleotide sequence in which the 3′ 10 polynucleotides of one of the sequences delineated in column 6 of Table 1B and the 5′ 10 polynucleotides of the sequence of SEQ ID NO:X are directly contiguous. Nucleic acids which hybridize to the complement of these 20 contiguous polynucleotides under stringent hybridization conditions or alternatively, under lower stringency conditions, are also encompassed by the invention. Polypeptides encoded by these polynucleotides and/or nucleic acids, other polynucleotides and/or nucleic acids that encode these polypeptides, and antibodies that bind these polypeptides are also encompassed by the invention. Additionally, fragments and variants of the above-described polynucleotides, nucleic acids, and polypeptides are also encompassed by the invention.

[0100] In additional specific embodiments, polynucleotides of the invention comprise, or alternatively consist of, a polynucleotide sequence in which the 3′ 10 polynucleotides of one of the sequences delineated in column 6 of Table 1B and the 5′ 10 polynucleotides of a fragment or variant of the sequence of SEQ ID NO:X are directly contiguous Nucleic acids which hybridize to the complement of these 20 contiguous polynucleotides under stringent hybridization conditions or alternatively, under lower stringency conditions, are also encompassed by the invention. Polypeptides encoded by these polynucleotides and/or nucleic acids, other polynucleotides and/or nucleic acids encoding these polypeptides, and antibodies that bind these polypeptides are also encompassed by the invention. Additionally, fragments and variants of the above-described polynucleotides, nucleic acids, and polypeptides are also encompassed by the invention.

[0101] In specific embodiments, polynucleotides of the invention comprise, or alternatively consist of, a polynucleotide sequence in which the 3′ 10 polynucleotides of the sequence of SEQ ID NO:X and the 5′ 10 polynucleotides of the sequence of one of the sequences delineated in column 6 of Table 1B are directly contiguous. Nucleic acids which hybridize to the complement of these 20 contiguous polynucleotides under stringent hybridization conditions or alternatively, under lower stringency conditions, are also encompassed by the invention. Polypeptides encoded by these polynucleotides and/or nucleic acids, other polynucleotides and/or nucleic acids encoding these polypeptides, and antibodies that bind these polypeptides are also encompassed by the invention. Additionally, fragments and variants of the above-described polynucleotides, nucleic acids, and polypeptides are also encompassed by the invention.

[0102] In specific embodiments, polynucleotides of the invention comprise, or alternatively consist of, a polynucleotide sequence in which the 3′ 10 polynucleotides of a fragment or variant of the sequence of SEQ ID NO:X and the 5′ 10 polynucleotides of the sequence of one of the sequences delineated in column 6 of Table 1B are directly contiguous. Nucleic acids which hybridize to the complement of these 20 contiguous polynucleotides under stringent hybridization conditions or alternatively, under lower stringency conditions, are also encompassed by the invention. Polypeptides encoded by these polynucleotides and/or nucleic acids, other polynucleotides and/or nucleic acids encoding these polypeptides, and antibodies that bind these polypeptides are also encompassed by the invention. Additionally, fragments and variants of the above-described polynucleotides, nucleic acids, and polypeptides, are also encompassed by the invention.

[0103] In further specific embodiments, polynucleotides of the invention comprise, or alternatively consist of, a polynucleotide sequence in which the 3′ 10 polynucleotides of one of the sequences delineated in column 6 of Table 1B and the 5′ 10 polynucleotides of another sequence in column 6 are directly contiguous. Nucleic acids which hybridize to the complement of these 20 contiguous polynucleotides under stringent hybridization conditions or alternatively, under lower stringency conditions, are also encompassed by the invention. Polypeptides encoded by these polynucleotides and/or nucleic acids, other polynucleotides and/or nucleic acids encoding these polypeptides, and antibodies that bind these polypeptides are also encompassed by the invention. Additionally, fragments and variants of the above-described polynucleotides, nucleic acids, and polypeptides are also encompassed by the invention.

[0104] In specific embodiments, polynucleotides of the invention comprise, or alternatively consist of, a polynucleotide sequence in which the 3′ 10 polynucleotides of one of the sequences delineated in column 6 of Table 1B and the 5′ 10 polynucleotides of another sequence in column 6 corresponding to the same Clone ID NO:Z (see Table 1B, column 1) are directly contiguous. Nucleic acids which hybridize to the complement of these 20 lower stringency conditions, are also encompassed by the invention. Polypeptides encoded by these polynucleotides and/or nucleic acids, other polynucleotides and/or nucleic acids encoding these polypeptides, and antibodies that bind these polypeptides are also encompassed by the invention. Additionally, fragments and variants of the above-described polynucleotides, nucleic acids, and polypeptides are also encompassed by the invention.

[0105] In specific embodiments, polynucleotides of the invention comprise, or alternatively consist of, a polynucleotide sequence in which the 3′ 10 polynucleotides of one sequence in column 6 corresponding to the same contig sequence identifer SEQ ID NO:X (see Table 1B, column 2) are directly contiguous. Nucleic acids which hybridize to the complement of these 20 contiguous polynucleotides under stringent hybridization conditions or alternatively, under lower stringency conditions, are also encompassed by the invention. Polypeptides encoded by these polynucleotides and/or nucleic acids, other polynucleotides and/or nucleic acids encoding these polypeptides, and antibodies that bind these polypeptides are also encompassed by the invention. Additionally, fragments and variants of the above-described polynucleotides, nucleic acids, and polypeptides are also encompassed by the invention.

[0106] In specific embodiments, polynucleotides of the invention comprise, or alternatively consist of a polynucleotide sequence in which the 3′ 10 polynucleotides of one of the sequences delineated in column 6 of Table 1B and the 5′ 10 polynucleotides of another sequence in column 6 corresponding to the same row are directly contiguous. In preferred embodiments, the 3′ 10 polynucleotides of one of the sequences delineated in column 6 of Table 1B is directly contiguous with the 5′ 10 polynucleotides of the next sequential exon delineated in Table 1B, column 6. Nucleic acids which hybridize to the complement of these 20 contiguous polynucleotides under stringent hybridization conditions or alternatively, under lower stringency conditions, are also encompassed by the invention. Polypeptides encoded by these polynucleotides and/or nucleic acids, other polynucleotides and/or nucleic acids encoding these polypeptides, and antibodies that bind these polypeptides are also encompassed by the invention. Additionally, fragments and variants of the above-described polynucleotides, nucleic acids, and polypeptides are also encompassed by the invention.

[0107] Many polynucleotide sequences, such as EST sequences, are publicly available and accessible through sequence databases and may have been publicly available prior to conception of the present invention. Preferably, such related polynucleotides are specifically excluded from the scope of the present invention. Accordingly, for each contig sequence (SEQ ID NO:X) listed in the fourth column of Table 1A, preferably excluded are one or more polynucleotides comprising a nucleotide sequence described by the general formula of a-b, where a is any integer between 1 and the final nucleotide minus 15 of SEQ ID NO:X, b is an integer of 15 to the final nucleotide of SEQ ID NO:X, where both a and b correspond to the positions of nucleotide residues shown in SEQ ID NO:X, and where b is greater than or equal to a+14. More specifically, preferably excluded are one or more polynucleotides comprising a nucleotide sequence described by the general formula of a-b, where a and b are integers as defined in columns 4 and 5, respectively, of Table 3. In specific embodiments, the polynucleotides of the invention do not consist of at least one, two, three, four, five, ten, or more of the specific polynucleotide sequences referenced by the Genbank Accession No. as disclosed in column 6 of Table 3 (including for example, published sequence in connection with a particular BAC clone). In further embodiments, preferably excluded from the invention are the specific polynucleotide sequence(s) contained in the clones corresponding to at least one, two, three, four, five, ten, or more of the available material having the accession numbers identified in the sixth column of this Table (including for example, the actual sequence contained in an identified BAC clone). In no way is this listing meant to encompass all of the sequences which may be excluded by the general formula, it is just a representative example. All references available through these accessions are hereby incorporated by reference in their entirety.

TABLE 3

| | SEQ | | | | |
|---|---|---|---|---|---|
| | ID | | | | |
| Clone ID | NO: | Contig | EST Disclaimer | | |
| NO: Z | X | ID: | Range of a | Range of b | Accession #'s |
| HDPTE21 | 11 | 1165861 | 1-4732 | 15-4746 | |
| H6EDR51 | 12 | 1197894 | 1-2300 | 15-2314 | |
| HAPRA41 | 13 | 1154054 | 1-1264 | 15-1278 | |
| HBXBI07 | 14 | 1171958 | 1-339 | 15-353 | |
| HBXCM38 | 15 | 910086 | 1-2160 | 15-2174 | AI752485, AI804792, AI439106, AI971133, |
| | | | | | AI991958, AI752484, AI432296, AI478420, |
| | | | | | AW082819, AI912373, R89026, AA894797, |
| | | | | | AI554161, AI752414, H13307, AI249165, |
| | | | | | R61527, N62403, R89727, N47856, |
| | | | | | AI689339, AI368569, R61583, AI984780, |
| | | | | | AA219502, H44175, AI802627, AI752415, |
| | | | | | T32963, AW295386, AA985168, H06745, |
| | | | | | R40750, M79099, AA203312, R00511, |
| | | | | | A91842, A91846, A91844, and A91848. |
| HCE3E50 | 16 | 1227586 | 1-3775 | 15-3789 | |
| HCEQD04 | 17 | 1150868 | 1-625 | 15-639 | |
| HDPHI92 | 18 | 909900 | 1-2933 | 15-2947 | AC068341. |
| HDPLT89 | 19 | 962403 | 1-2437 | 15-2451 | |
| HDPSU48 | 20 | 1228284 | 1-2902 | 15-2916 | |
| HDPWE80 | 21 | 909916 | 1-932 | 15-946 | |
| HDQFY84 | 22 | 1092137 | 1-3253 | 15-3267 | |
| HEONQ19 | 23 | 930705 | 1-897 | 15-911 | |
| HFCBBS6 | 24 | 910073 | 1-553 | 15-567 | AA339423, and AC068296. |
| HFKKZ94 | 25 | 1163070 | 1-1318 | 15-1332 | |
| HHBGJ53 | 26 | 1187668 | 1-388 | 15-402 | |
| HHFJF24 | 27 | 1212624 | 1-2787 | 15-2801 | |
| HHFMM10 | 28 | 1178801 | 1-1857 | 15-1871 | |
| HHPBA42 | 29 | 901921 | 1-899 | 15-913 | |
| HHPSP89 | 30 | 1217052 | 1-2277 | 15-2291 | |
| HKABX13 | 31 | 1167182 | 1-970 | 15-984 | |
| HLTHG77 | 32 | 1162409 | 1-392 | 15-406 | |
| HLWBZ09 | 33 | 1179714 | 1-1940 | 15-1954 | |
| HLWEH54 | 34 | 1227713 | 1-4510 | 15-4524 | |
| HLYAA41 | 35 | 1188029 | 1-797 | 15-811 | |
| HLYDV62 | 36 | 1154065 | 1-805 | 15-819 | |
| HMCFB47 | 37 | 1151498 | 1-796 | 15-810 | |
| HMSOI20 | 38 | 1178817 | 1-2431 | 15-2445 | |
| HOENH55 | 39 | 1163460 | 1-612 | 15-626 | |
| HPIAI01 | 40 | 1078178 | 1-926 | 15-940 | |
| HPJCT50 | 41 | 1201773 | 1-1983 | 15-1997 | |
| HPMFE91 | 42 | 1164740 | 1-1867 | 15-1881 | |
| HRAED51 | 43 | 1090522 | 1-645 | 15-659 | |
| HSMBA19 | 44 | 1197925 | 1-2252 | 15-2266 | |
| HSYCY88 | 45 | 914775 | 1-1128 | 15-1142 | |
| HTEDW26 | 46 | 909749 | 1-1158 | 15-1172 | |
| HTEKD92 | 47 | 1090524 | 1-1447 | 15-1461 | |
| HTLDT05 | 48 | 1227127 | 1-2672 | 15-2686 | |
| HTPDS90 | 49 | 1197926 | 1-1920 | 15-1934 | |
| HTPHM71 | 50 | 1194698 | 1-2017 | 15-2031 | |
| HUUAR12 | 51 | 1194702 | 1-1704 | 15-1718 | |
| HWAGP22 | 52 | 1150195 | 1-1716 | 15-1730 | |
| HWBCE37 | 53 | 906968 | 1-418 | 15-432 | |
| HWLFB60 | 54 | 1223499 | 1-2867 | 15-2881 | |
| HDPGS51 | 55 | 51075725 | 1-447 | 15-461 | |
| HDQDV69 | 56 | 937850 | 1-837 | 15-851 | AA887783, AW392670, U46341, AL119457, |
| | | | | | AL119341, AW372827, U46346, AW384394, |
| | | | | | AW363220, AL119484, AL119497, |
| | | | | | AL119355, AL119319, AL119324, |
| | | | | | AL119443, Z99396, U46350, U46351, |
| | | | | | AL119363, AL119391, AL119444, |
| | | | | | AL134902, U46347, U46349, AL119483, |
| | | | | | AL119396, AL134528, AL119418, |
| | | | | | AL119335, AL119496, AL119439, |
| | | | | | AL042433, AL119522, AL042965, |
| | | | | | AL134524, AL119399, AL134920, |
| | | | | | AL037205, AL119401, U46345, AL134536, |
| | | | | | AI142132, AL119464, AL042450, AL042614, |
| | | | | | AL043029, AL134525, AL134538, AI142131, |
| | | | | | AL042551, AL042984, AL042975, |
| | | | | | AL042544, AL043019, AL042970, AI142134, |
| | | | | | AL042542, AL043003, AL119488, AF169035, |
| | | | | | AF085233, AB026436, AR054110, A81671, |
| | | | | | AR066494, AR060234, and AR069079. |
| HE6BK63 | 57 | 1153879 | 1-755 | 15-769 | |
| HFKDR14 | 58 | 974255 | 1-1721 | 15-1735 | AI761729, AW162515, AW104395, |
| | | | | | AW298361, AI073443, N40162, AI832126, |
| | | | | | AI827518, AW297353, R52045, AI342317, |
| | | | | | R71958, AF128625, AF021936, and |
| | | | | | AB032950. |
| HFPER82 | 59 | 1152249 | 1-619 | 15-633 | |
| HAAAO58 | 60 | 1091088 | 1-1309 | 15-1323 | |
| HADFK69 | 61 | 1091937 | 1-1603 | 15-1617 | |
| HDPMO62 | 62 | 1152329 | 1-1123 | 15-1137 | |
| HDPMO85 | 63 | 1228282 | 1-2479 | 15-2493 | |
| HDPUY72 | 64 | 1228285 | 1-3040 | 15-3054 | |
| HDTJF87 | 65 | 1154640 | 1-826 | 15-840 | |
| HE8TB94 | 66 | 1178794 | 1-1913 | 15-1927 | |
| HE8UB55 | 67 | 1228113 | 1-3332 | 15-3346 | |
| HEBGA65 | 68 | 1178633 | 1-1803 | 15-1817 | |
| HEGBB59 | 69 | 1197907 | 1-2465 | 15-2479 | |
| HELHC48 | 70 | 956003 | 1-803 | 15-817 | |
| HEOQH90 | 71 | 1212646 | 1-2609 | 15-2623 | |
| HFKHA18 | 72 | 1152242 | 1-1055 | 15-1069 | |
| HFKMA10 | 73 | 964258 | 1-960 | 15-974 | |
| HHBFM91 | 74 | 1092116 | 1-901 | 15-915 | |
| HIBBF63 | 75 | 912715 | 1-950 | 15-964 | AC012171, AC012171, AC012171, |
| | | | | | AC009065, AC009065, AC009065, |
| | | | | | AC005346, AC005346, and AC005346. |
| HMCEI38 | 76 | 1134410 | 1-613 | 15-627 | |
| HMWJD68 | 77 | 1154790 | 1-1350 | 15-1364 | |
| HOEOL58 | 78 | 1078090 | 1-778 | 15-792 | |
| HRACA51 | 79 | 1162856 | 1-1075 | 15-1089 | |
| HSHAV32 | 80 | 1180388 | 1-2589 | 15-2603 | |
| HTPDE66 | 81 | 971281 | 1-479 | 15-493 | |
| HTPDV73 | 82 | 997659 | 1-411 | 15-425 | |
| HTPHE33 | 83 | 1163871 | 1-1714 | 15-1728 | |
| HUFDN58 | 84 | 1224609 | 1-2404 | 15-2418 | |
| HUVFX92 | 85 | 1225329 | 1-428 | 15-442 | |
| HWAEG71 | 86 | 1182321 | 1-1471 | 15-1485 | |
| HWAHD49 | 87 | 1228064 | 1-1365 | 15-1379 | |
| HWLGG31 | 88 | 1178825 | 1-2007 | 15-2021 | |
| HWLKF25 | 89 | 1089052 | 1-1097 | 15-1111 | |
| H2CBH45 | 90 | 963811 | 1-470 | 15-484 | AA307462, AA036880, AL133047, D89677, |
| | | | | | AC068243, and AC068243. |
| HAGDN53 | 91 | 1092161 | 1-1702 | 15-1716 | |
| HAMFM39 | 92 | 971347 | 1-4593 | 15-4607 | AI951619, AI814592, AI745391, AI922346, |
| | | | | | AA426190, AW105735, AW297557, |
| | | | | | AI829867, AI971865, AA227834, AW028756, |
| | | | | | AA151872, AA757072, AI202419, |
| | | | | | AW176248, AW295401, AI659079, |
| | | | | | AA149658, AA425159, AI765117, AI870033, |
| | | | | | AW194075, AA233413, AW102818, R61588, |
| | | | | | AA365664, AA365663, AA601170, R61532, |
| | | | | | AA357346, AA551861, AI660231, AI467782, |
| | | | | | Z99396, AW392670, AL119324, AL119319, |
| | | | | | U46350, U46351, AL119457, AL119484, |
| | | | | | AL119391, U46347, AW372827, AL119522, |
| | | | | | AL119439, AL119335, AW384394, |
| | | | | | AL119483, AW363220, AL119363, |
| | | | | | AL119497, U46349, AL119355, AL119444, |
| | | | | | AL119443, U46341, AL134518, AL134525, |
| | | | | | AL119341, AL037205, AL119401, U46346, |
| | | | | | AL119396, AL134538, AL134531, |
| | | | | | AL134528, AL119418, AL119496, |
| | | | | | AL119399, U46345, AL134524, AL042544, |
| | | | | | AL042614, AL042984, AL042542, |
| | | | | | AL043019, AL042450, AL134542, |
| | | | | | AL043003, AL042965, AL042975, |
| | | | | | AL043029, AL042551, AL119464, I05430, |
| | | | | | I05393, A10617, AR028792, AR028791, |
| | | | | | AR028793, I25027, AR054109, I44515, |
| | | | | | I26928, I26930, I26927, I25041, I44516, |
| | | | | | A01324, AR035224, AR009151, I85513, |
| | | | | | AR009152, A01323, AR027099, AR034783, |
| | | | | | A94046, A94054, I63120, AR067733, |
| | | | | | AR064322, AR064323, AR064320, |
| | | | | | AR064321, A32110, A94048, A94061, |
| | | | | | A49045, AR038321, A83642, AR019094, |
| | | | | | A83643, A70359, A92666, AR038307, |
| | | | | | A92668, A92667, I49890, A92665, A92081, |
| | | | | | A92080, A92077, A92078, A92079, |
| | | | | | AR018924, AR018923, A48774, A48775, |
| | | | | | AR000006, AR015960, AR015961, |
| | | | | | AR000007, A91752, A91751, AR051652, |
| | | | | | A85308, AR068508, AR068510, AR068509, |
| | | | | | I91969, A91754, I58322, I58323, AR003585, |
| | | | | | A63067, A51047, A63064, A63072, |
| | | | | | AR031375, AR068507, A60213, AR068506, |
| | | | | | AR062871, A44171, AR068550, A23373, |
| | | | | | AR068551, A49700, A60207, A60208, |
| | | | | | A29109, A32111, I58669, A58521, |
| | | | | | AR031374, I07209, I07249, A63954, |
| | | | | | AR051651, AR019097, AR019098, |
| | | | | | AR019096, AR029417, I77227, AR020199, |
| | | | | | AR020200, AR001287, AR020198, |
| | | | | | AR020197, I89986, AR051957, AR029418, |
| | | | | | AR067734, AR067731, AR067732, Y14971, |
| | | | | | A93444, A46342, A46343, AB026436, |
| | | | | | I09121, AR032878, AR060234, AR066494, |
| | | | | | A81671, AR054110, and AR069079. |
| HBGQT03 | 93 | 908173 | 1-1196 | 15-1210 | AW193981,AA576536,AW439879, |
| | | | | | AA218860, AA587394, AI735027, |
| | | | | | AW206358, AI075695, AI749755, AI073515, |
| | | | | | AI283940, AI828816, AW328242, AA452508, |
| | | | | | AI741698, F25077, AA454093, AI280249, |
| | | | | | AI826261, AI567379, AA350150, AI251129, |
| | | | | | F26225, AI354257, AA171893, AW129660, |
| | | | | | AI357160, F26293, F36700, H24638, |
| | | | | | AI270014, M952189, AA834233, AI689497, |
| | | | | | AI688448, F17480, Z38509, T11668, N93072, |
| | | | | | AW362737, T11669, AW273866, N93071, |
| | | | | | AW328241, AF130979, AC024045, |
| | | | | | AC024045, and AC024045. |
| HBGSJ13 | 94 | 1150790 | 1-808 | 15-822 | |
| HBIBQ89 | 95 | 909782 | 1-851 | 15-865 | AA399613, F11248, Z42117, AA082253, |
| | | | | | F05395, T35421, and AB007925. |
| HCECM90 | 96 | 945088 | 1-1379 | 15-1393 | AA463356, AA453500, AA322899, |
| | | | | | AA340682, H24259, AA603868, AA330182, |
| | | | | | R19782, and AB023227. |
| HGEPH71 | 97 | 522739 | 1-432 | 15-446 | AA326209, AA383931, AL365319, and |
| | | | | | AL390715. |
| HCFMT57 | 98 | 1175204 | 1-2197 | 15-2211 | |
| HCOMM05 | 99 | 1173146 | 1-1625 | 15-1639 | |
| HCOOZ11 | 100 | 965306 | 1-689 | 15-703 | AI350354, AI904299, AI902503, D61534, |
| | | | | | T78554, AW183962, AI218626, AW304978, |
| | | | | | W74167, AI081779, AL022238, AL137499, |
| | | | | | AL022238, AL022238, and AL022238. |
| HCWIFF88 | 101 | 506577 | 1-304 | 15-318 | AL157951, AL157951, AL157951, and |
| | | | | | AC025670. |
| HDMAV01 | 102 | 1194696 | 1-1796 | 15-1810 | |
| HDPDA47 | 103 | 929193 | 1-1036 | 15-1050 | AW402583, AL049683, and AL023653. |
| HDPFF24 | 104 | 909232 | 1-447 | 15-461 | AI929099, AI566117, AI928828, N88094, |
| | | | | | AA365879, AA281290, H67457, N87549, |
| | | | | | AW450464, AA295368, AA527887, |
| | | | | | AI033615, AA354369, AA086081, and |
| | | | | | AA903373. |
| HDPPO35 | 105 | 966248 | 1-1890 | 15-1904 | AI640500, AW439548, AI823872, |
| | | | | | AW297416, AA831672, AI815031, |
| | | | | | AA994323, AA741162, AA471280, |
| | | | | | AI223999, AW339548, AW235171, |
| | | | | | AI635436, AA035703, AA747998, AI371399, |
| | | | | | N67227, AA361754, AA063573, AI536057, |
| | | | | | AI357169, R33401, C01451, R33402, |
| | | | | | AA825399, AF165138, and AF130247. |
| HDPSR74 | 106 | 911396 | 1-709 | 15-723 | |
| HDTKQ14 | 107 | 886936 | 1-541 | 15-555 | AL023653, AL049683, AL359542, |
| | | | | | AL359542, and AL359542. |
| HE6GF02 | 108 | 1150897 | 1-790 | 15-804 | |
| HE8PK12 | 109 | 909884 | 1-707 | 15-721 | AA296029, AL117472, U58883, AF136380, |
| | | | | | AF136381, AF078667, and AF078666. |
| HE9SE62 | 110 | 911476 | 1-915 | 15-929 | AW021430, AI765247, AI822051, AI822104, |
| | | | | | AA010459, N70537, AL133567, and |
| | | | | | AB018312. |
| HEOPL36 | 111 | 1195682 | 1-2095 | 15-2109 | |
| HFBDJ13 | 112 | 911264 | 1-476 | 15-490 | M86084, and AF030131. |
| HFTDF15 | 113 | 657020 | 1-367 | 15-381 | AL365277, AL365277, AL365277, |
| | | | | | AC024511, AC024511, and AC024511. |
| HHEQV39 | 114 | 932851 | 1-873 | 15-887 | AA355773, and AA355926. |
| HHFCK09 | 115 | 965304 | 1-2789 | 15-2803 | M218626, AI076006, AW162820, AI797880, |
| | | | | | AI922744, AI872391, AI559566, AL045117, |
| | | | | | AW161046, AW162613, AI565503, |
| | | | | | AW183962, AI857802, AA460810, AI884907, |
| | | | | | AI371131, AW248493, AI081779, AA460372, |
| | | | | | AA679085, N27884, AA581796, AA074070, |
| | | | | | AA971563, AI292006, AI922373, W76538, |
| | | | | | N93245, AI609183, AW172513, AI904299, |
| | | | | | AI682939, AA075764, AI885613, AA747871, |
| | | | | | AA449042, AA928020, AW401847, |
| | | | | | AA449757, AW268637, AW073851, |
| | | | | | AW304978, AI683858, AA568598, W74167, |
| | | | | | AI367698, AW191998, N62781, AW016535, |
| | | | | | AI902503, AA347639, AA297591, |
| | | | | | AA379280, AA568887, AA649970, |
| | | | | | AW264577, AI221886, H20460, AW387087, |
| | | | | | AW000860, AI275195, AA341002, T32918, |
| | | | | | AW162711, W25103, AI699657, R42681, |
| | | | | | AW243790, AA768740, T78554, AI279653, |
| | | | | | AI560482, AI696251, AI951374, Z45830, |
| | | | | | AA147203, AI499410, R43259, AI350354, |
| | | | | | AA732831, AW079129, AA375228, F08622, |
| | | | | | AI475009, R56337, AA379846, R17163, |
| | | | | | AW380349, AA783050, AW247402, N47545, |
| | | | | | R35508, R51077, AI474934, N79729, |
| | | | | | D61534, Z41466, AI678630, AA339343, |
| | | | | | AW367003, AA160401, Z41592, AW079321, |
| | | | | | N47546 AI252528, R58857, T16943, H55297, |
| | | | | | AL022238, AL137499, and AJ236700. |
| HISDS62 | 116 | 935932 | 1-506 | 15-520 | W27339, AA126105, AA306119, W27700, |
| | | | | | AB007884, and AJ250425. |
| HLQDT35 | 117 | 839777 | 1-516 | 15-530 | AA706241, AA707183, AA152440, N99172, |
| | | | | | AA131985, AA358765, AA253107, R10421, |
| | | | | | N56752, AA290907, R08557, AA485099, |
| | | | | | AI091625, AA134742, AL137699, AC010998, |
| | | | | | AC010998, AC010998, AC013357, |
| | | | | | AC013357, and AC013357. |
| HLWFN63 | 118 | 908437 | 1-3089 | 15-3103 | AA707313, AI880426, AI684827, AI744551, |
| | | | | | AI307796, AA101249, AI284152, AA007399, |
| | | | | | N98643, AI375268, N66095, R71685, |
| | | | | | R02817, AA085724, AI221876, AI061056, |
| | | | | | AW207571, AA111956, AI460369, AI333887, |
| | | | | | AA594062, R18624, R62793, W22434, |
| | | | | | AW007868, AA776586, T70023, R71720, |
| | | | | | H70803, AA323135, AA101290, AA029721, |
| | | | | | AA320669, AI193496, R07828, AA007478, |
| | | | | | AI915644, AI932703, T69946, R62792, |
| | | | | | AA029660, AI859215, AA205667, AI625446, |
| | | | | | AI273982, AB018333, AC006599, AL033378, |
| | | | | | AL033378, AC006599, and AC006599. |
| HMEFT66 | 119 | 856149 | 1-337 | 15-351 | |
| HMSCD15 | 120 | 918133 | 1-1223 | 15-1237 | AA828277, AI707568, AI333720, W33154, |
| | | | | | AI880870, AA848014, AA864599, N50622, |
| | | | | | AW087770, AW270419, AA761244, |
| | | | | | AA262754, AA779760, AI880826, |
| | | | | | AW407353, W37119, AA206843, Z42584, |
| | | | | | AA206842, AB011126, AL158207, |
| | | | | | AL158207, and AC027008. |
| HMSH064 | 121 | 746582 | 1-398 | 15-412 | |
| HMTAW83 | 122 | 911385 | 1-487 | 15-501 | AI908321,AA831896,AR058970,AR058968, |
| | | | | | A68194, and AR058969. |
| HMVAM09 | 123 | 963814 | 1-1009 | 15-1023 | AI685410, AI969804, AA621392, AA358533, |
| | | | | | AW135812, AI376856, and AI276887. |
| HNSAA28 | 124 | 946988 | 1-1544 | 15-1558 | AA713959, AI564093, AA768779, |
| | | | | | AA825697, AA808021, AA808149, |
| | | | | | AI401490, AW181992, AW444640, |
| | | | | | AI018159, AF146277, and AF077003. |
| HOGEQ43 | 125 | 1226207 | 1-4196 | 15-4210 | |
| HOUDH19 | 126 | 1150918 | 1-515 | 15-529 | |
| HOUFT36 | 127 | 911293 | 1-832 | 15-846 | AI806483, AI147946, AA256164, AW236751, |
| | | | | | AA057615, AW362445, AA542823, |
| | | | | | AF162130, AC005084, and AF161181. |
| HPMFL08 | 128 | 959569 | 1-452 | 15-466 | AA555286, AA640814, AI281916, |
| | | | | | AW073979, AI378363, R70468, AW242350, |
| | | | | | AW013856, AA644290, AW449140, Z93016, |
| | | | | | AC012384, AL035541, AC005228, |
| | | | | | AC003662, AC009300, and Z93016. |
| HRSMD49 | 129 | 723025 | 1-443 | 15-457 | AA136820. |
| HSDII69 | 130 | 917180 | 1-1612 | 15-1626 | AA203346, AA203330, AA489694, |
| | | | | | AI912487, AW024848, AA133454, |
| | | | | | AA640288, AA658936, Z24863, AA665267, |
| | | | | | AA878769, AI024792, AI383978, AW022618, |
| | | | | | T31809, AA318980, T86474, AA669824, |
| | | | | | AA115749, AW296909, AA552781, |
| | | | | | AI459513, AI332862, AI332863, and T86475. |
| HSDSB06 | 131 | 949151 | 1-2264 | 15-2278 | AW009631, AI765056, AA877550, |
| | | | | | AA102362, AA625117, AA447454, |
| | | | | | AA446651, AA724535, AI220147, |
| | | | | | AA430607, AA019158, AI198643, |
| | | | | | AW389353, AA516463, AW197881, |
| | | | | | AA045561, AA186967, H86071, H67029, |
| | | | | | AW378928, H12433, AA768085, R66487, |
| | | | | | AA478635, N55248, AA359925, R33870, |
| | | | | | AA385529, AA054621, AA961423, |
| | | | | | AW002948, AI802284, AA377365, D31590, |
| | | | | | AW275740, AI766068, C01179, AL133047, |
| | | | | | D89677, and AF003234. |
| HSFAM09 | 132 | 1150965 | 1-531 | 15-545 | |
| HSSAX53 | 133 | 507509 | 1-348 | 15-362 | |
| HSVAW49 | 134 | 1150960 | 1-970 | 15-984 | |
| HTEAG49 | 135 | 954614 | 1-1289 | 15-1303 | AW452652, AI039005, AA780077, |
| | | | | | AW316890, AI337290, AA463229, |
| | | | | | AA463230, AI423317, AI468158, AA382497, |
| | | | | | N66986, AF041822, AL390796, AL390796, |
| | | | | | AL357045, and AL357045. |
| HTLBH67 | 136 | 751985 | 1-432 | 15-446 | W19592, AC005368, AC008439, AC022420, |
| | | | | | AC022420, AC022420, AC005368, |
| | | | | | AC005368, AC008781, and AC008781. |
| HTLJC71 | 137 | 922923 | 1-1738 | 15-1752 | AL039539, AL045443, AI336919, AA406128, |
| | | | | | AA405229, AL042307, AA431504, |
| | | | | | AA311249, AW086440, AA813520, |
| | | | | | AI240644, AA897733, AW268487, |
| | | | | | AA782009, AW172455, M301209, AI014598, |
| | | | | | AA969918, AL041043, AA431178, |
| | | | | | AL039540, AA973051, AI221826, AL133030, |
| | | | | | AC009516, AP000552, AP000556, AP000557, |
| | | | | | AL117509, AC023490, AC023490, |
| | | | | | AC009516, AC009516, AC009516, |
| | | | | | AC018751, AC018751, AC018751, |
| | | | | | AC007957, and AC007957. |
| HTPAD46 | 138 | 503313 | 1-343 | 15-357 | AA386091, AA386130, AL133510, and |
| | | | | | AC010932. |
| HTTKP07 | 139 | 911390 | 1-562 | 15-576 | AI640500, AA035703, AF130247, and |
| | | | | | AF165138. |
| HUCOW17 | 140 | 933357 | 1-843 | 15-857 | W52616, AA102287, R60274, AA307147, |
| | | | | | H17000, H15631, C03464, and AA192581. |
| HWHGF52 | 141 | 726102 | 1-441 | 15-455 | AA223889, and AB002360. |
| HWHHB69 | 142 | 1212612 | 1-2914 | 15-2928 | |
| HWLFH94 | 143 | 1151387 | 1-1251 | 15-1265 | |
| HWMBM13 | 144 | 909683 | 1-858 | 15-872 | AI339104, AA861042, AA134985, |
| | | | | | AA868144, AA134946, AI626100, |
| | | | | | AA922724, AA535447, AA056635, |
| | | | | | AA308766, D25742, AA916634, AA551763, |
| | | | | | AA873574, AW192836, AR044148, |
| | | | | | AL158847, and AL158847. |
| HWWDN34 | 145 | 911357 | 1-1233 | 15-1247 | AI671062, AI023330, AW243448, AI990947, |
| | | | | | AW081367, AW391909, AA448391, |
| | | | | | AI984688, AA448394, AI283270, AI344135, |
| | | | | | AW014216, AA127530, AA335984, |
| | | | | | AA377148, Z42084, R12430, AA400585, |
| | | | | | AC019214, and AC019214. |
| HCEML27 | 146 | 997051 | 1-894 | 15-908 | |
| HELHJ69 | 147 | 1128924 | 1-630 | 15-644 | |
| HFKLA09 | 148 | 1178800 | 1-2072 | 15-2086 | |
| HSBBF79 | 149 | 965764 | 1-1361 | 15-1375 | |
| HSLKA77 | 150 | 1204269 | 1-4086 | 15-4100 | |
| HAGDR21 | 151 | 1090433 | 1-1414 | 15-1428 | |
| HHFNH27 | 152 | 1025277 | 1-1952 | 15-1966 | |
| HTLIT05 | 153 | 1217625 | 1-844 | 15-858 | |
| HAPNV33 | 154 | 1151374 | 1-793 | 15-807 | |
| HBTAE84 | 155 | 1128800 | 1-489 | 15-503 | |
| HDPVY89 | 156 | 827026 | 1-684 | 15-698 | AC026283, and AC026283. |
| HGLDB21 | 157 | 1010920 | 1-1670 | 15-1684 | |
| HMIAN37 | 158 | 947881 | 1-677 | 15-691 | |
| HODAK55 | 159 | 1110333 | 1-713 | 15-727 | |
| HSLEI59 | 160 | 1128801 | 1-758 | 15-772 | |
| HSQFH29 | 161 | 1217061 | 1-1907 | 15-1921 | |
| HTLEA35 | 162 | 1107230 | 1-674 | 15-688 | |
| HUVGG63 | 163 | 1204716 | 1-2211 | 15-2225 | |
| HAGAX57 | 164 | 1150865 | 1-1237 | 15-1251 | |
| HAMGX15 | 165 | 1177932 | 1-750 | 15-764 | |
| HAUBV06 | 166 | 1106041 | 1-2203 | 15-2217 | |
| HBWCM62 | 167 | 1185273 | 1-465 | 15-479 | |
| HCWFA35 | 168 | 1105672 | 1-611 | 15-625 | |
| HDACA35 | 169 | 1107236 | 1-983 | 15-997 | |
| HDQGM08 | 170 | 1151469 | 1-896 | 15-910 | |
| HELGB06 | 171 | 1148741 | 1-433 | 15-447 | |
| HEOPR74 | 172 | 1226822 | 1-1245 | 15-1259 | |
| HIBEK35 | 173 | 731480 | 1-402 | 15-416 | |
| HJMAR88 | 174 | 1104937 | 1-683 | 15-697 | |
| HMWGU56 | 175 | 1226470 | 1-1016 | 15-1030 | |
| HOUDS09 | 176 | 1164010 | 1-1631 | 15-1645 | |
| HTEGM38 | 177 | 675087 | 1-350 | 15-364 | |
| HTEKY82 | 178 | 1152495 | 1-486 | 15-500 | |
| HTLCY54 | 179 | 1193550 | 1-1049 | 15-1063 | |
| HFOXK14 | 180 | 603245 | 1-616 | 15-630 | AL096870, and AL096870. |
| HHFFO69 | 181 | 837703 | 1-901 | 15-915 | |
| HHFLU06 | 182 | 857884 | 1-316 | 15-330 | AL096870, and AL096870. |
| HAGBA56 | 183 | 732597 | 1-653 | 15-667 | AA812064, AA430303, AA430200, |
| | | | | | AI803142, AI425013, AA954361, AB020641, |
| | | | | | U62391, AF033655, AC006036, AC000057, |
| | | | | | and AC002458. |
| HAGGF84 | 184 | 911312 | 1-421 | 15-435 | AL135568, AJ252239, AF071569, U73504, |
| | | | | | D14906, J05072, X63615, AC004056, and |
| | | | | | AC004168. |
| HAHGD33 | 185 | 921782 | 1-1051 | 15-1065 | AW378448, AW378426, AA064738, Z43369, |
| | | | | | AA984486, D31100, W79308, T35774, |
| | | | | | T08259, W52734, W73106, AI904952, |
| | | | | | R10018, AA348984, T80752, AA639598, |
| | | | | | R57404, T81225, AW408302, T81300, |
| | | | | | R13945, T47464, W79389, Z43504, |
| | | | | | AA404490, AA196613, W01185, H14918, |
| | | | | | H45144, and AF113249. |
| HAHIY08 | 186 | 962113 | 1-265 | 15-279 | AA100160, AA307684, AA244505, R57782, |
| | | | | | AA864846, AR044133, and AR044123. |
| HBIOZ10 | 187 | 973131 | 1-490 | 15-504 | AC010761, and AC010761. |
| HBKDI30 | 188 | 729048 | 1-625 | 15-639 | AA197072, R02824, J05194, J03886, and |
| | | | | | AL160175 |
| HBXBW40 | 189 | 706115 | 1-462 | 15-476 | AL023754, AL049688, and D86557. |
| HCEHE35 | 190 | 909937 | 1-378 | 15-392 | AB019692. |
| HCEPW85 | 191 | 911374 | 1-302 | 15-316 | N83965, AA326737, and H14153. |
| HCFAT25 | 192 | 932068 | 1-579 | 15-593 | AI287912, AL134532, AF096300, AB014587, |
| | | | | | AC005035, AL137755, and U88984. |
| HCFCF47 | 193 | 1139731 | 1-980 | 15-994 | |
| HDAAV61 | 194 | 810305 | 1-329 | 15-343 | AI762433, AI191825, AA159268, AA083866, |
| | | | | | AW105372, AA157878, AI140935, AI922109, |
| | | | | | AA158846, AA488548, AI187149, |
| | | | | | AA442140, AA837990, AI494201, AL048644, |
| | | | | | AI366974, AI537837, AA425228, AW410089, |
| | | | | | AL038605, AI821259, AW084097, |
| | | | | | AW083168, AI624304, AI918554, AA508692, |
| | | | | | AI918634, AI307494, AI349622, AI738867, |
| | | | | | AI310571, AI802372, AI918408, AW021662, |
| | | | | | AI348897, AI366959, AW058233, AI345397, |
| | | | | | AL038564, AW089275, AI340511, |
| | | | | | AA857847, AI446405, AI799305, AW022494, |
| | | | | | AW020288, AI281867, AI312210, AI307569, |
| | | | | | AI270295, N71180, AI702301, N75771, |
| | | | | | AL036652, AW021373, AL036856, |
| | | | | | M312428, AI866820, AW059713, AI889147, |
| | | | | | N27632, AI336513, AW022102, AA019646, |
| | | | | | AI348895, AI313320, AI336495, AI310920, |
| | | | | | AI307503, AW079736, AW082532, |
| | | | | | AW089572, AI345143, AI309391, AI955906, |
| | | | | | AI309431, AI336662, AI868204, AI310575, |
| | | | | | AI349276, AI307507, N22406, AA420722, |
| | | | | | AI336565, AI683559, AL040694, AI311440, |
| | | | | | AI334893, AI349186, AI340533, AW088560, |
| | | | | | AI690472, AI521005, AI537515, AI493601, |
| | | | | | AI348847, AW083572, AW020397, |
| | | | | | AA493923, AI521799, AA835966, AI334895, |
| | | | | | AI309380, AW068845, AA814721, AI343091, |
| | | | | | AI401697, AA176980, AI815232, AW020419, |
| | | | | | AI340627, AW087838, AA555145, AI366968, |
| | | | | | AI348969, AI625464, AI307210, AW022636, |
| | | | | | AI348854, AI584130, AI679959, AI313352, |
| | | | | | AA789133, AW268072, AI336585, AI349787, |
| | | | | | AI349266, AI334452, N99092, AI312271, |
| | | | | | AI345114, AI344938, AI305745, AI345224, |
| | | | | | AW168503, AA127565, AI312146, AI590423, |
| | | | | | AI312339, AI340537, AI500659, AI345258, |
| | | | | | AW054972, AA848053, AI307459, AI559863, |
| | | | | | AI349971, AI348879, W33163, AW193134, |
| | | | | | H89138, AW090539, AI348777, AI311604, |
| | | | | | AI343030, AI311892, AI680377, AI349805, |
| | | | | | AI887775, AI582871, AI349814, AI310930, |
| | | | | | AI500706, AI335426, AW263804, AI312333, |
| | | | | | AW268261, AI349957, AI345370, AI114703, |
| | | | | | AI370392, AI500662, AA460184, AI783861, |
| | | | | | AW150487, AI310945, AI336634, AI889168, |
| | | | | | AI440263, AI307735, AI345471, AI963690, |
| | | | | | AI312431, AI468959, T99953, AI345005, |
| | | | | | AI613343, AI571699, AW162189, AI312353, |
| | | | | | AI271234, AI623736, AI888956, AI560545, |
| | | | | | AI934000, AI343131, AI540606, AI334884, |
| | | | | | AI307543, AI567582, AI345251, AI349269, |
| | | | | | AW071412, AI254226, AW020592, |
| | | | | | AI307734, AI859644, AI307708, AI804505, |
| | | | | | AW058279, AI582912, AW172723, N29277, |
| | | | | | AI312325, AW071395, AI345156, AI242736, |
| | | | | | AI340659, AW071377, AI311159, AI866573, |
| | | | | | AI672130, AA579232, AI343140, AI452556, |
| | | | | | AI612885, AI340644, AI636788, AA837508, |
| | | | | | AI440091, AI572396, AA494167, AI702065, |
| | | | | | AI334930, AI309443, AI862066, AI345562, |
| | | | | | AI702527, R41605, AI307520, AW020693, |
| | | | | | AI371228, AI345026, AI679174, AI805688, |
| | | | | | AC007136, Y11092, AL137565, AF125532, |
| | | | | | AF003737, E01314, J05032, I48978, |
| | | | | | AF111851, L30117, X65873, AL133014, |
| | | | | | AL137560, X93495, A08913, AR038854, |
| | | | | | I89947, A08912, A08910, I89931, A08909, |
| | | | | | S77771, AL050015, I89934, AF162270, |
| | | | | | I49625, A08908, S76508, D83989, A18777, |
| | | | | | A08907, AF113676, A27171, AL137641, |
| | | | | | U75932, AF067728, AB007812, L13297, |
| | | | | | AL050146, X63574, AF017437, D89079, |
| | | | | | U57715, AL133098, AF120268, AL133010, |
| | | | | | E12579, AF061943, I00734, S61953, X79812, |
| | | | | | E00617, E00717, E00778, U72620, A08911, |
| | | | | | AF114818, AL122045, AL080074, AL137658, |
| | | | | | E15324, AL080140, AL050108, AF113013, |
| | | | | | M30514, AF078844, AF113690, E02253, |
| | | | | | Z72491, AF106697, M27260, AF151109, |
| | | | | | AF205861, AJ010277, A52563, AL137548, |
| | | | | | AF055917, AR011880, E15569, AF095901, |
| | | | | | AL137558, U49434, AL080129, AF012536, |
| | | | | | AF143957, U42031, AL117440, A08915, |
| | | | | | AL080060, AF113019, S36676, Y10080, |
| | | | | | U00763, AF153205, AF094480, AF017790, |
| | | | | | AF026124, AF017152, AF058921, X06146, |
| | | | | | AL133077, AF158248, AL137656, AI2297, |
| | | | | | A08916, AF008439, AC004093, AL137539, |
| | | | | | Y10655, S75997, AF113694, AJ001838, |
| | | | | | X76228, Y10823, Y11254, A83556, |
| | | | | | AF000301, AR059883, X54971, AL049466, |
| | | | | | AF016271, AL050393, AL049452, E12580, |
| | | | | | X53587, X57961, AP000081, AR068466, |
| | | | | | AF026816, I48979, AL110171, AL080086, |
| | | | | | X63410, AR020905, AF091084, AB016226, |
| | | | | | AL133067, AF126247, AF113677, AF175903, |
| | | | | | A07588, AF118094, AL049464, AF097996, |
| | | | | | L40363, U90884, U53505, AF176651, |
| | | | | | AL137459, U55017, AJ238278, AL117460, |
| | | | | | U95114, L31396, X99717, AL122093, |
| | | | | | U42766, AL137521, AL137479, X96540, |
| | | | | | AL110280, X72889, A58524, X00861, |
| | | | | | A58523, AC002467, AC006371, I29004, |
| | | | | | AL080124, AB019565, AL133104, |
| | | | | | AL133637, AF110329, AL049938, AL137557, |
| | | | | | AL133558, X62580, X70685, AR029490, |
| | | | | | AL049314, AF106827, AL133081, I42402, |
| | | | | | I46765, AL137648, AF031147, E01812, |
| | | | | | AF079763, AL117585, U68233, 192592, |
| | | | | | E07108, A07647, AF036268, 868736, |
| | | | | | AL117394, U72621, AL133565, AL133031, |
| | | | | | AL133606, AJ006417, AF061573, X98834, |
| | | | | | AL122123, AL031346, AC004227, Y08769, |
| | | | | | I22272, AL137463, AF169154, L19437, |
| | | | | | AR059958, AL122098, AF061795, AF151685, |
| | | | | | U57352, X66975, AF139986, AL050092, |
| | | | | | AF137367, X98066, AL122049, AF113689, |
| | | | | | S63521, AF118064, AB026995, AF118070, |
| | | | | | AL050277, AF113699, U58996, AF159615, |
| | | | | | AL137711, AL080162, AF125949, U62966, |
| | | | | | AL137547, X67813, AC007136, AC007136, |
| | | | | | and AC007136. |
| HDPKD75 | 195 | 810824 | 1-524 | 15-538 | AA923698, AL040000, AF191838, |
| | | | | | AR016417, AF191839, and AF145705. |
| HDPNC96 | 196 | 934520 | 1-720 | 15-734 | AA256100, and AB023182. |
| HDPSR15 | 197 | 969666 | 1-1218 | 15-1232 | AW195239, AW149418, AW005579, |
| | | | | | AI378013, AA147800, AI436586, AI392913, |
| | | | | | AW337924, AI377235, AI264931, AI203549, |
| | | | | | AW104319, M094031, AA461376, H59980, |
| | | | | | AW166255, AA508841, AI360737, |
| | | | | | AA463275, AA417605, AI682196, H59937, |
| | | | | | AI208175, N30324, AA460078, AW001677, |
| | | | | | AA514325, N50317, AA741518, AI091790, |
| | | | | | T11446, AA360254, AI208678, AA214523, |
| | | | | | D20738, R61563, T12550, T11445, |
| | | | | | AA428834, AI276889, A3026289, and |
| | | | | | AR044150. |
| HDQDX20 | 198 | 919027 | 1-1280 | 15-1294 | AI905612, N75655, N94726, AA297704, |
| | | | | | H53438, AW339945, AW405560, AA719945, |
| | | | | | AI682436, AA971968, AW085268, H67340, |
| | | | | | AI419590, AI863597, R84229, AA996342, |
| | | | | | H69541, D45315, AI002247, AI138274, |
| | | | | | AI648605, W03933, AA348656, AI610448, |
| | | | | | AI769304, AA362755, AI708290, D45320, |
| | | | | | AW270686, AF169035, AF085233, and |
| | | | | | AF113007. |
| HDQHB19 | 199 | 1226089 | 1-2263 | 15-2277 | |
| HDTBY88 | 200 | 934472 | 1-495 | 15-509 | AA868305, AI700890, AA789239, AI803004, |
| | | | | | AI694352, AA043382, F08474, R21498, |
| | | | | | AF112183, AF112184, and AC005354. |
| HE2KZ07 | 201 | 909948 | 1-1167 | 15-1181 | AI141657, AW410635, AI377644, AI373441, |
| | | | | | AI435842, AI813994, M222162, AI516276, |
| | | | | | AA134062, AA115521, AA027340, |
| | | | | | AI198968, AI936995, AA432023, AI417110, |
| | | | | | AA019881, AA431770, T33003, AI804202, |
| | | | | | AW296590, AA894568, AA888588, |
| | | | | | AI816392, AW157195, AA774185, AI312197, |
| | | | | | AA770240, AI005469, T15996, AI589559, |
| | | | | | T83662, AI802351, AA164900, AI637808, |
| | | | | | AW294821, AI612103, AI452706, R96447, |
| | | | | | AI214546, AA083117, AI219844, AI312448, |
| | | | | | AA978205, I198210, AI423512, AA115526, |
| | | | | | N74543, A1823785, H19250, T16797, |
| | | | | | AI803155, AW051574, Z41102, AI300274, |
| | | | | | AA970855, T30646, T78862, T81921, |
| | | | | | R42142, R38428, R05531, T99321, H16697, |
| | | | | | R08035, AA114950, H52123, AA114923, |
| | | | | | R41504, R08085, F18392, D79266, R42920, |
| | | | | | AI028740, AA114993, F34433, F25527, |
| | | | | | AA130289, C02151, AL118820, AI696123, |
| | | | | | H10371, AA954386, T34819, AA135800, |
| | | | | | AI219437, T81018, AA135799, AI372829, |
| | | | | | AI056831, H68913, AW051694, AI986390, |
| | | | | | W28788, H10372, U95740, D86556, |
| | | | | | AB004267, AB023027, and AF181984. |
| HE8UY74 | 202 | 960914 | 1-553 | 15-567 | N23547, H06088, 724919, R94366, |
| | | | | | AA010516, AA004981, AA304780, |
| | | | | | AL356968, and AL356968. |
| HE9NO66 | 203 | 974353 | 1-976 | 15-990 | AI732997, AA865818, AA977633, Z69734, |
| | | | | | AB035267, AB020741, and Z68339. |
| HEMBT61 | 204 | 939957 | 1-449 | 15-463 | N86549, AW369713, and AB002301. |
| HETLF29 | 205 | 909762 | 1-404 | 15-418 | AA960957, AI001155, and AC004664. |
| HFIUE75 | 206 | 909758 | 1-1104 | 15-1118 | AA745592, AA780791, AI680317, |
| | | | | | AA205127, R06019, AW074511, T76970, |
| | | | | | AW408392, T86065, T77135, AI709216, |
| | | | | | R05922, T85884, AA730855, and R77022. |
| HFKIT06 | 207 | 934019 | 1-286 | 15-300 | AC026976, AC068353, AC068353, |
| | | | | | AF284563, AF284563, and AC026976. |
| HHEGG20 | 208 | 894409 | 1-808 | 15-822 | AF084205. |
| HHEHC53 | 209 | 921783 | 1-896 | 15-910 | AW408302, AW410815, AW161181, |
| | | | | | AA160313, AA226860, AA044358, |
| | | | | | AI632654, AA232389, Z43369, AA249020, |
| | | | | | T35774, AA852244, AA064738, AA295773, |
| | | | | | D31100, R13945, AA205277, T47464, |
| | | | | | T08259, AI904952, AF113249, AC009427, |
| | | | | | AC009427, and AC009427. |
| HHERQ79 | 210 | 944057 | 1-497 | 15-511 | AW340333, AI806295, AW268810, |
| | | | | | AA827664, AA829237, AA909185, |
| | | | | | AA919008, AA604425, AW407893, |
| | | | | | AA011359, AL134902, D63485, AB016590, |
| | | | | | AB016589, and AR043113. |
| HISAF59 | 211 | 959140 | 1-899 | 15-913 | AW401787, AI394630, AI418298, |
| | | | | | AW375742, T30407, Z44281, F07299, |
| | | | | | R25015, T32685, AA974700, F07734, |
| | | | | | AA297059, AW239548, AA897415, R45025, |
| | | | | | AI807678, AI343378, AW206793, |
| | | | | | AW138409, AW163027, AI815476, |
| | | | | | AA503315, AA047793, AW137324, |
| | | | | | AW140018, AI936871, AI015047, AI017077, |
| | | | | | AI168175, AI302185, AI025217, F03423, |
| | | | | | R46686, AI073417, Z40806, AA026054, |
| | | | | | AW002416, AI652375, F03562, T03397, |
| | | | | | AI983297, H42881, T82311, AI025310, |
| | | | | | AI831833, R08769, AI911100, AA471062, |
| | | | | | AW157059, AA382959, H22172, AI356604, |
| | | | | | AI537006, AI825970, AW338394, |
| | | | | | AW192088, AI559159, AA593826, |
| | | | | | AW078709, and Z61277. |
| HKAKM10 | 212 | 918685 | 1-596 | 15-610 | AW166113, R88730, AF071071, AF170303, |
| | | | | | AF170304, AF077658, and AF071070. |
| HLTHP86 | 213 | 919354 | 1-2470 | 15-2484 | AA702160, AI457618, AI951809, AI808761, |
| | | | | | AI911971, AI808636, AI633963, AI092909, |
| | | | | | AA922021, N53171, AA809486, AI092910, |
| | | | | | AI253245, AA236950, AI432182, AI093897, |
| | | | | | AI363415, N50448, M248799, AA663589, |
| | | | | | AA235935, AI239417, AA121162, |
| | | | | | AW270053, AI889821, AW296666, |
| | | | | | AI263508, N50504, H16878, H09671, |
| | | | | | AW028355, AW300355, R56761, H84971, |
| | | | | | AI373750, H16267, Z44040, Z44727, |
| | | | | | AI025923, N58608, T95750, T34716, |
| | | | | | AA363673, R43831, AA687486, R91239, |
| | | | | | AI829631, AA687431, AA852910, H16769, |
| | | | | | T95749, AI268135, AI686257, R56913, |
| | | | | | Z40554, AA834548, AA872305, C02338, and |
| | | | | | AF161420. |
| HMSJL96 | 214 | 934483 | 1-662 | 15-676 | R01798. |
| HMTAJ73 | 215 | 813296 | 1-651 | 15-665 | AI831613, AI924408, AI870169, AW068406, |
| | | | | | AI368905, AW168626, AI284115, AA678670, |
| | | | | | AA568895, H19069, AA627558, AA857431, |
| | | | | | AJ010119, AF074714, AF074715, AC015698, |
| | | | | | and AC015698. |
| HNTCP13 | 216 | 909770 | 1-1793 | 15-1807 | AI479379, AW273740, AA463847, AI740675, |
| | | | | | AI014722, AI922082, AA463334, AW009462, |
| | | | | | AI073540, N95224, AI190238, AA007373, |
| | | | | | AI798079, AA476563, AA670286, H02882, |
| | | | | | N92851, AA652716, AW016339, H45475, |
| | | | | | W25554, AA774170, H45576, AI370125, |
| | | | | | AI811794, AW119159, H03781, H20952, |
| | | | | | AA853882, AA853883, AI471060, |
| | | | | | AW382128, AW371996, W21053, H20991, |
| | | | | | NA368628, AW138258, AA476448, |
| | | | | | AA876335, AA788825, AF037447, and |
| | | | | | AC004486. |
| HNTMD79 | 217 | 934522 | 1-573 | 15-587 | AA305176, AL160291, AL160291, |
| | | | | | AL365228, and AL365228. |
| HNTMH70 | 218 | 757184 | 1-674 | 15-688 | H19102, AI699883, AI383263, AC005726, |
| | | | | | and A0004807. |
| HNTNB14 | 219 | 909942 | 1-644 | 15-658 | AA082976, R60839, AA349498, F12661, |
| | | | | | T74243, L22557, AC068701, and AC068701. |
| HODFF88 | 220 | 974911 | 1-1843 | 15-1857 | D80164, D59502, D80193, D80195, D59275, |
| | | | | | C15076, D80227, D58283, D80022, D80166, |
| | | | | | D81030, D59859, D51799, D59619, D80210, |
| | | | | | D80391, D80240, D59787, D51423, D80253, |
| | | | | | D80043, D80269, D50979, D80212, D80038, |
| | | | | | D80196, D80024, D80219, D80188, D14331, |
| | | | | | D59467, D57483, D59927, D80378, D80366, |
| | | | | | C14389, D59889, D50995, D80045, D59610, |
| | | | | | AA305409, C14429, D80241, D51060, |
| | | | | | T03269, C14014, AW178893, D75259, |
| | | | | | AA305578, D81026, D59695, D51022, |
| | | | | | AW179328, D81111, AW178775, D80134, |
| | | | | | AW378532, AW177440, D51250, AW352158, |
| | | | | | D80268, F13647, AA514188, AW369651, |
| | | | | | D80251, D80522, D51079, D80248, D80949, |
| | | | | | D58253, AW178762, D80168, D52291, |
| | | | | | C14227, AA514186, AI905856, AW177501, |
| | | | | | AW177511, D80133, Z21582, AW360811, |
| | | | | | C05695, C14298, AW352117, D80064, |
| | | | | | AW176467, AW375405, AW378540, C14407, |
| | | | | | AW377671, D51097, AW366296, D80302, |
| | | | | | AW360844, AW360817, AW375406, |
| | | | | | AW378534, AW179332, AW377672, |
| | | | | | AW179023, AW178905, D80132, AW360834, |
| | | | | | AA285331, D80439, AW352171, AW377676, |
| | | | | | AW178906, AW352170, AW177731, D80247, |
| | | | | | AW178907, AW179019, AW179024, D51103, |
| | | | | | AW177505, AW360841, AW179020, |
| | | | | | AW178909, AW177456, AW179329, |
| | | | | | AW178980, AW177733, AW378528, |
| | | | | | AW178908, AW178754, AW179018, |
| | | | | | AW179220, AI557751, AW179004, |
| | | | | | AW178914, AW378525, AW352174, T11417, |
| | | | | | D80157, AW177728, D59627, D51759, |
| | | | | | AW367967, AW178774, AW178911, |
| | | | | | AW378543, AW352163, D59503, D80258, |
| | | | | | D80014, C06015, AI557774, AW178983, |
| | | | | | AW352120, T03116, AW178781, T48593, |
| | | | | | D58246, C14077, D59653, AW177723, |
| | | | | | D58101, D45260, AI525923, AW178986, |
| | | | | | AW367950, C03092, AA809122, H67854, |
| | | | | | D59551, H67866, C14975, T02974, |
| | | | | | AW378533, AW378539, D51213, AW177734, |
| | | | | | AI535686, D59317, D51221, AI525917, |
| | | | | | C14973, AA514184, C14344, D45273, |
| | | | | | AI525925, AI525920, D59474, AI525227, |
| | | | | | D31458, C14046, AI525242, AI525235, |
| | | | | | T03048, AI525912, AW378542, AI525215, |
| | | | | | AI525237, C16955, C05763, Z33452, |
| | | | | | AI535850, AI535961, A84916, AJ132110, |
| | | | | | A62300, A62298, AR018138, X67155, |
| | | | | | Y17188, D26022, A25909, A67220, D89785, |
| | | | | | A78862, D34614, D88547, AF058696, |
| | | | | | X82626, AR008278, AB028859, AR025207, |
| | | | | | I82448, Y12724, A82595, AB012117, |
| | | | | | AR060385, AB002449, A85396, AR066482, |
| | | | | | A44171, A85477, A94995, X68127, I19525, |
| | | | | | A86792, X93549, AR008443, AR016808, |
| | | | | | U87250, I50133, I50126, I50132, I50128, |
| | | | | | AR066488, AR016514, AR060138, A45456, |
| | | | | | A26615, AR052274, I14842, Y09669, |
| | | | | | A43192, A43190, AR038669, AR066487, |
| | | | | | A30438, AF135125, D88507, AR066490, |
| | | | | | D50010, AR054175, I18367, Y17187, |
| | | | | | A63261, AR008277, AR008281, AR008408, |
| | | | | | AR062872, A70867, AB033111, AR016691, |
| | | | | | AR016690, U46128, D13509, AR060133, |
| | | | | | I79511, AR064240, A64136, A68321, |
| | | | | | U87247, AB023656, U79457, AF123263, |
| | | | | | X93535, and AR008382. |
| HOHCE47 | 221 | 1216683 | 1-2147 | 15-2161 | |
| HPCRV84 | 222 | 945856 | 1-475 | 15-489 | AA307070, D79997, L76158, and X95351. |
| HRACK83 | 223 | 888037 | 1-566 | 15-580 | AC005832. |
| HRADM45 | 224 | 717358 | 1-468 | 15-482 | AA418916, AA426580, AJ271722, AP000260, |
| | | | | | AP000036, AF055919, AP000099, and |
| | | | | | AP000098. |
| HRAED74 | 225 | 942527 | 1-691 | 15-705 | AC005940, L42810, S83194, AF117384, and |
| | | | | | AB023658. |
| HRODZ70 | 226 | 942673 | 1-572 | 15-586 | AA292911, AA167655, AA167766, H97685, |
| | | | | | AA635138, Z41812, and AB007941. |
| HSKAC24 | 227 | 823869 | 1-498 | 15-512 | AF170301, AF170302, AF077659, and |
| | | | | | AF144573. |
| HSSMT34 | 228 | 911294 | 1-540 | 15-554 | AA378627, F07835, and AL117482. |
| HT3BG12 | 229 | 921593 | 1-368 | 15-382 | AB028951, and AL122055. |
| HTEGO05 | 230 | 932583 | 1-1086 | 15-1100 | AA059465, AA059211, AA731209, |
| | | | | | AA236961, T86500, T87461, AL024498, and |
| | | | | | M35862. |
| HTEKT33 | 231 | 953308 | 1-1648 | 15-1662 | AW292935, AW027321, AW027332, |
| | | | | | AI538521, AL040176, H29877, H85389, |
| | | | | | H29974, H84772, Z41499, AL045794, |
| | | | | | T24112, T24119, D80253, D80043, AI744745, |
| | | | | | AL039924, D80219, AW013814, D59275, |
| | | | | | T10477, D51250, D80240, AA016312, |
| | | | | | D80227, H00069, D80210, D51423, D80134, |
| | | | | | AL043441, T02921, D59619, D80193, |
| | | | | | AL039156, D80391, AL039150, AL043445, |
| | | | | | AL038821, D59787, AL039509, AL039564, |
| | | | | | AL039538, AL044530, AL039108, |
| | | | | | AL039678, D80196, AL039074, AL038837, |
| | | | | | AL039625, AL039648, AL039629, |
| | | | | | AL039566, D80045, AL039659, T23947, |
| | | | | | AL037726, AL038531, D80168, AL039109, |
| | | | | | AL040992, AL039128, AL044407, |
| | | | | | AL036973, AL043423, AL045337, |
| | | | | | AL037051, AL045353, AL036725, |
| | | | | | AL039386, AL039423, AL045341, |
| | | | | | AL042909, AL039410, C14227, D80366, |
| | | | | | AL043422, AL038025, D59927, T11051, |
| | | | | | D81026, AL039085, AL036196, C14014, |
| | | | | | D59889, AI535783, AW451070, D80038, |
| | | | | | C75259, D50995, C15076, AL037639, |
| | | | | | R47228, D80022, AI535983. AL037526, |
| | | | | | AL037615, D80195, D80949, D58283, |
| | | | | | D81030, D51799, T11417, D80188, D80378, |
| | | | | | D80522, D59467, F13647, AW452756, |
| | | | | | AL036767, T03269, T23659, AL036117, |
| | | | | | D50979, D80212, D59502, D52291, Z21582, |
| | | | | | AA285331, D80164, C14429, D80166, |
| | | | | | D59859, D80269, D59695, AL036765, |
| | | | | | AI557751, D80268, AL036924, AA514190, |
| | | | | | AL038851, D58253, T48598, C14298, |
| | | | | | D80024, AL036191, D57483, D59610, |
| | | | | | AL037679, AL036418, D80241, D59627, |
| | | | | | D81111, AI910186, C14389, C14331, Z25782, |
| | | | | | AL037601, AL036679, D51060, AL036238, |
| | | | | | AW178893, AA305409, AL037047, D51079, |
| | | | | | AL037082, AW177440, D51022, AW179328, |
| | | | | | AW178775, AA305578, D80014, AW378532, |
| | | | | | AI557774, AW352158, AI905856, |
| | | | | | AW377671, D51213, AW369651, D80251, |
| | | | | | AA514188, D51097, AL036964, D80248, |
| | | | | | AW178762, AW177501, AW177511, D80064, |
| | | | | | AW360834, Z99396, AA514186, D80133, |
| | | | | | AW360811, AW352117, T02974, C05695, |
| | | | | | AL037054, H00072, C14407, AW176467, |
| | | | | | AW378540, AW375405, D80302, AL036733, |
| | | | | | AL037021, AW366296, AW360844, |
| | | | | | AW360817, AW375406, AW378534, |
| | | | | | AW179332, D80132, AW377672, AW179023, |
| | | | | | AW178905, AW179220, AL036158, D80439, |
| | | | | | AW352171, D59373, AW377676, D80258, |
| | | | | | AW178906, AW352170, AW177731, D80247, |
| | | | | | AW178907, AW179019, AW179024, |
| | | | | | AW378539, AW177505, C14077, AW450376, |
| | | | | | AW179020, AW360841, C06015, AW178909, |
| | | | | | AW177456, AW179329, AW178980, |
| | | | | | AW177733, AW378528, AW178908, |
| | | | | | AW178754, AW179018, A85396, A25909, |
| | | | | | AIR025207, X68127, A86792, A44171, |
| | | | | | A85477, U87250, A67220, AR062871, |
| | | | | | A84772, AR067732, A84776, AR017907, |
| | | | | | I18371, A84773, A84775, AR037157, |
| | | | | | A84774, AR062872, AR062873, AR067731, |
| | | | | | A20702, A58522, A43189, A43188, A20700, |
| | | | | | A91750, D34614, AR043602, AR043603, |
| | | | | | AR043601, AR036905, AJ244003, AR018924, |
| | | | | | A95051, AR018923, A48774, A98767, |
| | | | | | A48775, A38214, A95117, AR015960, |
| | | | | | A95052, A93963, A93964, I63120, I56772, |
| | | | | | I95540, AR000007, AR015961, AI8053, |
| | | | | | AR031374, A63067, A51047, A63064, |
| | | | | | A49700, AR031375, A63072, A23334, |
| | | | | | A75888, I70384, A18050, AR068507, |
| | | | | | AR068506, A60111, A23633, AR007512, |
| | | | | | A23998, I03343, A58521, AR020969, I06859, |
| | | | | | A58524, I60241, I60242, AR054109, E12615, |
| | | | | | AR022240, AR035193, A58523, A92133, |
| | | | | | A24783, A24782, A81878, A27396, |
| | | | | | AR027100, I28266, E14304, A97211, A49045, |
| | | | | | AF156294, A82653, AF156296, E16636, |
| | | | | | A58525, A64081, I25027, E16678, I26929, |
| | | | | | I44515, I26928, AB012117, I26930, I26927, |
| | | | | | A93016, I49890, AR038762, AR000006, |
| | | | | | I44516, E13740, A58526, A91753, Z96142, |
| | | | | | AR066482, Y17188, I68636, V00745, |
| | | | | | AJ244004, A02712, X73004, E16590, |
| | | | | | AR008430, I19516, D88984, I03665, I03664, |
| | | | | | A15078, AI0361, AR036903, AJ244005, |
| | | | | | D28584, A35537, A02136, A04664, YI1923, |
| | | | | | AI3393, A35536, A02135, A04663, AI1245, |
| | | | | | A02710, I13349, A07700, AI3392, I19517, |
| | | | | | I01992, A76773, A22413, I21869, A70040, |
| | | | | | AF118808, I08051, I00074, I92483, |
| | | | | | AR038286, E00523, A97221, E03165, |
| | | | | | E02221, E01614, E13364, I00079, D26022, |
| | | | | | A92636, Y11926, I66495, I66494,I66498, |
| | | | | | I66497, I66496, I66486, I66487, AJ230933, |
| | | | | | I19525, E06034, I00077, A51384, AR035975, |
| | | | | | AR035974, AR035977, AR035976, |
| | | | | | AR035978, S70644, D14548, I25041, I07429, |
| | | | | | A62300, A91754, A62298, S65373, A60957, |
| | | | | | X58217, AIF019720, X67155, A60968, |
| | | | | | A84916, X13220, I84554, I69350, I84553, |
| | | | | | A04710, AR027069, AF096793, AJ132110, |
| | | | | | A20701, A52326, X92518, D44443, |
| | | | | | AF096810, S78798, A10363, A60985, |
| | | | | | A60990, A78862, AB007195, A60987, |
| | | | | | D89785, X15418, E04616, AI8722, A80951, |
| | | | | | I08250, S69292, AF130655, M32676, |
| | | | | | AR018138, D88547, X93549, X82626, |
| | | | | | I07888, AF058696, AR008278, AB028859, |
| | | | | | S83538, AF135125, I82448, and I15997. |
| HTEMU66 | 232 | 944419 | 1-1078 | 15-1092 | AL039924, AL045794, AW013814, |
| | | | | | AL036630, T02921, AL044412, T24119, |
| | | | | | AL044364, T24112, AW450335, AL039476, |
| | | | | | D51250, D80253, D80043, AL040992, |
| | | | | | AL039109, AL038531, AL037726, |
| | | | | | AL039629, AL039625, AL039648, |
| | | | | | AL038837, AL039074, AL039678, |
| | | | | | AL039108, AL039538, AL039564, |
| | | | | | AL039156, AL039659, AL039566, |
| | | | | | AL039509, AL039521, H00069, AL039128, |
| | | | | | AL044407, AL036973, AL045337, |
| | | | | | AL037051, AL045353, AL039386, |
| | | | | | AL039423, AL045341, AL042909, |
| | | | | | AL039410, D59787, AL039150, AL044530, |
| | | | | | AL038821, AL038025, D80219, AL036725, |
| | | | | | AL043422, D59275, AL043445, AL039459, |
| | | | | | AI535983, D80227, AL043586, AL043423, |
| | | | | | D80240, AL043441, D80210, D51423, |
| | | | | | T23947, AL036650, D80134, AL036196, |
| | | | | | D59619, D80391, AL037639, D80193, |
| | | | | | AW451070, AL037615, D80196, AL036767, |
| | | | | | C14227, AL039085, AI535783, D80949, |
| | | | | | AL036117, D80366, D59927, AL037526, |
| | | | | | AL042334, AW452756, D80168, R47228, |
| | | | | | AL036238, AL036679, AL037601, T11051, |
| | | | | | D81026, AL039504, C14014, D50995, |
| | | | | | C75259, AL039842, AL036964, D80045, |
| | | | | | AL036733, AL036158, AL037027, |
| | | | | | AL036924, AL037054, D59889, AL036765, |
| | | | | | T23659, AI557751, AL038851, T23658, |
| | | | | | AL037177, AL036998, D80022, AL037047, |
| | | | | | AL044413, AW293068, AL037643, |
| | | | | | AL036227, AL036418, AL036133, D80038, |
| | | | | | T11417, AL037082, AL036163, D58283, |
| | | | | | D80195, AL036207, AL037124, D81030, |
| | | | | | D80188, AL037021, AL036191, AL036167, |
| | | | | | AL036132, AL037049, AL037679, |
| | | | | | AL036190, AL037600, D51799, AL036139, |
| | | | | | D80378, F13647, D80522, T03269, |
| | | | | | AL036152, T23656, C14429, T48598, |
| | | | | | D50979, D80212, AL036900, Z21582, |
| | | | | | AL037178, AA514190, AL048425, |
| | | | | | AA285331, AW451416, D59502, AL043613, |
| | | | | | D58253, AL039555, AL043585, D80166, |
| | | | | | D59859, AL037085, D80268, D80269, |
| | | | | | Z25782, AL037569, D80024, D52291, |
| | | | | | C14331, AL036174, AL036808, AL036953, |
| | | | | | D57483, Z99396, D59610, AW450376, |
| | | | | | AL044178, D80241, AL036150, D81111, |
| | | | | | AI910186, D80164, D59627, C14389, |
| | | | | | H00072, C15076, D59467, D51060, |
| | | | | | AA305409, AL036268, AW178893, D51213, |
| | | | | | D51079, C14298, AL038043, N47620, |
| | | | | | D80251, AW177440, D51022, C14407, |
| | | | | | AL044447, AW179328, D80014, AW178775, |
| | | | | | AL037077, AW378532, AA305578, D80064, |
| | | | | | AW352158, D80248, D59695, AI905856, |
| | | | | | AW369651, D51097, AL043840, AL037002, |
| | | | | | AW178762, AA514188, AW177501, |
| | | | | | AW177511, AA514186, D80133, AW360834, |
| | | | | | AL039417, AW360811, C05695, Z25783, |
| | | | | | AI557774, AWI35155, D80258, T02974, |
| | | | | | AW352117, AW176467, AW375405, |
| | | | | | AW378540, AW377671, AA809122, |
| | | | | | AW366296, A25909, A85396, A86792, |
| | | | | | A44171, A85477, X68127, AR062871, |
| | | | | | A84772, A84776, A84773, A84775, A84774, |
| | | | | | AR037157, AR017907, AR062872, |
| | | | | | AR062873, AR067731, AR067732, A58522, |
| | | | | | A91750, A20702, A43189, A43188, A20700, |
| | | | | | AR036905, A95051, AR038762, A95117, |
| | | | | | A38214, A98767, AR031374, I56772, I95540, |
| | | | | | AR018924, A49700, A63067, A51047, |
| | | | | | A63064, AR018923, A48774, A63072, |
| | | | | | A95052, A48775, AR068507, AI8053, |
| | | | | | AR068506, A93963, A93964, A23334, |
| | | | | | A75888, I70384, AR043602, AR015960, |
| | | | | | AR043603, AR043601, A58521, AR000007, |
| | | | | | AR015961, A15050, A60111, A23633, |
| | | | | | A10361, A23998, AR007512, AR020969, |
| | | | | | I60241, I60242, I63120, AR054109, I03343, |
| | | | | | AR031375, AR022240, A58524, A58523, |
| | | | | | A81878, A24783, A24782, E12615, |
| | | | | | AR035193, A92133, E14304, A27396, |
| | | | | | AR027100, I28266, A49045, EI6678, A82653, |
| | | | | | EI6636, I06859, A93016, I25027, AR000006, |
| | | | | | I26929, E13740, I44515, I26928, I26930, |
| | | | | | I26927, A58525, I49890, I44516, A58526, |
| | | | | | A91753, AJ244003, AR025207, I18371, |
| | | | | | E06034, AF156296, AI3038, A29289, |
| | | | | | AR029417, AF156294, AR067733, |
| | | | | | AR029418, AR067734, A64081, AR028669, |
| | | | | | AR028668, AR028667, AR028670, |
| | | | | | AR017908, A68112, A68104, A98467, |
| | | | | | I62368, AR031488, I13521, I52048, I44531, |
| | | | | | A84746, AI7115, AR028672, AI8079, |
| | | | | | AR038066, I50882, I15353, I66495, I66494, |
| | | | | | I66498, I66497, I66496, I66486, I66487, |
| | | | | | A71440, A71435, A67220, I13349, A07699, |
| | | | | | E08322, I74623, A60109, AJ244004, U87250, |
| | | | | | I00081, A70040, AR028564, A83643, |
| | | | | | A98420, A98423, A98432, A98436, A98417, |
| | | | | | A98427, A83151, I01968, AI3388, E00974, |
| | | | | | A02228, E00954, E00952, E00953, E00955, |
| | | | | | I08049, I43960, AR021440, E03165, E02221, |
| | | | | | E13364, AI0360, E02679, E02104, E02098, |
| | | | | | A92666, E02001, E01718, E02003, E02102, |
| | | | | | E03550, A28163, E02100, E01997, A58998, |
| | | | | | E02291, E02292, E02293, E01999, E02396, |
| | | | | | E02327, E01563, E02431, E01693, E01696, |
| | | | | | A92668, AR005163, AR005154, AR005157, |
| | | | | | AR005160, I09250, AR005153, A92667, |
| | | | | | E01024, AR050583, AR050584, E02430, |
| | | | | | E01148, E12527, E01503, AR005165, |
| | | | | | E12523, E02432, A49701, A62009, E01216, |
| | | | | | I77211, A95096, I70974, I31847, I31848, |
| | | | | | AR060673, AR060676, A95106, A95105, |
| | | | | | A80476, A91965, E01324, I08638, A80474, |
| | | | | | A94048, A94061, A80477, AR035224, |
| | | | | | A80475, A94046, A94054, I63560, |
| | | | | | AR031529, A49428, I63561, I63563, E16036, |
| | | | | | AC018903, AC068470, AL049186, |
| | | | | | AL049186, AC006510, AL022167, and |
| | | | | | AC022305. |
| HTEMV09 | 233 | 909843 | 1-1347 | 15-1361 | AI818734, AA454060, AA453640, |
| | | | | | AW268879, AI377304, AI818733, AI818743, |
| | | | | | AI681535, AI741915, AA948041, AI198872, |
| | | | | | AW341578, AI267885, AA767746, AI677678, |
| | | | | | AI829855, AI677729, AW129267, AA947425, |
| | | | | | AA297313, AL041049, N67346, and |
| | | | | | AA889773. |
| HTEMV66 | 234 | 1151075 | 1-847 | 15-861 | |
| HTGAU79 | 235 | 1175071 | 1-2139 | 15-2153 | |
| HTLEJ11 | 236 | 973302 | 1-956 | 15-970 | M62294. |
| HTLIY52 | 237 | 1218691 | 1-1362 | 15-1376 | |
| HTOAK34 | 238 | 966800 | 1-1271 | 15-1285 | AW408167, AA491322, AA505126, |
| | | | | | AI340133, AA831203, N27153, AA053564, |
| | | | | | AA809481, AF181985, and AF179867. |
| HTPGG25 | 239 | 911282 | 1-829 | 15-843 | AA018361, AI768326, AI333117, AA324901, |
| | | | | | F07835, AA378627, AL117482, Z61430, |
| | | | | | AC020705, and AC020705. |
| HUJAD24 | 240 | 1161319 | 1-1722 | 15-1736 | |
| HUTSF11 | 241 | 966029 | 1-416 | 15-430 | AI384010, AI288640, Z20435, and A74523. |
| HUVGZ88 | 242 | 1227628 | 1-2921 | 15-2935 | |
| HWADY66 | 243 | 1096252 | 1-352 | 15-366 | |
| HWAFG04 | 244 | 952878 | 1-1646 | 15-1660 | AI302185, AI652375, M936871, AW206793, |
| | | | | | AI025217, AI983297, AW002416, AI025310, |
| | | | | | AA593826, AI559159, AI418298, AW140018, |
| | | | | | AI017077, D54154, T03397, AW239548, |
| | | | | | H42947, D57560, AW192088, R23870, |
| | | | | | AI394630, AA503315, AA026054, F07734, |
| | | | | | Z40806, AI807678, AA297059, C14980, |
| | | | | | AW338394, AI073417, AW138409, |
| | | | | | AA088799, AI356604, C15480, AI825970, |
| | | | | | AI537006, AI168175, R46685, AA974700, |
| | | | | | AW078709, R46686, AI343378, AA364780, |
| | | | | | AI015047, AW137324, H42881, AA325059, |
| | | | | | AI831833, H22172, AA897415, F03562, |
| | | | | | R45025, F03423, AA382960, T82311, |
| | | | | | AW401787, AA382959, AW373232, |
| | | | | | AC018571, AC018571, AC015651, |
| | | | | | AC015651, AC015651, AC046185, and |
| | | | | | AC046185. |
| HWAFS18 | 245 | 948434 | 1-946 | 15-960 | W25237, and AF156884. |
| HWAGS73 | 246 | 1150212 | 1-612 | 15-626 | |
| HWLEA48 | 247 | 927676 | 1-415 | 15-429 | AA130828, AF169034, Z98752, and |
| | | | | | AF169033. |
| HWLHS82 | 248 | 934505 | 1-415 | 15-429 | AW401390, and AC005581. |
| HWMIB81 | 249 | 955336 | 1-1479 | 15-1493 | AW380440, AW299858, AW391525, H78769, |
| | | | | | H78659, H53674, AA628987, AA447173, |
| | | | | | AW204470, AA343468, AA480342, |
| | | | | | AF155118, AC021719, and AC016143. |
| HCWDV17 | 250 | 1105673 | 1-684 | 15-698 | |
| HELDI95 | 251 | 1103374 | 1-983 | 15-997 | |
| HAGFO25 | 252 | 1150845 | 1-806 | 15-820 | |
| HAWAB54 | 253 | 1149319 | 1-1428 | 15-1442 | |
| HLIBV06 | 254 | 934887 | 1-2224 | 15-2238 | |
| HMALL66 | 255 | 1105097 | 1-495 | 15-509 | |
| HOACE12 | 256 | 858976 | 1-439 | 15-453 | |
| HOGCG69 | 257 | 924848 | 1-1209 | 15-1223 | |
| HAGAE09 | 258 | 1150864 | 1-838 | 15-852 | |
| HAGAE34 | 259 | 1121869 | 1-757 | 15-771 | |
| HARMH78 | 260 | 1137572 | 1-547 | 15-561 | |
| HBJLB53 | 261 | 1226988 | 1-2037 | 15-2051 | |
| HBJNB52 | 262 | 1128792 | 1-793 | 15-807 | |
| HDABQ83 | 263 | 1201703 | 1-446 | 15-460 | |
| HDPDC84 | 264 | 1226990 | 1-3243 | 15-3257 | |
| HDPUF40 | 265 | 1212494 | 1-2384 | 15-2398 | |
| HDPWU07 | 266 | 1228286 | 1-3262 | 15-3276 | |
| HDTJJ02 | 267 | 1106328 | 1-318 | 15-332 | |
| HE2GA18 | 268 | 1121872 | 1-276 | 15-290 | |
| HE2SY03 | 269 | 1207925 | 1-1070 | 15-1084 | |
| HELGY64 | 270 | 1228289 | 1-2669 | 15-2683 | |
| HFIYW31 | 271 | 1151476 | 1-1271 | 15-1285 | |
| HFVIP88 | 272 | 1124705 | 1-898 | 15-912 | |
| HGBAS76 | 273 | 1193040 | 1-1677 | 15-1691 | |
| HHEBB62 | 274 | 1151481 | 1-541 | 15-555 | |
| HHEHU73 | 275 | 1151483 | 1-1007 | 15-1021 | |
| HHEMA11 | 276 | 1151484 | 1-638 | 15-652 | |
| HHEQK01 | 277 | 1107392 | 1-622 | 15-636 | |
| HHPEM84 | 278 | 915639 | 1-360 | 15-374 | |
| HHSED84 | 279 | 1150832 | 1-760 | 15-774 | |
| HIBCC94 | 280 | 1161292 | 1-1264 | 15-1278 | |
| HKADN56 | 281 | 1220254 | 1-3121 | 15-3135 | |
| HKIXG58 | 282 | 1124750 | 1-713 | 15-727 | |
| HLICI13 | 283 | 1177963 | 1-1856 | 15-1870 | |
| HLTGF17 | 284 | 662405 | 1-370 | 15-384 | |
| HLYDC50 | 285 | 1151494 | 1-860 | 15-874 | |
| HMADD49 | 286 | 1217031 | 1-2214 | 15-2228 | |
| HMEKE78 | 287 | 1128290 | 1-1811 | 15-1825 | |
| HMSHU26 | 288 | 1150833 | 1-1079 | 15-1093 | |
| HNEEB82 | 289 | 1076509 | 1-677 | 15-691 | |
| HNHIA06 | 290 | 1162086 | 1-710 | 15-724 | |
| HODFY16 | 291 | 1105244 | 1-797 | 15-811 | |
| HPQSB68 | 292 | 1221022 | 1-431 | 15-445 | |
| HRDBH04 | 293 | 1150876 | 1-1472 | 15-1486 | |
| HSICR69 | 294 | 1226965 | 1-1734 | 15-1748 | |
| HSIGJ94 | 295 | 1105417 | 1-701 | 15-715 | |
| HSYBL15 | 296 | 1104299 | 1-917 | 15-931 | |
| HTEKH29 | 297 | 855660 | 1-2063 | 15-2077 | |
| HTGEL46 | 298 | 1151520 | 1-1543 | 15-1557 | |
| HTGFA05 | 299 | 1198110 | 1-1736 | 15-1750 | |
| HTLDU61 | 300 | 1165319 | 1-1092 | 15-1106 | |
| HTOFT34 | 301 | 1152490 | 1-1467 | 15-1481 | |
| HTTDH46 | 302 | 1152491 | 1-1130 | 15-1144 | |
| HTTIO05 | 303 | 1229905 | 1-2571 | 15-2585 | |
| HWHGY45 | 304 | 911621 | 1-191 | 15-205 | AC021102. |
| HWLQR48 | 305 | 1128304 | 1-494 | 15-508 | |
| HWLQX76 | 306 | 1152280 | 1-453 | 15-467 | |
| HATDD09 | 307 | 1165331 | 1-1282 | 15-1296 | |
| HBJGT03 | 308 | 1105484 | 1-768 | 15-782 | |
| HMTMF45 | 309 | 1141737 | 1-773 | 15-787 | |
| HHPDV86 | 310 | 522953 | 1-666 | 15-680 | AL109627, AL109627, AC025928, and |
| | | | | | AC025928. |
| HE8BT56 | 311 | 732602 | 1-365 | 15-379 | |
| HUJDH06 | 312 | 907613 | 1-692 | 15-706 | |
| HOEJG61 | 313 | 907614 | 1-660 | 15-674 | |
| HE8PN24 | 314 | 907620 | 1-713 | 15-727 | |
| HGBHI37 | 315 | 909745 | 1-491 | 15-505 | |
| HCHOK82 | 316 | 909755 | 1-1077 | 15-1091 | |
| HFPCH24 | 317 | 912608 | 1-474 | 15-488 | |
| HTTKF86 | 318 | 912689 | 1-332 | 15-346 | Z82188, Z82188, and Z82188. |
| HCESA79 | 319 | 912709 | 1-302 | 15-316 | AC012171, AC012171, AC012171, |
| | | | | | AC009065, AC009065, AC009065, |
| | | | | | AC005346, AC005346, and AC005346. |
| HDTBJ28 | 320 | 912714 | 1-521 | 15-535 | AP001793, AC008052, AC008052, |
| | | | | | AC015676, AG015676, and AP000864. |
| HDPBF48 | 321 | 912783 | 1-945 | 15-959 | |
| HTPFY55 | 322 | 912928 | 1-562 | 15-576 | |
| HMSCM47 | 323 | 923632 | 1-711 | 15-725 | |
| HEOQA56 | 324 | 925132 | 1-413 | 15-427 | AC013449. |
| HTPCQ24 | 325 | 925349 | 1-436 | 15-450 | Z99716, and Z99716. |
| HWAEI37 | 326 | 929481 | 1-403 | 15-417 | AL035461, and AL035461. |
| HDPSF03 | 327 | 969536 | 1-1283 | 15-1297 | |
| HLHST63 | 328 | 581528 | 1-410 | 15-424 | |
| HFAAJ44 | 329 | 489201 | 1-287 | 15-301 | |
| HSLEM44 | 330 | 506604 | 1-337 | 15-351 | AC078913, AC022123, and AC010357. |
| HETCL79 | 331 | 522826 | 1-465 | 15-479 | |
| HFTAR20 | 332 | 670041 | 1-908 | 15-922 | |
| HCUFD32 | 333 | 699379 | 1-702 | 15-716 | |
| HKAEO39 | 334 | 705332 | 1-450 | 15-464 | |
| HLWBR95 | 335 | 734474 | 1-908 | 15-922 | AC013252, and AC013252. |
| HPWCJ63 | 336 | 772553 | 1-1407 | 15-1421 | |
| HBXCM35 | 337 | 782911 | 1-578 | 15-592 | |
| HULBN83 | 338 | 857836 | 1-624 | 15-638 | |
| HAGET77 | 339 | 885265 | 1-1730 | 15-1744 | |
| HMSOZ55 | 340 | 910911 | 1-979 | 15-993 | AC024229, and AC024229. |
| HAPOR42 | 341 | 911292 | 1-1102 | 15-1116 | |
| HMVAU10 | 342 | 911449 | 1-574 | 15-588 | |
| HTTFY29 | 343 | 911454 | 1-707 | 15-721 | |
| HHFJY06 | 344 | 911456 | 1-584 | 15-598 | |
| HPCIK72 | 345 | 911459 | 1-269 | 15-283 | |
| HFIDT84 | 346 | 919878 | 1-2655 | 15-2669 | |
| HMCAV88 | 347 | 924874 | 1-1031 | 15-1045 | AC068231, AC068231, AC068231, |
| | | | | | AL357752, AL357752, AC005476, and |
| | | | | | AC005476. |
| HKAIP73 | 348 | 928809 | 1-1441 | 15-1455 | |
| HFVHV40 | 349 | 945849 | 1-668 | 15-682 | AC020911, AC020911, and AC020911. |
| HTJNI80 | 350 | 952231 | 1-1017 | 15-1031 | |
| HEAAE08 | 351 | 959970 | 1-1053 | 15-1067 | AC008687, and AC008687. |
| HDPLU91 | 352 | 963199 | 1-734 | 15-748 | |
| HAPRM21 | 353 | 963200 | 1-857 | 15-871 | AL034374, AL034374, and AL034374. |
| HTDAB30 | 354 | 965320 | 1-1248 | 15-1262 | |
| H2CBN90 | 355 | 966919 | 1-809 | 15-823 | |
| HETFJ47 | 356 | 971305 | 1-1767 | 15-1781 | |
| HADEX52 | 357 | 971351 | 1-1819 | 15-1833 | |
| HTADZ74 | 358 | 811489 | 1-602 | 15-616 | AF077346, AC007278, and AC007278. |
| HAPNZ77 | 359 | 887072 | 1-469 | 15-483 | AC003046, AC005859, AC076973, |
| | | | | | AC003046, AC005859, AC023098, and |
| | | | | | AC023098. |
| HELDR74 | 360 | 963001 | 1-1414 | 15-1428 | AI741422, AW249482, AA573909, |
| | | | | | AA085764, AW272801, AI052311, |
| | | | | | AA151131, AI700257, AA490620, |
| | | | | | AA310938, AI683396, AI284596, AA961817, |
| | | | | | AA862960, AW073675, R87485, AI828443, |
| | | | | | AI925221, AI969547, AW001375, N24896, |
| | | | | | AI521481, AI925228, AI695515, AA609182, |
| | | | | | AA151130, AI245859, AA490809, |
| | | | | | AA040451, AW139250, AI970384, AI961068, |
| | | | | | T67610, AA923298, AA513675, AW027490, |
| | | | | | T96070, AI624751, T67494, AI936161, |
| | | | | | AW196036, AA679554, AI917354, N36317, |
| | | | | | AA302588, AI932690, AW250249, R88163, |
| | | | | | T72363, AI796143, W32439, AA582049, |
| | | | | | AI539047, W45013, and AF113795. |
| HDPLJ22 | 361 | 859915 | 1-533 | 15-547 | |
| HPMLD11 | 362 | 890204 | 1-1297 | 15-1311 | |
| HMVDZ78 | 363 | 938574 | 1-236 | 15-250 | AB002313. |
| HTSFJ40 | 364 | 722406 | 1-378 | 15-392 | W28953, H19139, R54508, H10122, H08285, |
| | | | | | AA313257, R59784, F08505, R52605, |
| | | | | | Z43765, F08180, AI401170, F05493, F07194, |
| | | | | | R13670, R13641, Z45409, AW407594, |
| | | | | | F07185, AW407965, AA461135, AA371650, |
| | | | | | AC006171, AC006171, and AL161645. |
| HEMBZ62 | 365 | 742551 | 1-458 | 15-472 | R13025. |
| HHFGZ38 | 366 | 785591 | 1-1153 | 15-1167 | AA372117, AA133546, and AI468754. |
| HDPLN70 | 367 | 854010 | 1-968 | 15-982 | |
| HSDJH12 | 368 | 876344 | 1-610 | 15-624 | AA428452, AA134294, T83462, AI219740, |
| | | | | | AA010048, AI478566, AI990289, AC021747, |
| | | | | | AL359882, and AC046143. |
| HNBUT01 | 369 | 913838 | 1-1090 | 15-1104 | AI219740, AI478566, AI632246, AA279757, |
| | | | | | AA977612, AA716656, AA687260, |
| | | | | | AI801069, AA071046, AI985849, AW370598, |
| | | | | | AA630617, AW370599, AW370625, |
| | | | | | AA134295, AW390691, AI990289, |
| | | | | | AA134294, AA428452, AI143764, D30955, |
| | | | | | AW370620, AA352142, AA074442, T83462, |
| | | | | | AW071043, T79236, and AI744728. |
| HEOQN14 | 370 | 923752 | 1-1031 | 15-1045 | AI014538, AW006457, AI479414, AI805243, |
| | | | | | AI290929, AI129301, AI872459, AI601146, |
| | | | | | AI708870, AI973043, AI540074, AI186894, |
| | | | | | AI682389, AI654747, AA460832, AI392777, |
| | | | | | AA405714, AA649837, AI356090, AI358510, |
| | | | | | AW294364, AA954900, AA991687, |
| | | | | | AI540589, AI953865, AA977875, AW190678, |
| | | | | | R61326, R54477, AW009738, AA724308, |
| | | | | | AW297100, R54409, AA627570, AA504833, |
| | | | | | AA489470, H08185, R08582, AA778454, |
| | | | | | AI810108, Z41744, R43473, AA765208, |
| | | | | | AI698394, Z39824, H19140, Z41120, F03843, |
| | | | | | AA701889, AA159318, AW408231, |
| | | | | | AA404221, H84256, AW131981, AI401170, |
| | | | | | AA405779, M475002, F01761, AW189730, |
| | | | | | H84262, F04422, AA404687, AA502309, |
| | | | | | AA371650, H29188, AA581151, AA477301, |
| | | | | | AA749407, AA477302, and AI144326. |
| HTXKL86 | 371 | 928194 | 1-767 | 15-781 | AI810108,W28953, AA313257, AI401170, |
| | | | | | AW408231, AA371650, H19139, R54508, |
| | | | | | H10122, R59784, H08285, F08505, Z43765, |
| | | | | | AI014538, AA504833, R52605, F08180, |
| | | | | | AA765208, F05493, AA461135, F07194, |
| | | | | | R13641, AA701889, AA159318, Z45409, |
| | | | | | AW407594, H84256, AA404221, R13670, |
| | | | | | F07185, H84262, AA404687, AW407965, |
| | | | | | AI144326, AW006457, and AA581151. |
| HDQGV77 | 372 | 937546 | 1-1876 | 15-1890 | |
| HE8TM80 | 373 | 955022 | 1-741 | 15-755 | R56714, AA125853, AA127005, H06566, |
| | | | | | T70821, AA307834, H53723, and AF191018. |
| HWLEY40 | 374 | 957875 | 1-1443 | 15-1457 | W28953, AI810108, AA159318, AA461135, |
| | | | | | H10122, AA313257, AA701889, AI654981, |
| | | | | | AI401170, H19139, H08285, AW408231, |
| | | | | | AA371650, R54508, R59784, AW407594, |
| | | | | | F07194, AA504833, F08180, F08505, Z43765, |
| | | | | | R52605, F07185, H84256, AW407965, |
| | | | | | P05493, H84262, AA404221, R13670, |
| | | | | | AA765208, Z45409, AA404687, R13641, |
| | | | | | AI014538, AI144326, AC006171, AC006171, |
| | | | | | and AL161645. |
| HDPPD36 | 375 | 493820 | 1-546 | 15-560 | |
| HOUBZ94 | 376 | 527876 | 1-139 | 15-153 | AC005954, AC005954, and AC068475. |
| HMIAH32 | 377 | 550977 | 1-689 | 15-703 | |
| HDPTH43 | 378 | 573418 | 1-434 | 15-448 | |
| HCE3W04 | 379 | 615501 | 1-859 | 15-873 | AC025165, AC025165, AC022506, |
| | | | | | AC022506, and AC022366. |
| HMUBZ20 | 380 | 670393 | 1-349 | 15-363 | |
| HDPAB51 | 381 | 685665 | 1-941 | 15-955 | |
| HPJAP28 | 382 | 686349 | 1-432 | 15-446 | AC004794, AC004794, and AC004794. |
| HIBEC79 | 383 | 703000 | 1-325 | 15-339 | AC011458, AC011458, and AC011458. |
| HOQBF64 | 384 | 703177 | 1-389 | 15-403 | |
| HTEDL38 | 385 | 761609 | 1-547 | 15-561 | |
| HE9HI71 | 386 | 779375 | 1-668 | 15-682 | |
| HNFHS82 | 387 | 779946 | 1-401 | 15-415 | AC010835. |
| HOUHO89 | 388 | 786548 | 1-895 | 15-909 | |
| HFPBB28 | 389 | 844526 | 1-321 | 15-335 | AC016135, AC002518, AC073717, and |
| | | | | | AC018512. |
| HHEWQ61 | 390 | 876063 | 1-1052 | 15-1066 | |
| HUFGH09 | 391 | 877078 | 1-635 | 15-649 | |
| HLICA79 | 392 | 880881 | 1-2031 | 15-2045 | |
| HSLIH01 | 393 | 884251 | 1-1868 | 15-1882 | |
| HE9OV91 | 394 | 887364 | 1-774 | 15-788 | |
| HHEDS85 | 395 | 894602 | 1-491 | 15-505 | |
| HNTDJ68 | 396 | 899624 | 1-2389 | 15-2403 | |
| HKAHO77 | 397 | 906671 | 1-699 | 15-713 | |
| HTFNP84 | 398 | 909687 | 1-2474 | 15-2488 | |
| HDQGZ78 | 399 | 909735 | 1-428 | 15-442 | AC026282. |
| HHEMD52 | 400 | 909742 | 1-1605 | 15-1619 | |
| HSIDQ38 | 401 | 909854 | 1-783 | 15-797 | AC003070. |
| HSKBF02 | 402 | 909855 | 1-383 | 15-397 | |
| HIBDE74 | 403 | 766011 | 1-508 | 15-522 | |
| HWMAE53 | 404 | 909877 | 1-436 | 15-450 | |
| HFXCG28 | 405 | 909961 | 1-596 | 15-610 | |
| HFTCU45 | 406 | 910053 | 1-538 | 15-552 | |
| HFTBL33 | 407 | 910055 | 1-1475 | 15-1489 | AC025165, AC025165, and AC022366. |
| HTXJA84 | 408 | 911387 | 1-900 | 15-914 | |
| HKAAW89 | 409 | 911389 | 1-433 | 15-447 | |
| HSXDD55 | 410 | 911460 | 1-1164 | 15-1178 | |
| HUFCI64 | 411 | 911558 | 1-759 | 15-773 | AC004151, and AC004151. |
| HWAFT84 | 412 | 911559 | 1-1342 | 15-1356 | AC004151, and AC004151. |
| HETCL18 | 413 | 914535 | 1-1388 | 15-1402 | |
| HCRNK75 | 414 | 914536 | 1-2256 | 15-2270 | |
| HTPFA03 | 415 | 922765 | 1-315 | 15-329 | |
| HWADR60 | 416 | 926487 | 1-1275 | 15-1289 | AC023176, andAC023176. |
| HWLEJ01 | 417 | 928017 | 1-781 | 15-795 | |
| HTXNG95 | 418 | 928577 | 1-1380 | 15-1394 | |
| HPCIG66 | 419 | 930886 | 1-945 | 15-959 | AC024888, AC024888, and AC024888. |
| HCRPU72 | 420 | 931140 | 1-931 | 15-945 | AC023151. |
| HE9RT95 | 421 | 934556 | 1-804 | 15-818 | AC022420, AC022420, AC022420, and |
| | | | | | AC008439. |
| HFXJM13 | 422 | 935725 | 1-426 | 15-440 | |
| HDPWU37 | 423 | 940705 | 1-522 | 15-536 | |
| HHSDL85 | 424 | 942246 | 1-760 | 15-774 | |
| HTJMD31 | 425 | 942848 | 1-638 | 15-652 | |
| HWADD57 | 426 | 943039 | 1-996 | 15-1010 | AC011492, and AC011492. |
| HLWAH05 | 427 | 944904 | 1-1338 | 15-1352 | |
| HDPCI84 | 428 | 945527 | 1-2479 | 15-2493 | |
| HBXDJ07 | 429 | 946830 | 1-1470 | 15-1484 | H11405, R55569, N27906, H20863, N25140, |
| | | | | | and U27708. |
| HAMFD12 | 430 | 952438 | 1-526 | 15-540 | |
| HFKHR40 | 431 | 952470 | 1-2240 | 15-2254 | AC061707, AC061707, AC061707, |
| | | | | | AC018805, and AC018805. |
| HDTAI08 | 432 | 953265 | 1-590 | 15-604 | |
| HMKCX80 | 433 | 956254 | 1-1174 | 15-1188 | |
| HCEMF69 | 434 | 961308 | 1-1026 | 15-1040 | |
| HWLHF10 | 435 | 963422 | 1-1387 | 15-1401 | AC010545, AC010545, and AC010545. |
| HOEMG82 | 436 | 963855 | 1-1087 | 15-1101 | |
| HFXDR37 | 437 | 965915 | 1-2442 | 15-2456 | |
| HNNAS46 | 438 | 969470 | 1-1493 | 15-1507 | |
| HRAAS26 | 439 | 971219 | 1-645 | 15-659 | |
| HHEEL28 | 440 | 973096 | 1-524 | 15-538 | |
| HCETF22 | 441 | 973324 | 1-2632 | 15-2646 | |
| HCMSF55 | 442 | 912284 | 1-715 | 15-729 | |

[0108] TABLE 4

| Code | Description | Tissue | Organ | Cell Line | Disease | Vector | |
|---|---|---|---|---|---|---|---|
| AR022 | a_Heart | a_Heart | | | | | |
| AR023 | a_Liver | a_Liver | | | | | |
| AR024 | a_mamary gland | a_mammary gland | | | | | |
| AR025 | a_Prostate | a_Prostate | | | | | |
| AR026 | a_small intestine | a_small intestine | | | | | |
| AR027 | a_Stomach | a_Stomach | | | | | |
| AR028 | Blood B cells | Blood B cells | | | | | |
| AR029 | Blood B cells | Blood B cells | | | | | |
| | activiated | activiated | | | | | |
| AR030 | Blood B cells | Blood B cells | | | | | |
| | resting | resting | | | | | |
| AR031 | Blood T cells | Blood T cells | | | | | |
| | activated | activated | | | | | |
| AR032 | Blood T cells | Blood T cells | | | | | |
| | resting | resting | | | | | |
| AR033 | brain | brain | | | | | |
| AR034 | breast | breast | | | | | |
| AR035 | breast cancer | breast cancer | | | | | |
| AR036 | Cell Line CAOV3 | Cell Line CAOV3 | | | | | |
| AR037 | cell line PA-1 | cell line PA-1 | | | | | |
| AR038 | cell line transformed | cell line transformed | | | | | |
| AR039 | colon | colon | | | | | |
| AR040 | colon (9808co65R) | colon (9808co65R) | | | | | |
| AR041 | colon (9809co15) | colon (9809co15) | | | | | |
| AR042 | colon cancer | colon cancer | | | | | |
| AR043 | colon cancer | colon cancer | | | | | |
| | (9808co64R) | (9808co64R) | | | | | |
| AR044 | colon cancer | colon cancer | | | | | |
| | (9808co14) | (9808co14) | | | | | |
| AR045 | corn clone 5 | corn clone 5 | | | | | |
| AR046 | corn clone 6 | corn clone 6 | | | | | |
| AR047 | corn clone 2 | corn clone 2 | | | | | |
| AR048 | corn clone 3 | corn clone 3 | | | | | |
| AR049 | Corn Clone 4 | Corn Clone 4 | | | | | |
| AR050 | Donor II B Cells | Donor II B Cells | | | | | |
| | 24 hrs | 24 hrs | | | | | |
| AR051 | Donor II B Cells | Donor II B Cells | | | | | |
| | 72 hrs | 72 hrs | | | | | |
| AR052 | Donor II B Cells | Donor II B Cells | | | | | |
| | 24 hrs. | 24 hrs. | | | | | |
| AR053 | Donor II B Cells | Donor II B Cells | | | | | |
| | 72 hrs | 72 hrs | | | | | |
| AR054 | Donor II Resting | Donor II Resting | | | | | |
| | B Cells | B Cells | | | | | |
| AR055 | Heart | Heart | | | | | |
| AR056 | Human Lung | Human Lung | | | | | |
| | (clonetech) | (clonetech) | | | | | |
| AR057 | Human Mammary | Human Mammary | | | | | |
| | (clonetech) | (clonetech) | | | | | |
| AR058 | Human Thymus | Human Thymus | | | | | |
| | (clonetech) | (clonetech) | | | | | |
| AR059 | Jurkat | Jurkat | | | | | |
| | (unstimulated) | (unstimulated) | | | | | |
| AR060 | Kidney | Kidney | | | | | |
| AR061 | Liver | Liver | | | | | |
| AR062 | Liver (Clontech) | Liver (Clontech) | | | | | |
| AR063 | Lymphocytes chronic | Lymphocytes chronic | | | | | |
| | lymphocytic leukaemia | lymphocytic leukaemia | | | | | |
| AR064 | Lymphocytes diffuse | Lymphocytes diffuse | | | | | |
| | large B cell | large B cell | | | | | |
| | lymphoma | lymphoma | | | | | |
| AR065 | Lymphocytes follicular | Lymphocytes follicular | | | | | |
| | lymphoma | lymphoma | | | | | |
| AR066 | normal breast | normal breast | | | | | |
| AR067 | Normal Ovarian | Normal Ovarian | | | | | |
| | (4004901) | (4004901) | | | | | |
| AR068 | Normal Ovary | Normal Ovary | | | | | |
| | (9508G045) | (9508G045) | | | | | |
| AR069 | Normal Ovary | Normal Ovary | | | | | |
| | (9701G208) | (9701G208) | | | | | |
| AR071 | Ovarian Cancer | Ovarian Cancer | | | | | |
| AR072 | Ovarian Cancer | Ovarian Cancer | | | | | |
| | (9702G001) | (970G001) | | | | | |
| AR073 | Ovarian Cancer | Ovarian Cancer | | | | | |
| | (9707G029) | (9707G029) | | | | | |
| AR074 | Ovarian Cancer | Ovarian Cancer | | | | | |
| | (9804G011) | (9804G011) | | | | | |
| AR075 | Ovarian Cancer | Ovarian Cancer | | | | | |
| | (9806G019) | (9806G019) | | | | | |
| AR076 | Ovarian Cancer | Ovarian Cancer | | | | | |
| | (9807G017) | (9807G017) | | | | | |
| AR077 | Ovarian Cancer | Ovarian Cancer | | | | | |
| | (9809G001) | (9809G001) | | | | | |
| AR078 | ovarian cancer | ovarian cancer | | | | | |
| | 15799 | 15799 | | | | | |
| AR079 | Ovarian Cancer | Ovarian Cancer | | | | | |
| | 17717AID | 17717AID | | | | | |
| AR080 | Ovarian Cancer | Ovarian Cancer | | | | | |
| | 4004664B1 | 4004664B1 | | | | | |
| AR081 | Ovarian Cancer | Ovarian Cancer | | | | | |
| | 4005315A1 | 4005315A1 | | | | | |
| AR082 | ovarian cancer | ovarian cancer | | | | | |
| | 94127303 | 94127303 | | | | | |
| AR083 | Ovarian Cancer | Ovarian Cancer | | | | | |
| | 96069304 | 96069304 | | | | | |
| AR084 | Ovarian Cancer | Ovarian Cancer | | | | | |
| | 9707G029 | 9707G029 | | | | | |
| AR085 | Ovarian Cancer | Ovarian Cancer | | | | | |
| | 9807G045 | 9807G045 | | | | | |
| AR086 | ovarian cancer | ovarian cancer | | | | | |
| | 9809G001 | 9809G001 | | | | | |
| AR087 | Ovarian Cancer | Ovarian Cancer | | | | | |
| | 9905C032RC | 9905C032RC | | | | | |
| AR088 | Ovarian cancer | Ovarian cancer | | | | | |
| | 9907 C00 3rd | 9907 C00 3rd | | | | | |
| AR089 | Prostate | Prostate | | | | | |
| AR090 | Prostate (clonetech) | Prostate (clonetech) | | | | | |
| AR091 | prostate cancer | prostate cancer | | | | | |
| AR092 | prostate cancer | prostate cancer | | | | | |
| | #15176 | #15176 | | | | | |
| AR093 | prostate cancer | prostate cancer | | | | | |
| | #15509 | #15509 | | | | | |
| AR094 | prostate cancer | prostate cancer | | | | | |
| | #15673 | #15673 | | | | | |
| AR095 | Small Intestine | Small Intestine | | | | | |
| | (Clonetech) | (Clonetech) | | | | | |
| AR096 | Spleen | Spleen | | | | | |
| AR097 | Thymus T cells | Thymus T cells | | | | | |
| | activated | activated | | | | | |
| AR098 | Thymus T cells | Thymus T cells | | | | | |
| | resting | resting | | | | | |
| AR099 | Tonsil | Tonsil | | | | | |
| AR100 | Tonsil geminal | Tonsil geminal | | | | | |
| | center centroblast | center centroblast | | | | | |
| AR101 | Tonsil geminal | Tonsil geminal | | | | | |
| | center B cell | center B cell | | | | | |
| AR102 | Tonsil lymph node | Tonsil lymph node | | | | | |
| AR103 | Tonsil memory B | Tonsil memory B | | | | | |
| | cell | cell | | | | | |
| AR104 | Whole Brain | Whole Brain | | | | | |
| AR105 | Xenograft ES-2 | Xenograft ES-2 | | | | | |
| AR106 | Xenograft SW626 | Xenograft SW626 | | | | | |
| H0002 | Human Adult Heart | Human Adult Heart | Heart | | | Uni-ZAP XR | |
| H0004 | Human Adult Spleen | Human Adult Spleen | Spleen | | | Uni-ZAP XR | |
| H0008 | Whole 6 Week Old | | | | | Uni-ZAP XR | |
| H0009 | Human Fetal Brain | | | | | Uni-ZAP XR | |
| H0011 | Human Fetal Kidney | Human Fetal Kidney | Kidney | | | Uni-ZAP XR | |
| H0012 | Human Fetal Kidney | Human Fetal Kidney | Kindey | | | Uni-ZAP XR | |
| H0013 | Human 8 Week Whole | Human 8 Week Old | Embryo | | | Uni-ZAP XR | |
| | Embryo | Embryo | | | | | |
| H0014 | Human Gall Bladder | Human Gall Bladder | Gall Bladder | | | Uni-ZAP XR | |
| H0015 | Human Gall Bladder, | Human Gall Bladder | Gall Bladder | | | Uni-ZAP XR | |
| | fraction II | | | | | | |
| H0022 | Jurkat Cells | Jurkat T-Cell Line | | | | Lambda ZAP II | |
| H0023 | Human Fetal Lung | | | | | Uni-ZAP XR | |
| H0024 | Human Fetal Lung III | Human Fetal Lung | Lung | | | Uni-ZAP XR | |
| H0025 | Human Adult Lymph | Human Adult Lymph | Lymph node | | | Lambda ZAP II | |
| | Node | Node | | | | | |
| H0026 | Namalwa Cells | Namalwa B-Cell | | | | Lambda ZAP II | |
| | | Line, EBV | | | | | |
| | | immortalized | | | | | |
| H0027 | Human Ovarian | | | | disease | Uni-ZAP XR | |
| | Cancer | | | | | | |
| H0028 | Human Old Ovary | Human Old Ovary | Ovary | | | pBluescript | |
| H0029 | Human Pancreas | Human Pancreas | Pancreas | | | Uni-ZAP XR | |
| H0030 | Human Placenta | | | | | Uni-ZAP XR | |
| H0031 | Human Placenta | Human Placenta | Plancenta | | | Uni-ZAP XR | |
| H0032 | Human Prostate | Human Prostate | Prostate | | | Uni-ZAP XR | |
| H0033 | Human Pituitary | Human Pituitary | | | | Uni-ZAP XR | |
| H0036 | Human Adult Small | Human Adult Small | Small Int. | | | Uni-ZAP XR | |
| | Intestine | Intestine | | | | | |
| H0037 | Human Adult Small | Human Adult Small | Small Int. | | | pBluescript | |
| | Intestine | Intestine | | | | | |
| H0038 | Human Testes | Human Testes | Testis | | | Uni-ZAP XR | |
| H0039 | Human Pancreas | Human Pancreas | Pancreas | | disease | Uni-ZAP XR | |
| | Tumor | Tumor | | | | | |
| H0040 | Human Testes | Human Testes | Testis | | disease | Uni-ZAP XR | |
| | Tumor | Tumor | | | | | |
| H0041 | Human Fetal Bone | Human Fetal Bone | Bone | | | Uni-ZAP XR | |
| H0042 | Human Adult | Human Adult | Lung | | | Uni-ZAP XR | |
| | Pulmonary | Pulmonary | | | | | |
| H0046 | Human Endometrial | Human Endometrial | Uterus | | disease | Uni-ZAP XR | |
| | Tumor | Tumor | | | | | |
| H0050 | Human Fetal Heart | Human Fetal Heart | Heart | | | Uni-ZAP XR | |
| H0051 | Human Hippocampus | Human Hippocampus | Brain | | | Uni-ZAP XR | |
| H0052 | Human Cerebellum | Human Cerebellum | Brain | | | Uni-ZAP XR | |
| H0056 | Human Umbilical | Human Umbilical | Umbilical | | | Uni-ZAP XR | |
| | Vein, Endo. Remake | Vein Endothelial | vein | | | | |
| H0057 | Human Fetal Spleen | | | | | Uni-ZAP XR | |
| H0059 | Human Uterine Cancer | Human Uterine Cancer | Uterus | | disease | Lambda ZAP II | |
| H0063 | Human Thymus | Human Thymus | Thymus | | | Uni-ZAP XR | |
| H0064 | Human Right Hem- | Human Brain, right | Brain | | | Uni-ZAP XR | |
| | isphere of Brain | hemisphere | | | | | |
| H0068 | Human Skin Tumor | Human Skin Tumor | Skin | | disease | Uni-ZAP XR | |
| H0069 | Human Activated | Activated T-Cells | Blood | Cell Line | | Uni-ZAP XR | |
| | T-Cells | | | | | | |
| H0071 | Human Infant Adrenal | Human Infant Adrenal | Adrenal | | | Uni-ZAP XR | |
| | Gland | Gland | gland | | | | |
| H0075 | Human Activated | Activated T-Cells | Blood | Cell Line | | Uni-ZAP XR | |
| | T-Cells | | | | | | |
| H0079 | Human Whole 7 Week | Human Whole 7 Week | Embryo | | | Uni-ZAP XR | |
| | Old Embryo (II) | Old Embryo | | | | | |
| H0081 | Human Fetal | Human Fetal Skin | Skin | | | Uni-ZAP XR | |
| | Epithelium (skin) | | | | | | |
| H0082 | Human Fetal Muscle | Human Fetal Muscle | Sk Muscle | | | Uni-ZAP XR | |
| H0083 | HUMAN JURKAT | Jurkat Cells | | | | Uni-ZAP XR | |
| | MEMBRAIN BOUND | | | | | | |
| | POLYSOMES | | | | | | |
| H0085 | Human Colon | Human Colon | | | | Lambda ZAP II | |
| H0086 | Human epithelioid | Epithelioid | Sk Muscle | | disease | Uni-ZAP XR | |
| | sarcoma | Sarcoma, Muscle | | | | | |
| H0087 | Human Thymus | Human Thymus | | | | pBluescript | |
| H0090 | Human T-Cell | T-Cell Lymphoma | T-Cell | | disease | Uni-ZAP XR | |
| | Lymphoma | | | | | | |
| H0092 | Human Pancreas | Human Pancreas | Pancreas | | disease | Uni-ZAP XR | |
| | Tumor | Tumor | | | | | |
| H0098 | Human Adult Liver, | Human Adult Liver | Liver | | | Uni-ZAP XR | |
| | subtracted | | | | | | |
| H0100 | Human Whole Six | Human Whole Six | Embryo | | | Uni-ZAP XR | |
| | Week Old Embryo | Week Old Embryo | | | | | |
| H0101 | Human 7 Week Old | Human Whole 7 Week | Embryo | | | Lambda ZAP II | |
| | Embryo, subtracted | Old Embryo | | | | | |
| H0102 | Human Whole 6 Week | Human Whole six | Embryo | | | pBluescript | |
| | Old Embryo (II), subt | Week Old Embryo | | | | | |
| H0105 | Human Fetal Heart, | Human Fetal Heart | Heart | | | pBluescript | |
| | subtracted | | | | | | |
| H0107 | Human Infant Adrenal | Human Infant Adrenal | Adrenal | | | pBluescript | |
| | Gland, subtracted | Gland | gland | | | | |
| H0108 | Human Adult Lymph | Human Adult Lymph | Lymph Node | | | Uni-ZAP XR | |
| | Node, subtracted | Node | | | | | |
| H0111 | Human Placenta, | Human Placenta | Placenta | | | pBluescript | |
| | subtracted | | | | | | |
| H0112 | Human Parathyroid | Human Parathyroid | Parathyroid | | | pBluescript | |
| | Tumor, subtracted | Tumor | | | | | |
| H0118 | Human Adult Kidney | Human Adult Kidney | Kidney | Uni-ZAP XR | | | |
| H0122 | Human Adult Skeletal | Human Skeletal | Sk Muscle | | | Uni-ZAP XR | |
| | Muscle | Muscle | | | | | |
| H0123 | Human Fetal Dura | Human Fetal Dura | Brain | | | Uni-ZAP XR | |
| | Mater | Mater | | | | | |
| H0124 | Human | Human | Sk Muscle | | disease | Uni-ZAP XR | |
| | Rhadomyosarcoma | Rhadomyosarcoma | | | | | |
| H0125 | Cem cells cyclohex- | Cyclohexamide | Blood | Cell Line | | Uni-ZAP XR | |
| | amide treated | Treated Cem, Jurkat, | | | | | |
| | | Raji, and Supt | | | | | |
| H0130 | LNCAP untreated | LNCAP Cell Line | Prostate | Cell Line | | Uni-ZAP XR | |
| H0131 | LNCAP + 0.3nM | LNCAP Cell Line | Prostate | Cell Line | | Uni-ZAP XR | |
| | R1881 | | | | | | |
| H0132 | LNCAP + 0.3nM | LNCAP Cell Line | Prostate | Cell Line | | Uni-ZAP XR | |
| | R1881 | | | | | | |
| H0134 | Raji Cells, cyclohex- | Cyclohexamide | Blood | Cell Line | | Uni-ZAP XR | |
| | amide treated | Treated Cem, Jurkat, | | | | | |
| | | Raji, and Supt | | | | | |
| H0135 | Human Synovial | Human Synovial | Synovium | | | Uni-ZAP XR | |
| | Sarcoma | Sarcoma | | | | | |
| H0136 | Supt Cells, Cyclohex- | Cyclohexamide | Blood | Cell Line | | Uni-ZAP XR | |
| | amide treated | Treated Cem, Jurkat, | | | | | |
| | | Raji, and Supt | | | | | |
| H0140 | Activated T-Cells, | activated T-Cells | Blood | Cell Line | | Uni-ZAP XR | |
| | 8 hrs. | | | | | | |
| H0144 | Nine Week Old Early | 9 Wk Old Early | Embryo | | | Uni-ZAP XR | |
| | Stage Human | Stage Human | | | | | |
| H0149 | 7 Week Old Early | Human Whole 7 | Embryo | | | Uni-ZAP XR | |
| | Stage Human, | Week Old Embryo | | | | | |
| | subtracted | | | | | | |
| H0150 | Human Epididymus | Epididymis | Testis | | | Uni-ZAP XR | |
| H0152 | Early Stage Human | Human Fetal Liver | Liver | | | Uni-ZAP XR | |
| | Liver, fract (II) | | | | | | |
| H0154 | Human Fibrosarcoma | Human Skin | Skin | | disease | Uni-ZAP XR | |
| | | Fibrosarcoma | | | | | |
| H0156 | Human Adrenal Gland | Human Adrenal Gland | Adrenal | | disease | Uni-ZAP XR | |
| | Tumor | Tumor | | | | | |
| H0159 | Activated T-Cells, | Activated T-Cells | Blood | Cell Line | | Uni-ZAP XR | |
| | 8 hrs., ligation2 | | | | | | |
| H0161 | Activated T-Cells, | Activated T-Cells | Blood | Cell Line | | Uni-ZAP XR | |
| | 24 hrs., ligation 2 | | | | | | |
| H0163 | Human Synovium | Human Synovium | Synovium | | | Uni-ZAP XR | |
| H0165 | Human Prostate, | Human Prostate, | Prostate | | disease | Uni-ZAP XR | |
| | Cancer, Stage B2 | Cancer, Stage B2 | | | | | |
| H0166 | Human Prostate, | Human Prostate, | Prostate | | disease | Uni-ZAP XR | |
| | Cancer, Stage B2 | Cancer, Stage B2 | | | | | |
| | fraction | | | | | | |
| H0169 | Human Prostate, | Human Prostate, | Prostate | | disease | Uni-ZAP XR | |
| | Cancer, Stage C | Cancer, Stage C | | | | | |
| | fraction | | | | | | |
| H0170 | 12 Week Old Early | Tweleve Week Old | Embryo | | | Uni-ZAP XR | |
| | Stage Human | Early Stage Human | | | | | |
| H0171 | 12 Week Old Early | Tweleve Week Old | Embryo | | | Uni-ZAP XR | |
| | Stage Human | Early Stage Human | | | | | |
| H0172 | Human Fetal Brain, | Human Fetal Brain | Brain | | | Lambda ZAP II | |
| | random pnmed | | | | | | |
| H0175 | H. Adult Spleen, | | | | | pSport1 | |
| | ziplox | | | | | | |
| H0177 | CAMA1Ee Cell Line | CAMA1Ee Cell Line | Breast | Cell Line | | Uni-ZAP XR | |
| H0178 | Human Fetal Brain | Human Fetal Brain | Brain | | | Uni-ZAP XR | |
| H0179 | Human Neutrophil | Human Neutrophil | Blood | | | Uni-ZAP XR | |
| H0180 | Human Primary Breast | Human Primary Breast | Breast | | disease | Uni-ZAP XR | |
| | Cancer | Cancer | | | | | |
| H0181 | Human Primary Breast | Human Primary Breast | Breast | | disease | Uni-ZAP XR | |
| | Cancer | Cancer | | | | | |
| H0182 | Human Primary Breast | Human Primary Breast | Breast | | disease | Uni-ZAP XR | |
| | Cancer | Cancer | | | | | |
| H0187 | Resting T-Cell | T-Cells | Blood | Cell Line | | Lambda ZAP II | |
| H0188 | Human Normal Breast | Human Normal Breast | Breast | | | Uni-ZAP XR | |
| H0189 | Human Resting | Human | Blood | Cell Line | | Uni-ZAP XR | |
| | Macrophage | Macrophage/Mono- | | | | | |
| | | cytes | | | | | |
| H0191 | Human Activated | Human | Blood | Cell Line | | Uni-ZAP XR | |
| | Macrophage (LPS), | Macrophage/Mono- | | | | | |
| | thiour | cytes | | | | | |
| H0194 | Human cerebellum, | Human cerebellum | Brain | | | pBluescript | |
| | subtracted | | | | | | |
| H0196 | Human cardio- | Human | Heart | | | Uni-ZAP XR | |
| | myopathy, subracted | Cardiomyopathy | | | | | |
| H0197 | Human Fetal Liver, | Human Fetal Liver | Liver | | | Uni-ZAP XR | |
| | subtracted | | | | | | |
| H0199 | Human Fetal Liver, | Human Fetal Liver | Liver | | | Uni-ZAP XR | |
| | subtracted, neg clone | | | | | | |
| H0201 | Human Hippocampus, | Human Hippocampus | Brain | | | pBluescript | |
| | subtracted | | | | | | |
| H0208 | Early Stage Human | Human Fetal Lung | Lung | | | pBluescript | |
| | Lung, subtracted | | | | | | |
| H0212 | Human Prostate, | Human Prostate | Prostate | | | pBluescript | |
| | subtracted | | | | | | |
| H0213 | Human Pituitary, | Human Pituitary | | | | Uni-ZAP XR | |
| | subtracted | | | | | | |
| H0216 | Supt cells, cyclohex- | Cyclohesamide | Blood | Cell Line | | pBluescript | |
| | amide treated, | Treated Cem, Jurkat | | | | | |
| | subtracted | Raji, and Supt | | | | | |
| H0217 | Supt cells, cyclohex- | Cyclohesamide | Blood | Cell Line | | pBluescript | |
| | amide treated, | Treated Cem, Jurkat | | | | | |
| | differentally expressed | Raji and Supt | | | | | |
| H0222 | Activated T-Cells, | Activated T-Cells | Blood | Cell Line | | Uni-ZAP XR | |
| | subtracted | | | | | | |
| H0231 | Human Colon, | Human Colon | | | | pBluescript | |
| | subtraction | | | | | | |
| H0233 | Human Fetal Heart, | Human Fetal Heart | Heart | | | pBluescript | |
| | Differential (Adult- | | | | | | |
| | Specific) | | | | | | |
| H0234 | human colon cancer, | Human Colon Cancer, | Liver | | | pBluescript | |
| | metastatic to liver, | metastatic to liver | | | | | |
| | differentially | | | | | | |
| | expressed | | | | | | |
| H0235 | Human colon cancer, | Human Colon Cancer, | Liver | | | pBluescript | |
| | metastatic to liver, | metastatic to liver | | | | | |
| | subtracted | | | | | | |
| H0239 | Human Kidney Tumor | Human Kidney Tumor | Kidney | | disease | Uni-ZAP XR | |
| H0241 | C7MCF7 cell line, | C7MCF7 cell line, | Breast | Cell Line | | Uni-ZAP XR | |
| | estrogen treated | estrogen treated | | | | | |
| | subtraction | | | | | | |
| H0244 | Human 8 Week Whole | Human 8 Week Old | Embryo | | | Uni-ZAP XR | |
| | Embryo, subtracted | Embryo | | | | | |
| H0246 | Human Fetal Liver- | Human Fetal Liver | Liver | | | Uni-ZAP XR | |
| | Enzyme subtraction | | | | | | |
| H0247 | Human Membrane | Human Membrane | Blood | Cell Line | | Uni-ZAP XR | |
| | Bound Polysomes- | Bound Polysomes | | | | | |
| | Enzyme Subtraction | | | | | | |
| H0249 | HE7, subtracted by | Human Whole 7 | Embryo | | | Uni-ZAP XR | |
| | hybridizatin with E7 | Week Old Embryo | | | | | |
| | cDNA | | | | | | |
| H0250 | Human Activated | Human Monocytes | | | | Uni-ZAP XR | |
| | Monocytes | | | | | | |
| H0251 | Human Chondro- | Human Chondro- | Cartilage | | disease | Uni-ZAP XR | |
| | sarcoma | sarcoma | | | | | |
| H0252 | Human Osteosarcoma | Human Osteosarcoma | Bone | | disease | Uni-ZAP XR | |
| H0253 | Human adult testis, | Human Adult Testis | Testis | | | Uni-ZAP XR | |
| | large inserts | | | | | | |
| H0254 | Breast Lymph Node | Breast Lymph Node | Lymph Node | | | Uni-ZAP XR | |
| | cDNA library | | | | | | |
| H0255 | breast lymph node | Breast Lymph Node | Lymph Node | | | Lambda ZAP II | |
| | CDNA library | | | | | | |
| H0257 | HL-60, PMA 4H | HL-60, Cells, PMA | Blood | Cell Line | | Uni-ZAP XR | |
| | | stimulated 4H | | | | | |
| H0261 | H. cerebellum, | Human Cerebellum | Brain | | | Uni-ZAP XR | |
| | Enzyme subtracted | | | | | | |
| H0263 | human colon cancer | Human Colon Cancer | Colon | | disease | Lambda ZAP II | |
| H0264 | human tonsils | Human Tonsil | Tonsil | | | Uni-ZAP XR | |
| H0265 | Activated T-Cell | T-Cells | Blood | Cell Line | | Uni-ZAP XR | |
| | (12 hs)/Thiouridine | | | | | | |
| | labelledEco | | | | | | |
| H0266 | Human Microvascular | HMEC | Vein | Cell Line | | Lambda ZAP II | |
| | Endothelial Cells, | | | | | | |
| | fract. A | | | | | | |
| H0267 | Human Microvascular | HMEC | Vein | Cell Line | | Lambda ZAP II | |
| | Endothelial Cells, | | | | | | |
| | fract. B | | | | | | |
| H0268 | Human Umbilical | HUVE Cells | Umbilical | Cell Line | | Lambda ZAP II | |
| | Vein Endothelial | | vein | | | | |
| | Cells, fract. A | | | | | | |
| H0268 | Human Umbilical | HUVE Cells | Umbilical | Cell Line | | Lambda ZAP II | |
| | Vein Endothelial | | vein | | | | |
| | Cells, fract. B | | | | | | |
| H0271 | Human Neutrophil, | Human Neutrophil- | Blood | Cell Line | | Uni-ZAP XR | |
| | Activated | Activated | | | | | |
| H0272 | HUMAN TONSILS, | Human Tonsil | Tonsil | | | Uni-ZAP XR | |
| | FRACTION 2 | | | | | | |
| H0280 | K562 + PMA (36 hrs) | K562 Cell line | cell line | Cell Line | | ZAP Express | |
| H0282 | HBGB″s differential | Human Primary | Breast | | | Uni-ZAP XR | |
| | consolidation | Breast Cancer | | | | | |
| H0284 | Human OB MG63 | Human Osteoblastoma | Bone | Cell Line | | Uni-ZAP XR | |
| | control fraction I | MG63 cell line | Bone | Cell Line | | Uni-ZAP XR | |
| H0286 | Human OB MG63 | Human Osteoblastoma | | | | | |
| | treated (10 nm E2) | MG63 cell line | | | | | |
| | fraction I | | | | | | |
| H0288 | Human OB HOS | Human Osteoblastoma | Bone | Cell Line | | Uni-ZAP XR | |
| | control fraction I | HOS cell line | | | | | |
| H0290 | Human OB HOS | Human Osteoblastoma | Bone | Cell Line | | Uni-ZAP XR | |
| | treated (1 nM E2) | HOS cell line | | | | | |
| | fraction I | | | | | | |
| H0292 | Human OB HOS | Human Osteoblastoma | Bone | Cell Line | | Uni-ZAP XR | |
| | treated (10 nM E2) | HOS cell line | | | | | |
| | fraction I | | | | | | |
| H0294 | Amniotic Cells-TNF | Amniotic Cells-TNF | Placenta | Cell Line | | Uni-ZAP XR | |
| | induced | induced | | | | | |
| H0295 | Amniotic Cells- | Amniotic Cells- | Placenta | Cell Line | | Uni-ZAP XR | |
| | Primary Culture | Primary Culture | | | | | |
| H0298 | HCBB″s differential | CAMA1Ee Cell Line | Breast | Cell Line | | Uni-ZAP XR | |
| | consolidation | | | | | | |
| H0299 | HCBA″s differential | CAMA1Ee Cell Line | Breast | Cell Line | | Uni-ZAP XR | |
| | consolidation | | | | | | |
| H0300 | CD34 positive cells | CD34 Positive Cells | Cord Blood | | | ZAP Express | |
| | (Cord Blood) | | | | | | |
| H0305 | CD34 positive cells | CD34 Positive Cells | Cord Blood | | | ZAP Express | |
| | (Cord Blood) | | | | | | |
| H0306 | CD34 depleted Buffy | CD34 Depleted Buffy | Cord Blood | | | ZAP Express | |
| | Coat (Cord Blood) | coated (Cord Blood) | | | | | |
| H0309 | Human Chronic | Synovium, Chronic | Synovium | | disease | Uni-ZAP XR | |
| | Synovitis | Synovitis/ | | | | | |
| | | Osteoarthritis | | | | | |
| H0310 | human caudate nucleus | Brain | Brain | | | Uni-ZAP XR | |
| H0316 | HUMAN STOMACH | Human Stomach | Stomach | | | Uni-ZAP XR | |
| H0318 | HUMAN B CELL | Human B Cell | Lymph node | | disease | Uni-ZAP XR | |
| | LYMPHOMA | Lymphoma | | | | | |
| H0320 | Human frontal cortex | Human frontal cortex | Brain | | | Uni-ZAP XR | |
| H0327 | human corpus colosum | Human Corpus | Brain | | | Uni-ZAP XR | |
| | | Colosum | | | | | |
| H0328 | human ovarian cancer | Ovarian Cancer | Ovary | | disease | Uni-ZAP XR | |
| H0329 | Dermatofibrosarcoma | Dermatofibrosarcoma | Skin | | disease | Uni-ZAP XR | |
| | Protuberance | Protuberance | | | | | |
| H0331 | Hepatocellular Tumor | Hepatocellular Tumor | Liver | | disease | Lambda ZAP II | |
| H0333 | Hemangiopericytoma | Hemangiopericytoma | Blood vessel | | disease | Lambda ZAP II | |
| H0334 | Kidney cancer | Kidney Cancer | Kidney | | disease | Uni-ZAP XR | |
| H0339 | Duodenum | Duodenum | | | | Uni-ZAP XR | |
| H0340 | Carpus Callosum | Carpus Callosum- | | | | Uni-ZAP XR | |
| | | 93052 | | | | | |
| H0341 | Bone Marrow Cell | Bone Marrow Cell | Bone | Cell Line | | Uni-ZAP XR | |
| | Line (RS4;11) | Line (RS4;11) | Marrow | | | | |
| H0342 | Lingual Gyrus | Lingual Gyrus | Brain | | | Uni-ZAP XR | |
| H0343 | stomach cancer | Stomach Cancer- | | | disease | Uni-ZAP XR | |
| | (human) | 5383A (human) | | | | | |
| H0345 | SKIN | Skin-4000868H | Skin | | | Uni-ZAP XR | |
| H0349 | human adult liver | Human Adult Liver | Liver | | | pCMVSport 1 | |
| | cDNA library | | | | | | |
| H0351 | Glioblastoma | Glioblastoma | Brain | | disease | Uni-ZAP XR | |
| H0352 | wilm″s tumor | Wilm″s Tumor | | | disease | Uni-ZAP XR | |
| H0355 | Human Liver | Human Liver- | | | | pCMVSport 1 | |
| | | normal Adult | | | | | |
| H0356 | Human Kidney | Human Kidney | Kidney | | | pCMVSport 1 | |
| H0359 | KMH2 cell line | KMH2 | | | | ZAP Express | |
| H0361 | Human rejected kidney | Human Rejected | | | disease | pBluescript | |
| | | Kidney | | | | | |
| H0364 | Human Osteoclastoma, | Human Osteoclastoma | | | disease | pBluescript | |
| | excised | | | | | | |
| H0365 | Osteoclastoma- | Human Osteoclastoma | | | disease | Uni-ZAP XR | |
| | normalized B | | | | | | |
| H0366 | L428 cell line | L428 | | | | ZAP Express | |
| H0369 | H. Atrophic | Atrophic Endometrium | | | | Uni-ZAP XR | |
| | Endometrium | and myometrium | | | | | |
| H0370 | H. Lymph note | Lymph node with Met. | | | disease | Uni-ZAP XR | |
| | breast Cancer | Breast cancer | | | | | |
| H0372 | Human Testes | Human Testes | Testis | | | pCMVSport 1 | |
| H0373 | Human Heart | Human Heart | Heart | | | pCMVSport 1 | |
| H0374 | Human Brain | Human Brain | | | | pCMVSport 1 | |
| H0375 | Human Lung | Human Lung | | | | pCMVSport 1 | |
| H0376 | Human Spleen | Human Adult | Spleen | | | pCMVSport 1 | |
| | | Spleen | | | | | |
| H0379 | Human Tongue, frac 1 | Human Tongue | | | | pSport1 | |
| H0381 | Bone Cancer | Bone Cancer | | | disease | Uni-ZAP XR | |
| H0383 | Human Prostate BPH | Human Prostate BPH | | | | Uni-ZAP XR | |
| | excision | | | | | | |
| H0384 | Brain, Kozak | Human Brain | | | | pCMVSport 1 | |
| H0386 | Leukocyte and Lung; | Human Leukocytes | Blood | Cell Line | | pCMVSport 1 | |
| | 4 screens | | | | | | |
| H0388 | Human Rejected | Human Rejected | | | disease | pBluescript | |
| | Kidney, 704 re- | Kidney | | | | | |
| | excision | | | | | | |
| H0390 | Human Amygdala | Human Amygdala | | | disease | pBluescript | |
| | depression, re- | Depression | | | | | |
| | excision | | | | | | |
| H0391 | H. Meningima | Human Meningima | brain | | | pSport1 | |
| H0392 | H. Meningima | Human Meningima | brain | | | pSport1 | |
| H0393 | Fetal Liver, subtracted | Human Fetal Liver | | | | pBluescript | |
| | II | | | | | | |
| H0394 | A-14 cell line | Redd-Sternberg cell | | | | ZAP Express | |
| H0395 | A1-CELL LINE | Redd-Sternberg cell | | | | ZAP Express | |
| H0399 | Human Kidney | Human Kidney | | | | Lambda ZAP II | |
| | Cortex, re-rescue | Cortex | | | | | |
| H0400 | Human Striatum | Human Brain | Brain | | | Lambda ZAP II | |
| | Depression, re-rescue | Striatum Depression | | | | | |
| H0401 | Human Pituitary, | Human Pituitary | | | | pBluescript | |
| | subtracted V | | | | | | |
| H0402 | CD34 depleted Buffy | CD34 depleted Buffy | Cord Blood | | | ZAP Express | |
| | Coat (Cord Blood), | Coat (Cord Blood) | | | | | |
| | re-excision | | | | | | |
| H0408 | Human kidney Cortex, | Human kidney Cortex | | | | pBluescript | |
| | subtracted | | | | | | |
| H0409 | H. Striatum | Human Brain, | Brain | | | pBluescript | |
| | Depression, subtracted | Striatum Depression | | | | | |
| H0411 | H Female Bladder, | Human Female Adult | Bladder | | | pSport1 | |
| | Adult | Bladder | | | | | |
| H0412 | Human umbilical vein | HUVE Cells | Umbilical | Cell Line | | pSport1 | |
| | endothelial cells, IL4 | | vein | | | | |
| | induced | | | | | | |
| H0413 | Human Umbilical | HUVE Cells | Umbilical | Cell Line | | pSport1 | |
| | Vein Endothelial | | vein | | | | |
| | Cells, uninduced | | | | | | |
| H0414 | Ovarian Tumor I, | Ovarian Tumor | Ovary | | disease | pSport1 | |
| | OV5232 | OV5232 | | | | | |
| H0415 | H. Ovarian Tumor II, | Ovarian Tumor | Ovary | | disease | pSport1 | |
| | OV5232 | OV5232 | | | | | |
| H0416 | Human Neutrophils, | Human Neutrophil- | Blood | Cell Line | | pBluescript | |
| | Activated, re-excision | Activated | | | | | |
| H0417 | Human Pituitary, | Human Pituitary | | | | pBluescript | |
| | subtracted VIII | | | | | | |
| H0421 | Human Bone Marrow, | Bone Marrow | | | | pBluescript | |
| | re-excision | | | | | | |
| H0422 | T-Cell PHA 16 hrs | T-Cells | Blood | Cell Line | | pSport1 | |
| H0423 | T-Cell PHA 24 hrs | T-Cells | Blood | Cell Line | | pSport1 | |
| H0424 | Human pituitary, subt | Human Pituitary | | | | pBluescript | |
| | IX | | | | | | |
| H0429 | Human Ovary | Human Ovary | Ovary | | | pSport1 | |
| | | Tumor | | | | | |
| H0429 | K562 + PMA (36 hrs), | K562 Cell Line | cell line | Cell Line | | ZAP Express | |
| | re,excision | | | | | | |
| H0431 | H. Kidney Medulla, | Kidney medulla | Kidney | | | pBluescript | |
| | re-excision | | | | | | |
| H0433 | Human Umbilical | HUVE Cells | Umbilical | Cell Line | | pBluescript | |
| | Endothelial cells, | | vein | | | | |
| | frac B, | | | | | | |
| H0434 | Human Brain, | Human Brain, | | | | pBluescript | |
| | striatum, re-excision | Striatum | | | | | |
| H0435 | Ovarian Tumor | Ovarian Tumor, | Ovary | | | pCMVSport 2.0 | |
| | 10-3-95 | OV350721 | | | | | |
| H0436 | Resting T-Cell | T-Cells | Blood | Cell Line | | pSport1 | |
| | Library, II | | | | | | |
| H0437 | H Umbilical Vein | HUVE Cells | Umbilical | Cell Line | | Lambda ZAP II | |
| | Endothelial Cells, frac | | vein | | | | |
| | A, re-excision | | | | | | |
| H0438 | H. Whole Brain #2, | Human Whole Brain | | | | ZAP Express | |
| | re-excision | #2 | | | | | |
| H0441 | H. Kiendy Cortex, | Kidney cortex | Kidney | | | pBluescript | |
| | subtracted | | | | | | |
| H0443 | H. Adipose, subtracted | Human Adipose, left | | | | PSport1 | |
| | | hiplipoma | | | | | |
| H0444 | Spleen metastic | Spleen, Metastic | Spleen | | disease | pSport1 | |
| | melanoma | malignant | | | | | |
| | | melanoma | | | | | |
| H0445 | Spleen, Chronic | Human Spleen, CLL | Spleen | | disease | pSport1 | |
| | lymphocytic leukemia | | | | | | |
| H0453 | H. Kidney Pyramid, | Kidney pyramids | Kidney | | | pBluescript | |
| | subtracted | | | | | | |
| H0455 | H. Striatum | Human Brain, | Brain | | | pBluescript | |
| | Depression, subt | Striatum Depression | | | | | |
| H0457 | Human Eosinophils | Human Eosinophils | | | | pSport1 | |
| H0458 | CD34+ cell, I, frac | CD34 positive cells | | | | pSport1 | |
| | II | | | | | | |
| H0459 | CD34+ cell, II, | CD34 positive cells | | | | pSport1 | |
| | FRACTION 2 | | | | | | |
| H0462 | H. Amygdala | | Brain | | | pBluescript | |
| | Depressin, subtracted | | | | | | |
| H0477 | Human Tonsil, Lib 3 | Human Tonsil | Tonsil | | | pSport1 | |
| H478 | Salivary Gland, Lib 2 | Human Salivary | Salivary | | | pSport1 | |
| | | Gland | gland | | | | |
| H0479 | Salivary Gland, Lib 3 | Human Salivary | Salivary | | | pSport1 | |
| | | Gland | gland | | | | |
| H0483 | Breast Cancer cell | Breast Cancer Cell | | | | pSport1 | |
| | line, MDA 36 | line, MDA 36 | | | | | |
| H484 | Breast Cancer cell | Breast Cancer Cell | | | | pSport1 | |
| | line, angiogenic | line, Angiogenic, | | | | | |
| | | 36T3 | | | | | |
| H0485 | Hodgkin″s Lymphoma | Hodgkin″s | | | disease | pCMVSport 2.0 | |
| | I | Lymphoma I | | | | | |
| H0486 | Hodgkin″s Lymphoma | Hodgkin″s | | | disease | pCMVSport 2.0 | |
| | II | Lymphoma II | | | | | |
| H0487 | Human Tonsil, lib I | Human Tonsil | | | | pCMVSport 2.0 | |
| H0489 | Human Tonsil, lib 2 | Human Tonsil | | | | pCMVSport 2.0 | |
| H0489 | Crohn″s Disease | Ileum | Intestine | | disease | pSport1 | |
| H0492 | HL-60, RA 4h, | HL-60 Cells, RA | Blood | Cell Line | | Uni-ZAP XR | |
| | Subracted | stimulated for 4H | | | | | |
| H0494 | Keratinocyte | Keratinocyte | | | | pCMVSport 2.0 | |
| | Subtracted | | | | | | |
| H0497 | HEL cell line | HEL cell line | | HEL 92.1.7 | | pSport1 | |
| H0505 | Human Astrocyte | Human Astrocyte | | | | pSport1 | |
| H0506 | Ulcerative Colitis | Colon | Colon | | | pSport1 | |
| H0509 | Liver, Hepatoma | Human Liver, | Liver | | disease | pCMVSport 3.0 | |
| | | Hepatoma, patient 8 | | | | | |
| H0510 | Human Liver, Normal | Human Liver, normal, | Liver | | | pCMVSport 3.0 | |
| | | Patient #8 | | | | | |
| H0517 | Nasal polyps | Nasal polyps | | | | pCMVSport 2.0 | |
| H0518 | pBMC stimulated w/ | pBMC stimulated | | | | pCMVSport 3.0 | |
| | poly I/C | with poly I/C | | | | | |
| H0519 | NTERA2, control | NTERA2, | | | | pCMVSport 3.0 | |
| | | Teratocarcinoma | | | | | |
| | | cell line | | | | | |
| H0520 | NTERA2 + retinoic | NTERA2, | | | | pCMVSport 3.0 | |
| | acid, 14 days | Teratocarcinoma | | | | | |
| | | cell line | | | | | |
| H0521 | Primary Denritic Cells, | Primary Denritic cells | | | | pCMVSport 3.0 | |
| | lib 1 | | | | | | |
| H0522 | Primary Denritic cells, | Primary Denritic cells | | | | pCMVSport 3.0 | |
| | frac 2 | | | | | | |
| H0525 | PCR, pBMC I/C | pBMC stimulated with | | | | PCRII | |
| | treated | poly I/C | | | | | |
| H0528 | Poly [I]/Poly[C] | Poly [I]/Poly[C] | | | | pCMVSport 3.0 | |
| | Normal Lung | Normal Lung | | | | | |
| | Fibroblasts | Fibroblasts | | | | | |
| H0529 | Myoloid Progenitor | TF-1 Cell Line; | | | | pCMVSport 3.0 | |
| | Cell Line | Myoloid progenitor | | | | | |
| | | cell line | | | | | |
| H0530 | Human Dermal | Human Dermal | | | | pSport1 | |
| | Endothelial Cells, | Endothelial Cells; | | | | | |
| | untreated | untreated | | | | | |
| H0538 | Merkel Cells | Merkel Cells | Lymph node | | | pSport1 | |
| H0539 | Pancreas Islet Cell | Pancreas Islet Cell | Pancreas | | disease | pSport1 | |
| | Tumor | Tumor | | | | | |
| H0540 | Skin, burned | Skin, leg burned | Skin | | | pSport1 | |
| H0542 | T Cell helper I | Helper T cell | | | | pCMVSport 3.0 | |
| H0543 | T cell helper II | Helper T cell | | | | pCMVSport 3.0 | |
| H0544 | Human endometrial | Human endometrial | | | | pCMVSport 3.0 | |
| | stromal cells | stromal cells | | | | | |
| H0545 | Human endometrial | Human endometrial | | | | pCMVSport 3.0 | |
| | stromal cells-treated | stromal cells-treated | | | | | |
| | with progesterone | with proge | | | | | |
| H0546 | Human endometrial | Human endometrial | | | | pCMVSport 3.0 | |
| | stromal cells-treated | stromal cells-treated | | | | | |
| | with estradiol | with estra | | | | | |
| H0547 | NTERA2 | NTERA2 | | | | pSport1 | |
| | teratocarcinoma | Teratocarcinoma | | | | | |
| | cell line + retinoic | cell line | | | | | |
| | acid (14 days) | | | | | | |
| H0549 | H. Epididiymus, caput | Human Epididiymus, | | | | Uni-ZAP XR | |
| | & corpus | caput and corpus | | | | | |
| H0550 | H. Epididiymus, cauda | Human Epididiymus, | | | | Uni-ZAP XR | |
| | | cauda | | | | | |
| H0551 | Human Thymus | Human Thymus | | | | pCMVSport 3.0 | |
| | Stromal Cells | Stromal Cells | | | | | |
| H0553 | Human Placenta | Human Placenta | | | | pCMVSport 3.0 | |
| H0555 | Rejected Kidney, lib 4 | Human Rejected | Kidney | | disease | pCMVSport 3.0 | |
| | | Kidney | | | | | |
| H0556 | Activated T- | T-Cells | Blood | Cell Line | | Uni-ZAP XR | |
| | cell(12h)/Thiouridine- | | | | | | |
| | re-excision | | | | | | |
| H0559 | HL-60, PMA 4H, re- | HL-60 Cells, PMA | Blood | Cell Line | | Uni-ZAP XR | |
| | excision | stimulated 4H | | | | | |
| H0560 | KMH2 | KMH2 | | | | pCMVSport 3.0 | |
| H0561 | L428 | L428 | | | | pCMVSport 3.0 | |
| H0562 | Human Fetal Brain, | Human Fetal Brain | | | | pCMVSport 2.0 | |
| | normalized c5-11-26 | | | | | | |
| H0563 | Human Fetal Brain, | Human Fetal Brain | | | | pCMVSport 2.0 | |
| | normalized 50021F | | | | | | |
| H0566 | Human Fetal Brain, | Human Fetal Brain | | | | pCMVSport 2.0 | |
| | normalized c50F | | | | | | |
| H0569 | Human Fetal Brain, | Human Fetal Brain | | | | pCMVSport 2.0 | |
| | normalized CO | | | | | | |
| H0571 | Human Fetal Brain, | Human Fetal Brain | | | | pCMVSport 2.0 | |
| | normalized C500HE | | | | | | |
| H0572 | Human Fetal Brain, | Human Fetal Brain | | | | pCMVSport 2.0 | |
| | normalized AC5002 | | | | | | |
| H0574 | Hepatocellular Tumor, | Hepatocellular Tumor | Liver | | disease | Lambda ZAP II | |
| | re-excision | | | | | | |
| H0575 | Human Adult | Human Adult | Lung | | disease | Lambda ZAP II | |
| | Pulmonary; re-excision | Pulmonary | | | | | |
| H0576 | Resting T-Cells; re- | T-Cells | Blood | Cell Line | | Lambda ZAP II | |
| | excision | | | | | | |
| H0579 | Pericardium | Pericardium | Heart | | | pSport1 | |
| H0580 | Dendritic cells, pooled | Pooled dendritic cells | | | | pCMVSport 3.0 | |
| H0581 | Human Bone Marrow, | Human Bone Marrow | Bone | | | pCMVSport 3.0 | |
| | treated | | Marrow | | | | |
| H0583 | B Cell lymphoma | B Cell lymphoma | B Cell | | disease | pCMVSport 3.0 | |
| H0584 | Acvated T-cells, 24 | Acvated T-Cells | Blood | Cell Line | | Uni-ZAP XR | |
| | hrs, re-excision | | | | | | |
| H0586 | Healing groin wound, | healing groin wound, | groin | | disease | pCMVSport 3.0 | |
| | 6.5 hours post incision | 6.5 hours post | | | | | |
| | | incision-2/ | | | | | |
| H0587 | Healing groin wound, | Groin-2/19/97 | groin | | disease | pCMVSport 3.0 | |
| | 7.5 hours post incision | | | | | | |
| H0589 | Cd34 positive cells | Cd34 Positive Cells | Cord Blood | | | ZAP Express | |
| | (cord blood), re-ex | | | | | | |
| H0590 | Human adult small | Human Adult Small | Small Int. | | | Uni-ZAP XR | |
| | intestine, re-excision | Intestine | | | | | |
| H0591 | Human T-cell | T-Cell Lymphoma | T-Cell | | disease | Uni-ZAP XR | |
| | lymphoma; re-excision | | | | | | |
| H0592 | Healing groin wound- | HGS wound healing | | | disease | pCMVSport 3.0 | |
| | zero hr post-incision | project; abdomen | | | | | |
| | (control) | | | | | | |
| H0593 | Olfactory epithelium; | Olfactory epithelium | | | | pCMVSport 3.0 | |
| | nasalacvity | from foof of left | | | | | |
| | | nasal cacit | | | | | |
| H0594 | Human Lung Cancer; | Human Lung Cancer | Lung | | disease | Lambda ZAP II | |
| | re-excision | | | | | | |
| H0595 | Stomach cancer | Stomach Cancer- | | | disease | Uni-ZAP XR | |
| | (human); re-excision | 5383A (human) | | | | | |
| H0596 | Human Colon Cancer; | Human Colon Cancer | Colon | | | Lambda ZAP II | |
| | re-excision | | | | | | |
| H0597 | Human Colon; re- | Human Colon | | | | Lambda ZAP II | |
| | excision | | | | | | |
| H0598 | Human Stomach; re- | Human Stomach | Stomach | | | Uni-ZAP XR | |
| | excision | | | | | | |
| H0599 | Human Adult Heart; | Human Adult Heart | Heart | | | Uni-ZAP XR | |
| | re-excision | | | | | | |
| H0600 | Healing Abdomen | Abdomen | | | disease | pCMVSport 3.0 | |
| | wound; 70 & 90 min | | | | | | |
| | post incision | | | | | | |
| H0601 | Healing Abdomen | Abdomen | | | disease | pCMVSport 3.0 | |
| | wound; 15 days | | | | | | |
| | post incision | | | | | | |
| H0602 | Healing Abdomen | Abdomen | | | disease | pCMVSport 3.0 | |
| | wound; 21 & 29 | | | | | | |
| | post incision | | | | | | |
| H0604 | Human Pituitary, re- | Human Pituitary | | | | pBluescript | |
| | excision | | | | | | |
| H0606 | Human Pituitary | Human Pituitary | Breast | | disease | Uni-ZAP XR | |
| | Breast Cancer; re- | Breast Cancer | | | | | |
| | excision | | | | | | |
| H0607 | H. Leukocytes, | H. Leukocytes | | | | pCMVSport 1 | |
| | normalized cot 50A3 | | | | | | |
| H0609 | H. Leukocytes, | H. Leukocytes | | | | pCMVSport 1 | |
| | normalized cot >50A3 | | | | | | |
| H0610 | H. Leukocytes, | H. Leukocytes | | | | pCMVSport 1 | |
| | normalized cot 5A | | | | | | |
| H0611 | H. Leukocytes, | H. Leukocytes | | | | pCMVSport 1 | |
| | normalized cot 500B | | | | | | |
| H0613 | H. Leukocytes, | H. Leukocytes | | | | pCMVSport 1 | |
| | normalized cot 5B | | | | | | |
| H0615 | Human Ovarian | Ovarian Cancer | Ovary | | | Uni-ZAP XR | |
| | Cancer Reexcision | | | | | | |
| H0616 | Human Testes, Re- | Human Testes | Testis | | | Uni-ZAP XR | |
| | excision | | | | | | |
| H0617 | Human Primary Breast | Human Primary | Breast | | disease | Uni-ZAP XR | |
| | Cancer Reexcision | Breast Cancer | | | | | |
| H0618 | Human Adult Testes, | Human Adult Testes | Testis | | | Uni-ZAP XR | |
| | Large Inserts, Re- | | | | | | |
| | excision | | | | | | |
| H0619 | Fatal Heart | Human Fetal Heart | Heart | | | Uni-ZAP XR | |
| H0620 | Human Fetal Kidney; | Human Fetal Kidney | Kidney | | | Uni-ZAP XR | |
| | Reexcision | | | | | | |
| H0622 | Human Pancreas | Human Pancreas | Pancreas | | disease | Uni-ZAP XR | |
| | Tumor; Reexcision | Tumor | | | | | |
| H0623 | Human Umbilical | Human Umbilical | Umbilical | | | Uni-ZAP XR | |
| | Vein; Reexcision | Vein endothelial | | | | | |
| | | Cells | | | | | |
| H0624 | 12 Week Early Stage | Twelve Week Old | Embryo | | | Uni-ZAP XR | |
| | Human II; Reexcision | Early Stage Human | | | | | |
| H0625 | Ku 812F Basophils | Ku 812F Basophils | | | | pSport1 | |
| | Line | | | | | | |
| H0626 | Saos2 Cells; Untreated | Saos2 Cell Line; | | | | pSport1 | |
| | | Untreated | | | | | |
| H0267 | Saos2 Cells; Vitamin | Saos2 Cell Line; | | | | pSport1 | |
| | D3 Treated | Vitamin D3 Treated | | | | | |
| H0628 | Human Pre- | Human Pre- | | | | Uni-ZAP XR | |
| | Differentiated | Differentiated | | | | | |
| | Adipocytes | Adipocytes | | | | | |
| H0629 | Human Leukocyte, | Human Normalized | | | | pCMVSport 1 | |
| | control #2 | leukocyte | | | | | |
| H0630 | Human Leukocyte, | Human Normalized | | | | pCMVSport 1 | |
| | normalized control #4 | leukocyte | | | | | |
| H0631 | Saos2, Dexametho- | Saos2 Cell Line; | | | | pSport1 | |
| | some Treated | Dexamethosome | | | | | |
| | | Treated | | | | | |
| H0632 | Hepatocellular Tumor; | Hepatocellular Tumor | Liver | | | Lambda ZAP II | |
| | excision | | | | | | |
| H0633 | Lung Carcinoma A549 | TNFalpha activated | | | disease | pSport1 | |
| | TNFalpha activated | A549--Lung | | | | | |
| | | Carcinoma | | | | | |
| H0634 | Human Testes Tumor, | Human Testes Tumor | Testis | | disease | Uni-ZAP XR | |
| | re-excision | | | | | | |
| H0635 | Human Activated | Activated T-Cells | Blood | Cell Line | | Uni-ZAP XR | |
| | T-Cells, re-excision | | | | | | |
| H0637 | Dendritic Cells From | Dendritic cells from | | | | pSport1 | |
| | CD34 Cells | CD34 cells | | | | | |
| H0638 | CD40 activated | CD40 activated | | | | pSport1 | |
| | monocyte dendridic | monocyte dendridic | | | | | |
| | cells | cells | | | | | |
| H0641 | LPS activated derived | LPS activated | | | | pSport1 | |
| | dendritic cells | monocyte derived | | | | | |
| | | dendritic cells | | | | | |
| H0642 | Hep G2 Cells, lambda | Hep G2 Cells | | | | Other | |
| | library | | | | | | |
| H0643 | Hep G2 Cells, PCR | Hep G2 Cells | | | | Other | |
| | library | | | | | | |
| H0644 | Human Placenta (re- | Human Placenta | Placenta | | | Uni-ZAP XR | |
| | excision) | | | | | | |
| H0645 | Fetal Heart, re- | Human Fetal Heart | Heart | | | Uni-ZAP XR | |
| H0646 | Lung, Cancer (40053 | Metastatic | | | | pSport1 | |
| | 13A3): Invasive | squamous cell lung | | | | | |
| | Poorly Differ- | carcinoma, poorly di | | | | | |
| | entiated Lung Adeno- | | | | | | |
| | carcinoma, | | | | | | |
| H0647 | Lung, Cancer (40051 | Invasive poorly | | | disease | pSport1 | |
| | 63B7): Invasive, | differentiated lung | | | | | |
| | Poorly Diff. Adeno- | adenocarincoma | | | | | |
| | carcinoma, Metastatic | | | | | | |
| H0648 | Ovary, Cancer: (40045 | Papillary Cstic | | | disease | pSport1 | |
| | 62B6) papillary | neoplasm of low | | | | | |
| | Serous Cystic | malignant potentia | | | | | |
| | Neoplasm, Low | | | | | | |
| | Malignant Pot | | | | | | |
| H0649 | Lung, Normal: (40053 | Normal Lung | | | | pSport1 | |
| | 13B1) | | | | | | |
| H0650 | B-Cells | B-Cells | | | | pCMVSport 3.0 | |
| H0651 | Ovary, Normal: | Normal Ovary | | | | pSport1 | |
| | (9805C040R) | | | | | | |
| H0652 | Lung, Normal: (4005 | Normal Lung | | | | pSport1 | |
| | 313B1) | | | | | | |
| H0653 | Stromal Cells | Stromal Cells | | | | pSport1 | |
| H0656 | B-cells (unstimulated) | B-cells (unstimulated) | | | | pSport1 | |
| H0657 | B-cells (stimulated) | B-cells (stimulated) | | | | pSport1 | |
| H0658 | Ovary, Cancer | 9809C332-Poorly | Ovary & | | disease | pSport1 | |
| | (9809C332): Poorly | differentiate | Fallopian | | | | |
| | adenocarcinoma | Tubes | | | | | |
| H0659 | Ovary, Cancer | Grade II Papillary | Ovary | | disease | pSport1 | |
| | (15395A1F): Grade II | Carcinoma, Ovary | | | | | |
| | Papillary Carcinoma | | | | | | |
| H0660 | Ovary, Cancer: | Poorly differentiated | | | disease | pSport1 | |
| | (15799A1F) Poorly | carcinoma, ovary | | | | | |
| | differentiated | | | | | | |
| | carcinoma | | | | | | |
| H0661 | Breast, Cancer: | Breast Cancer | | | disease | pSport1 | |
| | (4004943A5) | | | | | | |
| H0662 | Breast, Normal: | Breast Normal- | Breast | | pSport1 | | |
| | (4005522B2) | #4005522(B2) | | | | | |
| H0663 | Breast, Cancer: | Breast Cancer- | Breast | | disease | pSport1 | |
| | (4005522A2) | #4005522(A2) | | | | | |
| H0664 | Breast, Cancer: | Breast Cancer | | | disease | pSport1 | |
| | (9806C012R) | | | | | | |
| H0665 | Stromal cells 3.88 | Stromal cells 3.88 | | | | pSport1 | |
| H0666 | Ovary, Cancer: | Ovarian Cancer, | | | | pSport1 | |
| | (4004332A2) | Sample | | | | | |
| | | #4004332A2 | | | | | |
| H0667 | Stromal cells | Stromal cells | | | | pSport1 | |
| | (HBM3.18) | (HBM3.18) | | | | | |
| H0668 | stromal cell clone | stromal cell clone | | | | pSport1 | |
| | 2.5 | 2.5 | | | | | |
| H0669 | Breast, Cancer: | Breast Cancer | Breast | | | pSport1 | |
| | (4005385A2) | (4005385A2) | | | | | |
| H0670 | Ovary, Cancer | Ovarian Cancer- | | | | pSport1 | |
| | (4004650A3): Well- | 4004650A3 | | | | | |
| | Differentiated | | | | | | |
| | Micropapillary Serous | | | | | | |
| | Carcinoma | | | | | | |
| H0671 | Breast, Cancer: | Breast Cancer- | | | | pSport1 | |
| | (9802C02OE) | Sample # | | | | | |
| | | 9802C02OE | | | | | |
| H0672 | Ovary, Cancer: | Ovarian Cancer | Ovary | | | pSport1 | |
| | (4004576A8) | (4004576A8) | | | | | |
| H0673 | Human Prostate | Human Prostate | Prostate | | | Uni-ZAP XR | |
| | Cancer, Stage B2; | Cancer, Stage B2 | | | | | |
| | re-excision | | | | | | |
| H0675 | Human Prostate | Human Prostate | Prostate | | | Uni-ZAP XR | |
| | Cancer, Stage C; | Cancer, Stage C | | | | | |
| | re-excision | | | | | | |
| H0675 | Colon, Cancer: | Colon Cancer | | | | pCMVSport 3.0 | |
| | (9808C064R) | 9808C064R | | | | | |
| H0676 | Colon, Cancer: | Colon Cancer | | | | pCMVSport 3.0 | |
| | (9808C064R)-total | 9808C064R | | | | | |
| | RNA | | | | | | |
| H0677 | TNFR degenerate | B-Cells | | | | PCR11 | |
| | oligo | | | | | | |
| H0682 | Serous Papillary | serous papillyar | | | | pCMVSport 3.0 | |
| | Adenocarcinoma | adenocarcinoma | | | | | |
| | | (9606G304SPA3B) | | | | | |
| H0683 | Ovarian Serous | Serous papillary | | | | pCMVSport 3.0 | |
| | Papillary | adenocarcinoma | | | | | |
| | Adenocarcinoma | stace 3C (9804G01 | | | | | |
| H684 | Serous Papillary | Ovarian Cancer- | Ovaries | | | pCMVSport 3.0 | |
| | Adenocarcinoma | 9810G606 | | | | | |
| H0685 | Adenocarcinoma of | Adenocarcinoma of | | | | pCMVSport 3.0 | |
| | Ovary, Human Cell | Ovary, Human Cell | | | | | |
| | Line, #OVCAR-3 | Line, #OVCAR- | | | | | |
| H0686 | Adenocarcinoma of | Adenocarcinoma of | | | | pCMVSport 3.0 | |
| | Ovary, Human Cell | Ovary, Human Cell | | | | | |
| | Line | Line, #SW-626 | | | | | |
| H0687 | Human normal | Human normal | Ovary | | | pCMVSport 3.0 | |
| | ovary (#9610G215) | ovary (#9610G215) | | | | | |
| H0688 | Human Ovarian | Human Ovarian | | | | pCMVSport 3.0 | |
| | Cancer (#9807G017) | Cancer (#9807G017), | | | | | |
| | | mRNA from Maura | | | | | |
| | | Ru | | | | | |
| H0689 | Ovarian Cancer | Ovarian Cancer, | | | | pCMVSport 3.0 | |
| | | #9806G019 | | | | | |
| H0690 | Ovarian Cancer | Ovarian Cancer, | | | | pCMVSport 3.0 | |
| | #9702G001 | #9702G001 | | | | | |
| H0691 | Normal Ovary, | normal ovary, | | | | pCMVSport 3.0 | |
| | #9710G208 | #9710G208 | | | | | |
| H0693 | Normal Prostate | Normal Prostate | | | | pCMVSport 3.0 | |
| | #ODQ3958EN | Tissue #ODQ3958EN | | | | | |
| H0695 | monoucleocytes from | monoucleocytes from | | | | pCMVSport 3.0 | |
| | patient | patient at Shady | | | | | |
| | | Grove Hospit | | | | | |
| N0006 | Human Fetal Brain | Human Fetal Brain | | | | | |
| N0007 | Human Hippocampus | Human Hippocampus | | | | | |
| N0009 | Human Hippocampus | Human Hippocampus | | | | | |
| | prescreened | | | | | | |
| S0001 | Brain frontal cortex | Brain frontal cortex | Brain | | | Lambda ZAP II | |
| S0002 | Monocyte activated | Monocyte-activated | Blood | Cell Line | | Uni-ZAP XR | |
| S0003 | Human Osteoclastoma | Osteoclastoma | bone | | disease | Uni-ZAP XR | |
| S0004 | Prostate | Prostate BPH | | Prostate | | Lambda ZAP II | |
| S0005 | Heart | Heart-left ventricle | Heart | | | pCDNA | |
| S0007 | Early Stage Human | Human Fetal Brain | | | | Uni-ZAP XR | |
| | Brain | | | | | | |
| S0010 | Human Amygdala | Amygdala | | | | Uni-ZAP XR | |
| S0011 | STROMAL- | Osteoclastoma | bone | | disease | Uni-ZAP XR | |
| | OSTEOCLASTOMA | | | | | | |
| S0013 | Prostate | Prostate | prostate | | | Uni-ZAP XR | |
| S0016 | Kidney Pyramids | Kidney Pyramids | Kidney | | | Uni-ZAP XR | |
| S0022 | Human Osteoclastoma | Osteoclastoma | | | | Uni-ZAP XR | |
| | Stromal Cells- | Stromal Cells | | | | | |
| | unamplified | | | | | | |
| S0026 | Stromal cells TF274 | stromal cells | Bone | Cell Line | | Uni-ZAP XR | |
| | | | marrow | | | | |
| S0027 | Smooth muscle, serum | Smooth muscle | Pulmanary | Cell Line | | Uni-ZAP XR | |
| | treated | | artery | | | | |
| S0028 | Smooth muscle, | Smooth muscle | Pulmanary | Cell Line | | Uni-ZAP XR | |
| | control | | artery | | | | |
| S0029 | brain stem | Brain stem | brain | | | Uni-ZAP XR | |
| S0030 | Brain pons | Brain Pons | Brain | | | Uni-ZAP XR | |
| S0031 | Spinal cord | Spinal cord | spinal cord | | | Uni-ZAP XR | |
| S0032 | Smooth muscle-ILb | Smooth muscle | Pulmanary | Cell Line | | Uni-ZAP XR | |
| | induced | | artery | | | | |
| S0036 | Human Substantia | Human Substantia | | | | Uni-ZAP XR | |
| | Nigra | Nigra | | | | | |
| S0037 | Smooth muscle, IL1b | Smooth muscle | Pulmanary | Cell Line | | Uni-ZAP XR | |
| | induced | | artery | | | | |
| S0038 | Human Whole Brain | Human Whole Brain | | | | ZAP Express | |
| | #2-Oligo dT >1.5 Kb | #2 | | | | | |
| S0040 | Adipocytes | Human Adipocytes | | | | Uni-ZAP XR | |
| | | from Osteoclastoma | | | | | |
| S0042 | Testes | Human Testes | | | | ZAP Express | |
| S0044 | Prostate BPH | prostate BPH | Prostate | | disease | Uni-ZAP XR | |
| S0045 | Endothelial cells- | Endothelial cell | endothelial | Cell Line | | Uni-ZAP XR | |
| | control | | cell-lung | | | | |
| S0046 | Endothelial-induced | Endothelial cell | endothelial | Cell Line | | Uni-ZAP XR | |
| | | | cell-lung | | | | |
| S0048 | Human Hypothalamus, | Human Hypothalamus, | | | disease | Uni-ZAP XR | |
| | Alzheimer″s | Alzheimer″s | | | | | |
| S0049 | Human Brain, | Human Brain, | | | | Uni-ZAP XR | |
| | Striatum | Striatum | | | | | |
| S0050 | Human Frontal Cortex, | Human Frontal Cortex, | | | disease | Uni-ZAP XR | |
| | Schizophrenia | Schizophrenia | | | | | |
| S0051 | Human Hypothalmus, | Human Hypothalmus, | | | disease | Uni-ZAP XR | |
| | Schizophrenia | Schizophrenia | | | | | |
| S0052 | neutrophils control | neutrophils control | blood | Cell Line | | Uni-ZAP XR | |
| S0053 | Nuetrophils IL-1 and | human neutrophil | blood | Cell Line | | Uni-ZAP XR | |
| | LPS induced | induced | | | | | |
| S0106 | STRIATUM | | BRAIN | | disease | Uni-ZAP XR | |
| | DEPRESSION | | | | | | |
| S0112 | Hypothalamus | | Brain | | | Uni-ZAP XR | |
| S0114 | Anergic T-cell | Anergic T-cell | | Cell Line | | Uni-ZAP XR | |
| S0116 | Bone marrow | Bone marrow | | | | Uni-ZAP XR | |
| S0122 | Osteoclastoma- | Osteoclastoma | bone | | disease | pBluescript | |
| | normalized A | | | | | | |
| S0126 | Osteoblasts | Osteoblasts | Knee | Cell Line | | Uni-ZAP XR | |
| S0132 | Epithelial-TNFa and | Airway Epithelial | | | | Uni-ZAP XR | |
| | INF induced | | | | | | |
| S0134 | Apoptotic T-cell | apoptotic cells | | Cell Line | | Uni-ZAP XR | |
| S0136 | PERM TF274 | stromal cell | Bone | Cell Line | | Lambda ZAP II | |
| | | | marrow | | | | |
| S0140 | eosinophil-IL5 induced | eosinophil | lung | Cell Line | | Uni-ZAP XR | |
| S0142 | Marcophage-oxLDL | marcophage-oxidized | blood | Cell Line | | Uni-ZAP XR | |
| | | LDL treated | | | | | |
| S0144 | Marcophage (GM-CSF | Marcophage (GM-CSF | | | | Uni-ZAP XR | |
| | treated) | treated) | | | | | |
| S0146 | prostate-edited | prostate BPH | Prostate | | | Uni-ZAP XR | |
| S0148 | Normal Prostate | Prostate | prostate | | | Uni-ZAP XR | |
| S0150 | LANCAP prostate cell | LNCAP Cell Line | Prostate | Cell Line | | Uni-ZAP XR | |
| | line | | | | | | |
| S0152 | PC3 Prostate cell line | PC3 prostate cell line | | | | Uni-ZAP XR | |
| S0180 | Bone Marrow Stroma, | Bone Marrow Stroma, | | | disease | Uni-ZAP XR | |
| | TNF & LPS ind | TNF & LPS induced | | | | | |
| S0182 | Human B Cell 8866 | Human B Cell 8866 | | | | Uni-ZAP XR | |
| S0188 | Prostate, BPH, Lib 2 | Human Prostate BPH | | | disease | pSport1 | |
| S0192 | Synovial Fibroblasts | Synovial Fibroblasts | | | | pSport1 | |
| | (control) | | | | | | |
| S0194 | Synovial hypoxia | Synovial Fibroblasts | | | | pSport1 | |
| S0196 | Synovial IL-1/TNF | Synovial Fibroblasts | | | | pSport1 | |
| | stimulated | | | | | | |
| S0202 | 7TM-pbdd | PBLS, 7TM | | | | PCRII | |
| | | receptor enriched | | | | | |
| S0206 | Smooth Muscle- | Smooth muscle | Pulmanary | Cell Line | | pBluescript | |
| | HASTE normalized | | artery | | | | |
| S0208 | Messangial cell, frac 1 | Messangial cell | | | | pSport1 | |
| S0210 | Messangial cell, frac 2 | Messangial cell | | | | pSport1 | |
| S0212 | Bone Marrow Stromal | Bone Marrow Stromal | | | | pSport1 | |
| | Cell, untreated | Cell, untreated | | | | | |
| S0214 | Human Osteoclastoma, | Osteoclastoma | bone | | disease | Uni-ZAP XR | |
| | re-excision | | | | | | |
| S0216 | Neutrophils IL-1 and | human neutrophil | blood | Cell Line | | Uni-ZAP XR | |
| | induced | induced | | | | | |
| S0218 | Apoptotic T-cell, re- | apoptotic cells | | Cell Line | | Uni-ZAP XR | |
| | excision | | | | | | |
| S0220 | H. hypothalamus, frac | Hypothalamus | Brain | | | ZAP Express | |
| | A; re-excision | | | | | | |
| S0222 | H. Frontal cortex, | H. Brain Frontal | Brain | | disease | Uni-ZAP XR | |
| | epileptic; re-excision | Cortex, Epileptic | | | | | |
| S0242 | Synovial Fibroblasts | Synovial Fibroblasts | | | | pSport1 | |
| | (Il 1/TNF), subt | | | | | | |
| S0250 | Human Osteoblasts II | Human Osteoblasts | Femur | | disease | pCMVSport 2.0 | |
| S0252 | 7TM-PIMIX | PBLS, 7TM receptor | | | | PCRII | |
| | | enriched | | | | | |
| S0260 | Spinal Cord, re- | Spinal Cord | spinal cord | | | Uni-ZAP XR | |
| | excision | | | | | | |
| S0268 | PRMIX | PRMIX (Human | prostate | | | PCRII | |
| | | Prostate) | | | | | |
| S0270 | PTMIX | PTMIX (Human | Thymus | | | PCRII | |
| | | thymus) | | | | | |
| S0274 | PCMIX | PCMIX (Human | Brain | | | PCRII | |
| | | Cerebellum) | | | | | |
| S0276 | Synovial hypoxia-RSF | Synovial fobroblasts | Synovial | | | pSport1 | |
| | subtacted | (rheumatoid) | | | | | |
| S0278 | H Macrophage (GM- | Macrophage (GM-CSF | | | | Uni-ZAP XR | |
| | CSF treated), re- | treated) | | | | | |
| | excision | | | | | | |
| S0280 | Human Adipose | Human Adipose | | | | Uni-ZAP XR | |
| | Tissue, re-excision | Tissue | | | | | |
| S0282 | Brain Frontal Cortex, | Brain frontal cortex | Brain | | | Lambda ZAP II | |
| | re-excision | | | | | | |
| S0294 | Larynx tumor | Larynx tumor | Larynx, | | disease | pSport1 | |
| | | | vocal cord | | | | |
| S0298 | Bone marrow | Bone marrow | Bone | | | pSport1 | |
| | stroma, treated | stroma, treatedSB | marrow | | | | |
| S0300 | Frontal lobe, dementia | Frontal lobe, dementia/ | Brain | | | Uni-ZAP XR | |
| | re-excision | Alzheimer″s | | | | | |
| S0306 | Larynx normal #10 | Larynx normal | | | | pSport1 | |
| | 261-273 | | | | | | |
| S0310 | Normal trachea | Normal trachea | | | | pSport1 | |
| S0312 | Human osteoarthritic; | Human osteoarthritic | | | disease | pSport1 | |
| | fraction II | cartilage | | | | | |
| S0314 | Human osteoarthritic; | Human osteoarthritic | | | disease | pSport1 | |
| | fraction I | cartilage | | | | | |
| S0316 | Human Normal | Human Normal | | | | pSport1 | |
| | Cartilage, Fraction I | Cartilage | | | | | |
| S0318 | Human Normal | Human Normal | | | | pSport1 | |
| | Cartilage, Fraction II | Cartilage | | | | | |
| S0322 | Siebben Polyposis | Siebben Polyposis | | | | pSport1 | |
| S0328 | Palate carcinoma | Palate carcinoma | Uvula | | disease | pSport1 | |
| S0330 | Palate normal | Palate normal | Uvula | | | pSport1 | |
| S0332 | Pharynx carcinoma | Pharynx carcinoma | Hypo- | | | pSport1 | |
| S0334 | Human Normal Cartil- | Human Normal Cartil- | pharynx | | | pSport1 | |
| | age Fraction III | age | | | | | |
| S0336 | Human Normal Cartil- | Human Normal Cartil- | | | | pSport1 | |
| | age Fraction III | age | | | | | |
| S0338 | Human Osteoarthritic | Human osteoarthritic | | | disease | pSport1 | |
| | Cartilage Fraction III | cartilage | | | | | |
| S0340 | Human Osteoarthritic | Human Osteoarthritic | | | disease | pSport1 | |
| | Cartilage Fraction IV | cartilage | | | | | |
| S0342 | Adipocytes: re- | Human Adipocytes | | | | Uni-ZAP XR | |
| | excision | from Osteoclastoma | | | | | |
| S0344 | Macrophage-oxLDL: | macrophage-oxidized | blood | Cell Line | | Uni-ZAP XR | |
| | re-excision | LDL treated | | | | | |
| S0346 | Human Amygdala; re- | Amydgala | | | | Uni-ZAP XR | |
| | excision | | | | | | |
| S0348 | Cheek Carcinoma | Cheek Carcinoma | | | disease | pSport1 | |
| S0350 | Pharynx Carcinoma | Pharynx Carcinoma | Hypo- | | disease | pSport1 | |
| S0352 | Larynx Carcinoma | Larynx Carcinoma | pharynz | | disease | pSport1 | |
| S0354 | Colon Normal II | Colon Normal | Colon | | | pSport1 | |
| S0356 | Colon Carcinoma | Colon Carcinoma | Colon | | disease | pSport1 | |
| S0358 | Colon Normal III | Colon Normal | Colon | | | pSport1 | |
| S0360 | Colon Tumor II | Colon Tumor | Colon | | disease | pSport1 | |
| S0362 | Human Gastrocnemius | Gastrocnemius muscle | | | | pSport1 | |
| S0364 | Human Quadriceps | Quadriceps muscle | | | | pSport1 | |
| S0366 | Human Soleus | Soleus Muscle | | | pSport1 | | |
| S0368 | Human Pancreatic | Islets of Langerhans | | | | pSport1 | |
| | Langerhans | | | | | | |
| S0370 | Larynx carcinoma II | Larynx carcinoma | | | disease | pSport1 | |
| S0374 | Normal colon | Normal colon | | | | pSport1 | |
| S0376 | Colon Tumor | Colon Tumor | | | disease | pSport1 | |
| S0378 | Pancreas normal PCA4 | Pancreas normal PCA4 | | | | pSport1 | |
| | No | No | | | | | |
| S0380 | Pancreas Tumor PCA4 | Pancreas Tumor PCA4 | | | disease | pSport1 | |
| | Tu | Tu | | | | | |
| S0384 | Tongue carcinoma | Tongue carcinoma | | | disease | pSport1 | |
| S0386 | Human Whole Brian, | Whole Brain | Brain | | | ZAP Express | |
| | re-excission | | | | | | |
| S03088 | Human Hypothalamus, | Human Hypothalamus, | | | disease | Uni-ZAP XR | |
| | schizphrenia, re- | Schizophrenia | | | | | |
| | excision | | | | | | |
| S0390 | Smooth muscle, | Smooth muscle | Pulmanary | Cell Line | | Uni-ZAP XR | |
| | control; re-excision | | artery | | | | |
| S0392 | Salivary Gland | Salivary gland; | | | | pSport1 | |
| | | normal | | | | | |
| S0400 | Brain; normal | Brain; normal | | | | pSport1 | |
| S0404 | Rectum normal | Rectum, normal | | | | pSport1 | |
| S0406 | Rectum tumour | Rectum tumour | | | | pSport1 | |
| S0408 | Colon, normal | Colon, normal | | | | psport1 | |
| S0412 | Temporal cortex- | Temporal cortex, | | | disease | Other | |
| | Alzheizmer; subtracted | alzheimer | | | | | |
| S0414 | Hippocampus, | Hippocampus, | | | | Other | |
| | Alzheimer subtracted | Alzheimer subtracted | | | | | |
| S0418 | CHME Cell Line; | CHME Cell Line; | | | | pCMVSport 3.0 | |
| | treated 5 hrs | treated | | | | | |
| S0420 | CHME Cell Line; | CHME Cell Line; | | | | pSport1 | |
| | untreated | untreated | | | | | |
| S0422 | Mo7e Cell Line | Mo7e Cell Line | | | | pCMVSport 3.0 | |
| | GM-CSF treated | GM-CSF treated | | | | | |
| | (1 ng/ml) | (1 ng/ml) | | | | | |
| S0424 | TF-1 Cell Line | TF-1 Cell Line | | | | pSport1 | |
| | GM-CSF Treated | GM-CSF Treated | | | | | |
| S0426 | Monocyte activated; | Monocyte activated | blood | Cell Line | | Uni-ZAP XR | |
| | re-excision | | | | | | |
| S0428 | Neutrophils control; | human neutrophils | blood | Cell Line | | Uni-ZAP XR | |
| | re-excision | | | | | | |
| S0430 | Aryepiglottis Normal | Aryepiglottis Normal | | | | pSport1 | |
| S0432 | Sinus piniformis | Sinus piniformis | | | | pSport1 | |
| | Tumour | Tumour | | | | | |
| S0434 | Stomach Normal | Stomach Normal | | | disease | pSport1 | |
| S0436 | Stomach Tumour | Stomach Tumour | | | disease | pSport1 | |
| S0440 | Liver Tumour Met 5 | Liver Tumour | | | | pSport1 | |
| | Tu | | | | | | |
| S0442 | Colon Normal | Colon Normal | | | disease | pSport1 | |
| S0446 | Tongue Tumour | Tongue Tumour | | | | pSport1 | |
| S0448 | Larynx Normal | Larynx Normal | | | | pSport1 | |
| S0450 | Larynx Tumour | Larynx Tumour | | | | pSport1 | |
| S0452 | Thymus | Thymus | | | | pSport1 | |
| S0454 | Placenta | Placenta | Placenta | | | pSport1 | |
| S0456 | Tongue Normal | Tongue Normal | | | | pSport1 | |
| S0458 | Thyroid Normal | Thyroid Normal | | | | pSport1 | |
| | (SDCA2No) | | | | | | |
| S0462 | Thyroid Thyroiditus | Thyroid Thyroiditus | | | | pSport1 | |
| S0464 | Larynx Normal | Larynx Normal | | | | pSport1 | |
| S0466 | Larynx Tumor | Larynx Tumor | | | disease | pSport1 | |
| S0468 | Ea.hy.926 cell line | Ea.hy.926 cell line | | | | pSport1 | |
| S0470 | Andeocarcinoma | PYFD | | | disease | pSport1 | |
| S0472 | Lung Mesothelium | PYBT | | | | pSport1 | |
| S0474 | Human blood platelets | Platelets | Blood | | | Other | |
| | | | platelets | | | | |
| S0665 | Human Amygdala; re- | Amygdala | | | | Uni-ZAP XR | |
| | excission | | | | | | |
| S3012 | Smooth Muscle Serum | Smooth muscle | Pulmanary | Cell Line | | pBluescript | |
| | Treated, Norm | | artery | | | | |
| S3014 | Smooth muscle, serum | Smooth muscle | Pulmanary | Cell Line | | pBluescript | |
| | induced, re-exc | | artery | | | | |
| S6014 | H. hypothalamus, frac | Hypothalamus | Brain | | | ZAP Express | |
| | A | | | | | | |
| S6016 | H. Frontal Cortex, | H. Brain, Frontal | Brain | | disease | Uni-ZAP XR | |
| | Epileptic | Cortex, Epileptic | | | | | |
| S6022 | H. Adipose Tissue | Human Adipose | | | | Uni-ZAP XR | |
| | | Tissue | | | | | |
| S6024 | Alzheimers, spongy | Alzheimer″s/Spongy | Brain | | disease | Uni-ZAP XR | |
| | change | change | | | | | |
| S6026 | Frontal Lobe, | Frontal Lobe | Brain | | | Uni-ZAP XR | |
| | Dementia | dementia/Alzheimer″s | | | | | |
| S6028 | Human Manic | Human Manic | Brain | | disease | Uni-ZAP XR | |
| | Depression Tissue | depression tissue | | | | | |
| T0002 | Activated T-cells | Activated T-Cells, | Blood | Cell Line | | pBluescript SK- | |
| | | PBL fraction | | | | | |
| T0003 | Human Fetal Lung | Human Fetal Lung | | | | pBluescript SK- | |
| T0004 | Human White Fat | Human White Fat | | | | pBluescript SK- | |
| T0006 | Human Pineal Gland | Human Pineal Gland | | | | pBluescript SK- | |
| T0008 | Colorectal Tumor | Colorectal Tumor | | | disease | pBluescript SK- | |
| T0010 | Human Infant Brain | Human Infant Brain | | | | Other | |
| T0023 | Human Pancreatic | Human Pancreatic | | | disease | pBluescript SK- | |
| | Carcinoma | Carcinoma | | | | | |
| T0039 | HSA 172 Cells | Human HSA172 cells | | | disease | pBluescript SK- | |
| | | line | | | | | |
| T0040 | HSC172 cells | SA172 Cells | | | | pBluescript SK- | |
| T0041 | Jurkat T-cell G1 phase | Jurkat T-cell | | | | pBluescript SK- | |
| T0042 | Jurkat T-Cell, S phase | Jurkat T-Cell Line | | | | pBluescript SK- | |
| T0048 | Human Aortic | Human Aortic | | | | pBluescript SK- | |
| | Endothelium | Endothelium | | | | | |
| T0049 | Aorta endothelial cells | Aorta endothelial cells | | | | pBluescript SK- | |
| | TNF-a | | | | | | |
| T0060 | Human white Adipose | Human White Fat | | | | pBluescript SK- | |
| T0067 | Human Thyroid | Human Thyroid | | | | pBluescript SK- | |
| T0086 | Normal Ovary, | Normal Ovary, | | | | pBluescript SK- | |
| | Premenopausal | Premenopausal | | | | | |
| T0069 | Human Uterus, normal | Human Uterus, normal | | | | pBluescript SK- | |
| T0071 | Human Bone Marrow | Human Bone Marrow | | | | pBluescript SK- | |
| T0074 | Human Adult Retina | Human Adult Retina | | | | pBluescript SK- | |
| T0079 | Human Kidney, | Human Kidney, | | | | pBluescript SK- | |
| | normal Adult | normal Adult | | | | | |
| T0082 | Human Adult Retina | Human Adult Retina | | | | pBluescript SK- | |
| T0103 | Human colon | | | | | pBluescript SK- | |
| | carcinoma (HCC) cell | | | | | | |
| | line | | | | | | |
| T0104 | HCC cell line | | | | | pBluescript SK- | |
| | metastisis to liver | | | | | | |
| T0109 | Human (HCC) cell | | | | | pBluescript SK- | |
| | line liver (mouse) | | | | | | |
| | metastasis, remake | | | | | | |
| T0110 | Human colon | | | | | pBluescript SK- | |
| | Carcinoma (HCC) cell | | | | | | |
| | line, remake | | | | | | |
| T0114 | Human (Caco-2) cell | | | | | pBluescript SK- | |
| | line adenocarcinoma, | | | | | | |
| | colon, remake | | | | | | |
| T0115 | Human Colon Carcinoma | | | | | pBluescript SK- | |
| | Carcinoma (HCC) cell | | | | | | |
| | line | | | | | | |
| L0002 | Atrium cDNA library | | | | | | |
| | Human heart | | | | | | |
| L0005 | Clontech human aorta | | | | | | |
| | poly A+ mRNA (# | | | | | | |
| | 6572) | | | | | | |
| L0010 | GeneTrack, 4p16.3 JM | | | | | | |
| | Rommens | | | | | | |
| L0021 | Human adult (K. Okubo) | | | | | | |
| L0022 | Human adult lung 3″ | | | | | | |
| | directed Mbol cDNA | | | | | | |
| L0034 | Human chromosome 14 | | | | | | |
| L0040 | Human colon mucosa | | | | | | |
| L0055 | Human promyelocyte | | | | | | |
| L0060 | Human thymus NSTH II | | | | | | |
| L0103 | DKFZphamy1 | amygdala | | | | | |
| L0105 | Human aorta polyA+ | aorta | | | | | |
| | (TFujiwara) | | | | | | |
| L0119 | human glioblasoma | brain | | | | | |
| | library | | | | | | |
| L0142 | Human plancenta | placenta | | | | | |
| | cDNA (TFujiwara) | | | | | | |
| L0143 | Human placenta | placenta | | | | | |
| | polyA+(TFujiwara) | | | | | | |
| L0157 | human fetal brain | | brain | | | | |
| | (TFujiwara) | | | | | | |
| L0163 | Human heart cDNA | | heart | | | | |
| | (YNakamura) | | | | | | |
| L0183 | Human HeLa cells | | | HeLa | | | |
| L0193 | Human osteosarcoma | osteosarcoma | | OsA-CL | | | |
| | EGarcia | | | | | | |
| L0194 | Human pancreatic | pancreatic cancer | | Patu | | | |
| | cancer cell line Patu | | | 8988t | | | |
| | 8988t | | | | | | |
| L0351 | Infant brain, Bento | | | | | BA, M13- | |
| | Soares | | | | | derived | |
| L0352 | Normalized infant | | | | | BA, M13- | |
| | Brain Bento Soares | | | | | derived | |
| L0356 | S. Human foetal | | | | | Bluescript | |
| | Adrenals tissue | | | | | | |
| L0361 | Stratagene ovary | | ovary | | | Bluescript SK- | |
| | (#937217) | | | | | | |
| L0362 | Stratagene ovarian | | | | | Bluescript SK- | |
| | cancer (#937219) | | | | | | |
| L0363 | NCI_CGAP_GC2 | germ cell tumor | | | | Bluescript SK- | |
| L0364 | NCI_CGAP_GC5 | germ cell tumor | | | | Bluescript SK- | |
| L0366 | Stratagene schizo brain | schizophrenic brain | | | | Bluescript SK- | |
| | S11 | S-11 frontal lobe | | | | | |
| L0367 | NCI_CGAP_Sch1 | Schwannoma tumor | | | | Bluescript SK- | |
| L0368 | NCI_CGAP_SS1 | synovial sarcoma | | | | Bluescript SK- | |
| L0369 | NCI_CGAP_AA1 | adrenal adenoma | adrenal gland | | | Bluescript SK- | |
| L0370 | Johnson frontal cortex | pooled frontal lobe | brain | | | Bluescript SK- | |
| L0371 | NCI_CGAP_Br3 | breast tumor | breast | | | Bluescript SK- | |
| L0372 | NCI_CGAP_Col2 | colon tumor | colon | | | Bluescript SK- | |
| L0373 | NCI_CGAP_Col1 | tumor | colon | | | Bluescript SK- | |
| L0374 | NCI_CGAP_Co2 | tumor | colon | | | Bluescript SK- | |
| L0375 | NCI_CGAP_Kid6 | Kidney tumor | kidney | | | Bluescript SK- | |
| L0376 | NCI_CGAP_Lar1 | larynx | larynax | | | Bluescript SK- | |
| L0378 | NCI_CGAP_Lu1 | lung tumor | lung | | | Bluescript SK- | |
| L0381 | NCI_CGAP_HN4 | squamous cell | pharynx | | | Bluescript SK- | |
| | | carcinoma | | | | | |
| L0382 | NCI_CGAP_Pr25 | epithelium (cell line) | prostate | | | Bluescript SK- | |
| L0383 | NCI_CGAP_Pr24 | invasive tumor (cell | prostate | | | Bluescript SK- | |
| | | line) | | | | | |
| L0384 | NCI_CGAP_Pr23 | prostate tumor | prostate | | | Bluescript SK- | |
| L0385 | NCI_CGAP_Gas1 | gastric tumor | stomach | | | Bluescript SK- | |
| L0387 | NCI_CGAP_GCB0 | germinal center B- | tonsil | | | Bluescript SK- | |
| | | cells | | | | | |
| L0388 | NCI_CGAP_HN6 | normal gingiva (cell | | | | Bluescript SK- | |
| | | line from immortalized | | | | | |
| | | keratinocyt | | | | | |
| L0389 | NCI_CGAP_HN5 | normal gingiva (cell | | | | Bluescript SK- | |
| | | line from primary | | | | | |
| | | keratinocyt | | | | | |
| L0394 | H. Human adult brain | | | | | gtl1 | |
| | Cortex tissue | | | | | | |
| L0411 | 1-NIB | | | | | Lfamid BA | |
| L0435 | Infant brain, LLNL | | | | | Lafmid BA | |
| | array of Dr. M. Soares | | | | | | |
| | 1NIB | | | | | | |
| L0438 | normalized infant brain | total brain | brain | | | lafmid BA | |
| | cDNA | | | | | | |
| L0439 | Soares infant brain 1NIB | | whole brain | | | Lafmid BA | |
| L0441 | 2HB3MK | | | | | Lafmid BK | |
| L0448 | 3HFLSK20 | | | | | Lafmid K | |
| L0455 | Human retina cDNA | retina | eye | | | lambda gt10 | |
| | randomly primed | | | | | | |
| | sublibrary | | | | | | |
| L0456 | Human retina cDNA | retina | eye | | | lambda gt10 | |
| | TSp509I-cleaved | | | | | | |
| | sublibrary | | | | | | |
| L0465 | TEST1, Human adult | | | | | lambda nm1149 | |
| | Testis tissue | | | | | | |
| L0471 | Human fetal heart, | | | | | Lambda ZAP | |
| | Lambda ZAP Express | | | | | Express | |
| L0475 | KG1-a Lambda Zap | KG1-a | | | | | Lambda Zap |
| | Express cDNA library | | | | | Express | |
| | | | | | | (Stratagene) | |
| L0477 | HPLA CCLee | placenta | | | | Lambda ZAP II | |
| L0480 | Stratagene cat#937212 | | | | | Lambda ZAP, | |
| | (1992) | | | | | pBluescript SK(-) | |
| L0481 | CD34 + DIRECTIONAL | | | | | Lambda ZAPII | |
| L0483 | Human pancreatic islet | | | | | Lambda ZAPII | |
| L0485 | STRATAGENE Human | skeletal muscle | leg muscle | | | Lambda ZAPII | |
| | skeletal muscle cDNA | | | | | | |
| | library, cat.#936215. | | | | | | |
| L0493 | NCI_CGAP_Ov26 | papilary serous | ovary | | | pAMP1 | |
| | | carcinoma | | | | | |
| L0497 | NCI_CGAP_HSC4 | CD34+, CD38− from | bone marrow | | | pAMP1 | |
| | | normal bone marrow | | | | | |
| | | donor | | | | | |
| L0498 | NCI_CGAP_HSC3 | CD34+, T negative, | bone marrow | | | pAMP1 | |
| | | patient with chronic | | | | | |
| | | myelogenou | | | | | |
| L0500 | NCI_CGAP_Brn20 | oligodendroglioma | brain | | | pAMP1 | |
| L0502 | NCI_CGAP_Br15 | adenocarcinoma | breast | | | pAMP1 | |
| L0508 | NCI_CGAP_Lu25 | bronchioalveolar | lung | | | pAMP1 | |
| | | carcinoma | | | | | |
| L0509 | NCI_CGAP_Lu26 | invasive | lung | | | pAMP1 | |
| | | adenocarcinoma | | | | | |
| L0514 | NCI_CGAP_Ov31 | papilary serous | ovary | | | pAMP1 | |
| | | carcinoma | | | | | |
| L0515 | NCI_CGAP_Ov32 | papillary serous | ovary | | | pAMP1 | |
| L0517 | NCI_CGAP_Pr1 | | | | | pAMP10 | |
| L0518 | NCI_CGAP_Pr2 | | | | | pAMP10 | |
| L0519 | NCI_CGAP_Pr3 | | | | | pAMP10 | |
| L0520 | NCI_CGAP_Alv1 | alveolar | | | | pAMP10 | |
| | | rhabdomyosarcoma | | | | | |
| L0521 | NCI_CGAP_Ew1 | Ewing″s sarcoma | | | | pAMP10 | |
| L0523 | NCI_CGAP_Lip2 | liposarcoma | | | | pAMP10 | |
| L0525 | NCI_CGAP_Li2 | liver | | | | pAMP10 | |
| L0526 | NCI_CGAP_Pr12 | metastatic prostate | | | | pAMP10 | |
| | | bone lesion | | | | | |
| L0527 | NCI_CGAP_Ov2 | ovary | | | | pAMP10 | |
| L0528 | NCI_CGAP_Pr5 | prostate | | | | pAMP10 | |
| L0529 | NCI_CGAP_Pr6 | prostate | | | | pAMP10 | |
| L0530 | NCI_CGAP_Pr8 | prostate | | | | pAMP10 | |
| L0532 | NCI_CGAP_Thy1 | thyroid | | | | pAMP10 | |
| L0533 | NCI_CGAP_HSC1 | stem cell | bone marrow | | | pAMP10 | |
| L0536 | NCI_CGAP_Br4 | normal ductal tissue | breast | | | pAMP10 | |
| L0540 | NCI_CGAP_Pr10 | invasive prostate | prostate | | | pAMP10 | |
| L0541 | NCI_CGAP_Pr7 | low-grade prostatic | prostate | | | pAMP10 | |
| | | neoplasia | | | | | |
| L0542 | NCI_CGAP_Pr11 | normal prostatic | prostate | | | pAMP10 | |
| | | epithelial cells | | | | | |
| L0543 | NCI_CGAP_Pr9 | normal prostatic | prostate | | | pAMP10 | |
| | | epithelial cells | | | | | |
| L0544 | NCI_CGAP_Pr4 | prostatic | prostate | | | pAMP10 | |
| | | intraepithelial | | | | | |
| | | neoplasia-high | | | | | |
| | | grade | | | | | |
| L0545 | NCI_CGAP_Pr4.1 | prostatic | prostate | | | pAMP10 | |
| | | intraepithelial | | | | | |
| | | neoplasia-high | | | | | |
| | | grade | | | | | |
| L0546 | NCI_CGAP_Pr18 | stroma | prostate | | | pAMP10 | |
| L0547 | NCI_CGAP_Pr16 | tumor | prostate | | | pAMP10 | |
| L0549 | NCI_CGAP_HN10 | carcinoma in situ | | | | pAMP10 | |
| | | from retromolar | | | | | |
| | | trigone | | | | | |
| L0557 | NCI_CGAP_Lu21 | small cell carcinoma | lung | | | pAMP10 | |
| L0558 | NCI_CGAP_Ov40 | endometrioid | ovary | | | pAMP10 | |
| | | ovarian metastasis | | | | | |
| L0561 | NCI_CGAP_HN11 | normal squamous | tongue | | | pAMP10 | |
| | | epithelium | | | | | |
| L0563 | Human Bone Marrow | bone marrow | | | | pBluescript | |
| | Stromal Fibroblast | | | | | | |
| L0564 | Jia bone marrow | bone marrow stroma | | | | pBluescript | |
| | stroma | | | | | | |
| L0565 | Normal Human | Bone | Hip | | | pBluescript | |
| | Trabecular Bone Cell | | | | | | |
| L0579 | Human fetal brain | cerebrum and | | | | pBluescript SK | |
| | QBoqin2 | cerebellum | | | | | |
| L0581 | Stratagene liver | | liver | | | pBluescript SK | |
| | (#937224) | | | | | | |
| L0584 | Stratagene cDNA | | | | | pBluescript | |
| | library Human heart, | | | | | SK(+) | |
| | cat#936208 | | | | | | |
| L0586 | HTCDL1 | | | | | pBluescript | |
| | | | | | | SK(−) | |
| L0587 | Stratagene colon HT29 | | | | | pBluescript SK- | |
| | (#937221) | | | | | | |
| L0588 | Stratagene endothelial cell | | | | | pBluescript SK- | |
| | 937223 | | | | | | |
| L0589 | Stratagene fetal retina | | | | | pBluescript SK- | |
| | 937202 | | | | | | |
| L0590 | Stratagene fibroblast | | | | | pBluescript SK- | |
| | 937216 | | | | | | |
| L0591 | Stratagene HeLa cell | | | | | pBluescript SK- | |
| | s3 937216 | | | | | | |
| L0592 | Stratagene hNT neuron | | | | | pBluescript SK- | |
| | (#937233) | | | | | | |
| L0593 | Stratagene | | | | | pBluescript SK- | |
| | neuroepithelium | | | | | | |
| | (#937231) | | | | | | |
| L0594 | stratagene | | | | | pBluescript SK- | |
| | neuroepithelium | | | | | | |
| | NT2RAMI 937234 | | | | | | |
| L0595 | Stratagene NT2 | neuroepithelial cells | brain | | | pBluescript SK- | |
| | neuronal precursor | | | | | | |
| | 937230 | | | | | | |
| L0596 | Stratagene colon | | colon | | | pBluescript SK- | |
| | (#937204) | | | | | | |
| L0597 | Stratagene corneal | | cornea | | | pBluescript SK- | |
| | (#937222) | | | | | | |
| L0598 | Morton Fetal Cochlea | cochlea | ear | | | pBluescript SK- | |
| L0599 | Stratagene lung | | lung | | | pBluescript SK- | |
| | (#937210) | | | | | | |
| L0600 | Weizmann Olfactory | olfactory epithelium | nose | | | pBluescript SK- | |
| | Epthelium | | | | | | |
| L0601 | Stratagene pancreas | | pancreas | | | pBluescript SK- | |
| | (#937208) | | | | | | |
| L0602 | Pancreatic Islet | pancreatic islet | pancreas | | | pBluescript SK- | |
| L0603 | Stratagene placenta | | placenta | | | pBluescript SK- | |
| | (#937225) | | | | | | |
| L0604 | Stratagene muscle | muscle | skeletal | | | pBluescript SK- | |
| | 937209 | | muscle | | | | |
| L0605 | Stratagene fetal spleen | fetal spleen | spleen | | | pBluescript SK- | |
| | (#937205) | | | | | | |
| L0606 | NCI_CGAP_Lym5 | follicular lymphoma | lymph node | | | pBluescript SK- | |
| L0607 | NCI_CGAP_Lym6 | mantle cell | lymph node | | | pBluescript SK- | |
| | | lymphoma | | | | | |
| L608 | Stratagene lung | lung carcinoma | lung | NCI-H69 | | pBluescript SK- | |
| | carcinoma 937218 | | | | | | |
| L0611 | Schiller meningioma | meningioma | brain | | | pBluescript SK- | |
| | | | | | | (Stratagene) | |
| L0615 | 22 week old human | | | | | pBluescriptII | |
| | fetal liver cDNA | | | | | SK(−) | |
| | library | | | | | | |
| L0617 | Chromosome 22 exon | | | | | pBluescriptII | |
| | | | | | | KS+ | |
| L0618 | Chromosome 9 exon | | | | | pBluescriptII | |
| | | | | | | KS+ | |
| L0619 | Chromosome 9 exon | | | | | pBluescriptII | |
| | | | | | | KS+ | |
| L0622 | HM1 | | | | | pcDNAII | |
| | | | | | | (Invitrogen) | |
| L0623 | HM3 | pectoral muscle | | | | pcDNAII | |
| | | (after mastectomy) | | | | (Invitrogen) | |
| L0625 | NCI_CGAP_AR1 | bulk alveolar tumor | | | | pCMV-SPORT2 | |
| L0626 | NCI_CGAP_GC1 | bulk germ cell | | | | pCMV-SPORT2 | |
| | | seminoma | | | | | |
| L0628 | NCI_CGAP_Ov1 | ovary bulk tumor | ovary | | | pCMV-SPORT2 | |
| L0629 | NCI_CGAP_Mel3 | metastatic melanoma | bowel (skin | | | pCMV-SPORT4 | |
| | | to bowel | primary) | | | | |
| L0630 | NCI_CGAP_CNS1 | substantia nigra | brain | | | pCMV-SPORT4 | |
| L0631 | NCI_CGAP_Br7 | | breast | | | pCMV-SPORT4 | |
| L0632 | NCI_CGAP_Li5 | hepatic adenoma | liver | | | pCMV-SPORT4 | |
| L0634 | NCI_CGAP_0v8 | serous | ovary | | | pCMV-SPORT4 | |
| | | adenocarcinoma | | | | | |
| L0635 | NCI_CGAP_PNS1 | dorsal root ganglion | peripheral | | | pCMV-SPORT4 | |
| | | | nervous | | | | |
| | | | system | | | | |
| L0636 | NCI_CGAP_Pit1 | four pooled pituitary | brain | | | pCMV-SPORT6 | |
| | | adenomas | | | | | |
| L0637 | NCI_CGAP_Brn53 | three pooled | brain | | | pCMV-SPORT6 | |
| | | meningiomas | | | | | |
| L0638 | NCI_CGAP_Brn35 | tumor, 5 pooled (see | brain | | | pCMV-SPORT6 | |
| | | description) | | | | | |
| L0639 | NCI_CGAP_Bm52 | tumor, 5 pooled (see | brain | | | pCMV-SPORT6 | |
| | | description) | | | | | |
| L0640 | NCI_CGAP_Br18 | four pooled high- | breast | | | pCMV-SPORT6 | |
| | | grade tumors, | | | | | |
| | | including two prima | | | | | |
| L0641 | NCI_CGAP_Co17 | juvenile granulosa | colon | | | pCMV-SPORT6 | |
| | | tumor | | | | | |
| L0642 | NCI_CGAP_Co18 | moderately | colon | | | pCMV-SPORT6 | |
| | | differentiated | | | | | |
| | | adenocarcinoma | | | | | |
| L0643 | NCI_CGAP_Co19 | moderately | colon | | | pCMV-SPORT6 | |
| | | differentiated | | | | | |
| | | adenocarcinoma | | | | | |
| L0644 | NCI_CGAP_Co20 | moderately | colon | | | pCMV-SPORT6 | |
| | | differentiated | | | | | |
| | | adenocarcinoma | | | | | |
| L0645 | NCI_CGAP_Co21 | moderately | colon | | | pCMV-SPORT6 | |
| | | differentiated | | | | | |
| | | adenocarcinoma | | | | | |
| L0646 | NCI_CGAP_Co14 | moderately- | colon | | | pCMV-SPORT6 | |
| | | differentiated | | | | | |
| | | adenocarcinoma | | | | | |
| L0647 | NCI_CGAP_Sar4 | five pooled | connective | | | pCMV-SPORT6 | |
| | | sarcomas, including | tissue | | | | |
| | | myxoid liposarcoma | | | | | |
| L0648 | NCI_CGAP_Eso2 | squamous cell | esophagus | | | pCMV-SPORT6 | |
| | | carcinoma | | | | | |
| L0649 | NCI_CGAP_GU1 | 2 pooled high-grade | genitouinary | | | pCMV-SPORT6 | |
| | | transitional cell | tract | | | | |
| | | tumors | | | | | |
| L0650 | NCI_CGAP_Kid13 | 2 pooled Wilms″ | kidney | | | pCMV-SPORT6 | |
| | | tumors, one primary | | | | | |
| | | and one metast | | | | | |
| L0651 | NCI_CGAP_Kid8 | renal cell tumor | kidney | | | pCMV-SPORT6 | |
| L0652 | NCI_CGAP_Lu27 | four pooled poorly- | lung | | | pCMV-SPORT6 | |
| | | differentiated | | | | | |
| | | adenocarcinomas | | | | | |
| L0653 | NCI_CGAP_Lu28 | two pooled | lung | | | pCMV-SPORT6 | |
| | | squamous cell | | | | | |
| | | carcinomas | | | | | |
| L0654 | NCI_CGAP_Lu31 | | lung cell line | | | pCMV-SPORT6 | |
| L0655 | NCI_CGAP_Lym12 | lymphoma, | lymph node | | | pCMV-SPORT6 | |
| | | follicular mixed | | | | | |
| | | small and large cell | | | | | |
| L0656 | NCLCGAP_Ov38 | normal epithelium | ovary | | | pCMV-SPORT6 | |
| L0657 | NCI_CGAP_Ov23 | tumor, 5 pooled (see ovary | | | | pCMV-SPORT6 | |
| | | description) | | | | | |
| L0658 | NCI_CGAPO_v35 | tumor, 5 pooled (see | ovary | | | pCMV-SPORT6 | |
| | | description) | | | | | |
| L0659 | NCI_CGAP_Pan1 | adenocarcinoma | pancreas | | | pCMV-SPORT6 | |
| L0661 | NCI_CGAP_Mel15 | malignant | skin | | | pCMV-SPORT6 | |
| | | melanoma, | | | | | |
| | | metastatic to lymph | | | | | |
| | | node | | | | | |
| L0662 | NCI_CGAP_Gas4 | poorly differentiated | stomach | | | pCMV-SPORT6 | |
| | | adenocarcinoma | | | | | |
| | | with signet r | | | | | |
| L0663 | NCI_CGAP_Ut2 | moderately- | uterus | | | pCMV-SPORT6 | |
| | | differentiated | | | | | |
| | | endometrial | | | | | |
| | | adenocarcino | | | | | |
| L0664 | NCI_CGAP_Ut3 | poorly-differentiated | uterus | | | pCMV-SPORT6 | |
| | | endometnal | | | | | |
| | | adenocarcinoma, | | | | | |
| L0665 | NCI_CGAP_Ut4 | serous papillary | uterus | | | pCMV-SPORT6 | |
| | | carcinoma, high | | | | | |
| | | grade, 2 pooled t | | | | | |
| L0666 | NCI_CGAP_Ut1 | well-differentiated | uterus | | | pCMV-SPORT6 | |
| | | endometrial | | | | | |
| | | adenocarcinoma, 7 | | | | | |
| L0667 | NCI_CGAP_CML1 | myeloid cells, 18 | whole blood | | | pCMV-SPORT6 | |
| | | pooled CML cases, | | | | | |
| | | BCR/ABL rearra | | | | | |
| L0684 | Stanley Frontal SB | frontal lobe (see | brain | | | pCR2.1-TOPO | |
| | pool 1 | description) | | | | (Invitrogen) | |
| L0686 | Stanley Frontal SN | frontal lobe (see | brain | | | pCR2.1-TOPO | |
| | pool 2 | descnption) | | | | (Invitrogen) | |
| L0697 | Testis 1 | | | | | PGEM 5zf(+) | |
| L0698 | Testis 2 | | | | | PGEM 5zf(+) | |
| L0717 | Gessler Wilms tumor | | | | | pSPORT1 | |
| L0731 | Soares_pregnant_ | | uterus | | | pT7T3-Pac | |
| | uterus_NbHPU | | | | | | |
| L0738 | Human colorectal cancer | | | | | pT7T3D | |
| L0740 | Soares melanocyte | melanocyte | | | | pT7T3D | |
| | 2NbHM | | | | | (Pharmacia) | |
| | | | | | | with a modified | |
| | | | | | | polylinker | |
| L0741 | Soares adult brain | | brain | | | pT7T3D | |
| | N2b4HB55Y | | | | | (Phannacia) | |
| | | | | | | with a modified | |
| | | | | | | polylinker | |
| L0742 | Soares adult brain | | brain | | | pT7T3D | |
| | N2b5HB55Y | | | | | (Pharmacia) | |
| | | | | | | with a modified | |
| | | | | | | polylinker | |
| L0743 | Soares breast 2NbHBst | | breast | | | pT7T3D | |
| | | | | | | (Pharmacia) | |
| | | | | | | with a modified | |
| | | | | | | polylinker | |
| L0744 | Soares breast 3NbHBst | | breast | | | pT7T3D | |
| | | | | | | (Pharmacia) | |
| | | | | | | with a modified | |
| | | | | | | polylinker | |
| L0745 | Soares retina N2b4HR | retina | eye | | | pT7T3D | |
| | | | | | | (Phannacia) | |
| | | | | | | with a modified | |
| | | | | | | polylinker | |
| L0746 | Soares retina N2b5HR | retina | eye | | | pT7T3D | |
| | | | | | | (Pharmacia) | |
| | | | | | | with a modified | |
| | | | | | | polylinker | |
| L0747 | Soares_fetal_heart_NbHH | | heart | | | pT7T3D | |
| | 19W | | | | | (Pharmacia) | |
| | | | | | | with a modified | |
| | | | | | | polylinker | |
| L0748 | Soares fetal liver | | Liver and | | | pT7T3D | |
| | spleen INFLS | | Spleen | | | (Pharmacia) | |
| | | | | | | with a modified | |
| | | | | | | polylinker | |
| L0749 | Soares_fetal_liver_spleen | | Liver and | | | pT7T3D | |
| | _1NFLS_S1 | | Spleen | | | (Pharmacia) | |
| | | | | | | with a modified | |
| | | | | | | polylinker | |
| L0750 | Soares_fetal_lung_NbHL1 | | lung | | | pT7T3D | |
| | 9W | | | | | (Pharmacia) | |
| | | | | | | with a modified | |
| | | | | | | polylinker | |
| L0751 | Soares ovary tumor | ovarian tumor | ovary | | | pT7T3D | |
| | NbHOT | | | | | (Pharmacia) | |
| | | | | | | with a modified | |
| | | | | | | polylinker | |
| L0752 | Soares_parathyroid_tumor | parathyroid tumor | parathyroid | | | pT7T3D | |
| | _NbHPA | | gland | | | (Pharmacia) | |
| | | | | | | with a modified | |
| | | | | | | polylinker | |
| L0753 | Soares_pineal_gland_N3H | | pineal gland | | | pT7T3D | |
| | PG | | | | | (Pharmacia) | |
| | | | | | | with a modified | |
| | | | | | | polylinker | |
| L0754 | Soares placenta Nb2HP | | placenta | | | pT7T3D | |
| | | | | | | (Pharmacia) | |
| | | | | | | with a modified | |
| | | | | | | polylinker | |
| L0755 | Soare_placenta_8to9wee | | placenta | | | pT7T3D | |
| | ks_2NbHP8to9W | | | | | (Pharmacia) | |
| | | | | | | with a modified | |
| | | | | | | polylinker | |
| L0756 | Soares_multiple_sclerosis | multiple sclerosis | | | | pT7T3D | |
| | _2NbHMSP | lesions | | | | (Pharmacia) | |
| | | | | | | with a modified | |
| | | | | | | polylinker | |
| | | | | | | V_TYPE | |
| L0757 | Soares_senescent_fibrobla | senescent fibroblast | | | | pT7T3D | |
| | sts_NbHSF | | | | | (Pharmacia) | |
| | | | | | | with a modified | |
| | | | | | | polylinker | |
| | | | | | | V_TYPE | |
| L0758 | Soares_testis_NHT | | | | | pT7T3D-Pac | |
| | | | | | | (Pharrnacia) | |
| | | | | | | with a modified | |
| | | | | | | polylinker | |
| L0759 | Soares_total_fetus_Nb2H | | | | | pT7T3D-Pac | |
| | F8_9w | | | | | (Pharmacia) | |
| | | | | | | with a modified | |
| | | | | | | polylinker | |
| L0760 | Barstead aorta | aorta | | | | pT7T3D-Pac | |
| | HPLRB3 | | | | | (Pharmacia) | |
| | | | | | | with a modified | |
| | | | | | | polylinker | |
| L0761 | NCI_CGAP_CLL1 | B-cell, chronic | | | | pT7T3D-Pac | |
| | | lymphotic leukemia | | | | (Pharmacia) | |
| | | | | | | with a modified | |
| | | | | | | polylinker | |
| L0762 | NCI_CGAP_Brl.1 | breast | | | | pT7T3D-Pac | |
| | | | | | | (Pharmacia) | |
| | | | | | | with a modified | |
| | | | | | | polylinker | |
| L0763 | NCI_CGAP_Br2 | breast | | | | pT7T3D-Pac | |
| | | | | | | (Pharmacia) | |
| | | | | | | with a modified | |
| | | | | | | polylinker | |
| L0764 | NCI_CGAP_Co3 | colon | | | | pT7T3D-Pac | |
| | | | | | | (Pharmacia) | |
| | | | | | | with a modified | |
| | | | | | | polylinker | |
| L0765 | NCI_CGAP_Co4 | colon | | | | pT7T3D-Pac | |
| | | | | | | (Pharmacia) | |
| | | | | | | with a modified | |
| | | | | | | polylinker | |
| L0766 | NCI_CGAP_GCB1 | germinal center B | | | | pT7T3D-Pac | |
| | | cell | | | | (Pharmacia) | |
| | | | | | | with a modified | |
| | | | | | | polylinker | |
| L0767 | NCI_CGAP_GC3 | pooled germ cell | | | | pT7T3D-Pac | |
| | | tumors | | | | (Pharmacia) | |
| | | | | | | with a modified | |
| | | | | | | polylinker | |
| L0768 | NCI_CGAP_GC4 | pooled germ cell | | | | pT7T3D-Pac | |
| | | tumors | | | | (Pharmacia) | |
| | | | | | | with a modified | |
| | | | | | | polylinker | |
| L0769 | NCI_CGAP_Brn25 | anaplasuc | brain | | | pT7T3D-Pac | |
| | | oligodendroglioma | | | | (Pharmacia) | |
| | | | | | | with a modified | |
| | | | | | | polylinker | |
| L0770 | NCI_CGAP_Brn23 | glioblastoma | brain | | | pT7T3D-Pac | |
| | | (pooled) | | | | (Pharmacia) | |
| | | | | | | with a modified | |
| | | | | | | polylinker | |
| L0771 | NCI_CGAP_Co8 | adenocarcinoma | colon | | | pT7T3D-Pac | |
| | | | | | | (Pharmacia) | |
| | | | | | | with a modified | |
| | | | | | | polylinker | |
| L0772 | NCI_CGAP_Co10 | colon tumor RER+ | colon | | | pT7T3D-Pac | |
| | | | | | | (Pharmacia) | |
| | | | | | | with a modified | |
| | | | | | | polyhnker | |
| L0773 | NCI_CGAP_Co9 | colon tumor RER+ | colon | | | pT7T3D-Pac | |
| | | | | | | (Pharmacia) | |
| | | | | | | with a modified | |
| | | | | | | polylinker | |
| L0774 | NCI_CGAP_Kid3 | | kidney | | | pT7T3D-Pac | |
| | | | | | | (Pharmacia) | |
| | | | | | | with a modified | |
| | | | | | | polylinker | |
| L0775 | NCI_CGAP_Kid5 | 2 pooled tumors | kidney | | | pT7T3D-Pac | |
| | | (clear cell type) | | | | (Pharmacia) | |
| | | | | | | with a modified | |
| | | | | | | polylinker | |
| L0776 | NCI_CGAP_Lu5 | carcinoid | lung | | | pT7T3D-Pac | |
| | | | | | | (Pharmacia) | |
| | | | | | | with a modified | |
| | | | | | | polylinker | |
| L0777 | Soares_NhHMPu_S1 | Pooled human | mixed (see | | | pT7T3D-Pac | |
| | | melanocyte, fetal | below) | | | (Pharmacia) | |
| | | heart, and pregnant | with a modified | | | | |
| | | | | | | polylinker | |
| L0779 | Soares_NFL_T_ | | pooled | | | pT7T3D-Pac | |
| | GBC_S1 | | | | | (Pharmacia) | |
| | | | | | | with a modified | |
| | | | | | | polylinker | |
| L0780 | Soares_NSF_F8_ | | pooled | | | pT7T3D-Pac | |
| | 9W_OT_PA_P_S1 | | | | | (Pharmacia) | |
| | | | | | | with a modified | |
| | | | | | | polylinker | |
| L0782 | NCI_CGAP_Pr21 | normal prostate | prostate | | | pT7T3D-Pac | |
| | | | | | | (Pharmacia) | |
| | | | | | | with a modified | |
| | | | | | | polylinker | |
| L0783 | NCI_CGAP_Pr22 | normal prostate | prostate | | | pT7T3D-Pac | |
| | | | | | | (Pharmacia) | |
| | | | | | | with a modified | |
| | | | | | | polylinker | |
| L0784 | NCI_CGAP_Lei2 | leiomyosarcoma | soft tissue | | | pT7T3D-Pac | |
| | | | | | | (Pharmacia) | |
| | | | | | | with a modified | |
| | | | | | | polylinker | |
| L0785 | Barstead spleen HPLRB2 | | spleen | | | pT7T3D-Pac | |
| | | | | | | (Pharmacia) | |
| | | | | | | with a modified | |
| | | | | | | polylinker | |
| L0786 | Soares_NbHFB | | whole brain | | | pT7T3D-Pac | |
| | | | | | | (Pharmacia) | |
| | | | | | | with a modified | |
| | | | | | | polylinker | |
| L0787 | NCI_CGAP_Sub1 | | | | | pT7T3D-Pac | |
| | | | | | | (Pharmacia) | |
| | | | | | | with a modified | |
| | | | | | | polylinker | |
| L0788 | NCI_CGAP_Sub2 | | | | | pT7T3D-Pac | |
| | | | | | | (Pharmacia) | |
| | | | | | | with a modified | |
| | | | | | | polylinker | |
| L0789 | NCI_CGAP_Sub3 | | | | | pT7T3D-Pac | |
| | | | | | | (Pharmacia) | |
| | | | | | | with a modified | |
| | | | | | | polylinker | |
| L0790 | NCI_CGAP_Sub4 | | | | | pT7T3D-Pac | |
| | | | | | | (Pharmacia) | |
| | | | | | | with a modified | |
| | | | | | | polylinker | |
| L0791 | NCI_CGAP_Sub5 | | | | | pT7T3D-Pac | |
| | | | | | | (Pharmacia) | |
| | | | | | | with a modified | |
| | | | | | | polylinker | |
| L0792 | NCI_CGAP_Sub6 | | | | | pT7T3D-Pac | |
| | | | | | | (Pharmacia) | |
| | | | | | | with a modified | |
| | | | | | | polylinker | |
| L0794 | NCI_CGAP_GC6 | pooled germ cell | | | | pT7T3D-Pac | |
| | | tumors | | | | (Pharmacia) | |
| | | | | | | with a modified | |
| | | | | | | polylinker | |
| L0796 | NCI_CGAP_Brn50 | medulloblastoma | brain | | | pT7T3D-Pac | |
| | | | | | | (Pharmacia) | |
| | | | | | | with a modified | |
| | | | | | | polylinker | |
| L0800 | NCI_CGAP_Co16 | colon tumor, RER+ | colon | | | pT7T3D-Pac | |
| | | | | | | (Pharmacia) | |
| | | | | | | with a modified | |
| | | | | | | polylinker | |
| L0803 | NCI_CGAP_Kid11 | kidney | | | | pT7T3D-Pac | |
| | | | | | | (Pharmacia) | |
| | | | | | | with a modified | |
| | | | | | | polylinker | |
| L0804 | NCI_CGAP_Kid12 | 2 pooled tumors | kidney | | | pT7T3D-Pac | |
| | | (clear cell type) | | | | (Pharmacia) | |
| | | | | | | with a modified | |
| | | | | | | polylinker | |
| L0805 | NCI_CGAP_Lu24 | carcinoid | lung | | | pT7T3D-Pac | |
| | | | | | | (Pharmacia) | |
| | | | | | | with a modified | |
| | | | | | | polylinker | |
| L0806 | NCI_CGAP_Lu19 | squamous cell | lung | | | pT7T3D-Pac | |
| | | carcinoma, poorly | | | | (Pharmacia) | |
| | | differentiated (4 | | | | with a modified | |
| | | | | | | polylinker | |
| L0807 | NCI_CGAP_0v18 | fibrotheoma | ovary | | | pT7T3D-Pac | |
| | | | | | | (Pharmacia) | |
| | | | | | | with a modified | |
| | | | | | | polylinker | |
| L0808 | Barstead prostate BPH | | prostate | | | pT7T3D-Pac | |
| | HPLRB4 1 | | | | | (Pharmacia) | |
| | | | | | | with a modified | |
| | | | | | | polylinker | |
| L0809 | NCI_CGAP_Pr28 | prostate | | | | pT7T3D-Pac | |
| | | | | | | (Pharmacia) | |
| | | | | | | with a modified | |
| | | | | | | polylinker | |
| L2250 | Human cerebral cortex | cerebral cortex | | | | | |
| L2251 | Human fetal lung | Fetal lung | | | | | |

[0109] TABLE 5

| OMIM | |
|---|---|
| Reference | Description |
| 103050 | Autism, succinylpurinemic |
| 103050 | Adenylosuccinase deficiency |
| 104770 | Amyloidosis, secondary, susceptibility to |
| 106180 | Myocardial infarction, susceptibility to |
| 107670 | Apolipoprotein A-II deficiency |
| 108725 | Atherosclerosis, susceptibility to |
| 109690 | Asthma, nocturnal, susceptibility to |
| 109690 | Obesity, susceptibility to |
| 110700 | Vivax malaria, susceptibility to |
| 114290 | Campomelic dysplasia with autosomal sex reversal |
| 115660 | Cataract, cerulean, type 1 |
| 116860 | Cavernous angiomatous malformations |
| 120700 | C3 deficiency |
| 121050 | Contractural arachnodactyly, congenital |
| 123101 | Craniosynostosis, type 2 |
| 124030 | Parkinsonism, susceptibility to |
| 124030 | Debrisoquine sensitivity |
| 126150 | Diphtheria, susceptibility to |
| 126337 | Myxoid liposarcoma |
| 126650 | Chloride diarrhea, congenital, Finnish type, 214700 |
| 126650 | Colon cancer |
| 129900 | EEC syndrome-1 |
| 133170 | Erythremia |
| 133171 | [Erythrocytosis, familial], 133100 |
| 135940 | Ichthyosis vulgaris, 146700 |
| 136836 | Fucosyltransferase-6 deficiency |
| 138033 | Diabetes mellitus, type II |
| 138700 | [Apolipoprotein H deficiency] |
| 138981 | Pulmonary alveolar proteinosis, 265120 |
| 139190 | Gigantism due to GHRF hypersecretion |
| 139190 | Isolated growth hormone deficiency due to defect in GHRF |
| 139250 | Isolated growth hormone deficiency, Illig type with absent GH |
| | and Kowarski type with bioinactive GH |
| 141750 | Alpha-thalassemia/mental retardation syndrome, type 1 |
| 141800 | Methemoglobinemias, alpha- |
| 141800 | Thalassemias, alpha- |
| 141800 | Erythremias, alpha- |
| 141800 | Heinz body anemias, alpha- |
| 141850 | Thalassemia, alpha- |
| 141850 | Erythrocytosis |
| 141850 | Heinz body anemia |
| 141850 | Hemoglobin H disease |
| 141850 | Hypochromic microcytic anemia |
| 145001 | Hyperparathyroidism-jaw tumor syndrome |
| 145981 | Hypocalciuric hypercalcemia, type II |
| 146790 | Lupus nephritis, susceptibility to |
| 147141 | Leukemia, acute lymphoblastic |
| 148500 | Tylosis with esophageal cancer |
| 150200 | [Placental lactogen deficiency] |
| 152445 | Vohwinkel syndrome, 124500 |
| 152445 | Erythrokeratoderma, progressive symmetric, 602036 |
| 154275 | Malignant hyperthermia susceptibility 2 |
| 154276 | Malignant hyperthermia susceptibility 3 |
| 156850 | Cataract, congenital, with microphthalmia |
| 159000 | Muscular dystrophy, limb-girdle, type 1A |
| 159001 | Muscular dystrophy, limb-girdle, type 1B |
| 162100 | Neuralgic amyotrophy with predilection for brachial plexus |
| 164953 | Liposarcoma |
| 170500 | Myotonia congenita, atypical acetazolamide-responsive |
| 170500 | Paramyotonia congenita, 168300 |
| 170500 | Hyperkalemic periodic paralysis |
| 173360 | Thrombophilia due to excessive plasminogen activator |
| | inhibitor |
| 173360 | Hemorrhagic diathesis due to PAI1 deficiency |
| 174000 | Medullary cystic kidney disease, AD |
| 174900 | Polyposis, juvenile intestinal |
| 176960 | Pituitary tumor, invasive |
| 179095 | Male infertility |
| 179755 | Renal cell carcinoma, papillary, 1 |
| 180071 | Retinitis pigmentosa, autosomal recessive |
| 180860 | Russell-Silver syndrome |
| 182380 | Glucose/galactose malabsorption |
| 182452 | Lung cancer, small cell |
| 182860 | Pyropoikilocytosis |
| 182860 | Spherocytosis, recessive |
| 182860 | Elliptocytosis-2 |
| 186580 | Arthrocutaneouveal granulomatosis |
| 188070 | Bleeding disorder due to defective thromboxane A2 receptor |
| 188826 | Sorsby fundus dystrophy, 136900 |
| 190040 | Dermatofibrosarcoma protuberans |
| 190040 | Giant-cell fibroblastoma |
| 190040 | Meningioma, SIS-related |
| 191092 | Tuberous sclerosis-2 |
| 191315 | Insensitivity to pain, congenital, with anhidrosis, 256800 |
| 192974 | Neonatal alloimmune thrombocytopenia |
| 192974 | Glycoprotein Ia deficiency |
| 224100 | Congenital dyserythropoietic anemia II |
| 230200 | Galactokinase deficiency with cataracts |
| 230800 | Gaucher disease |
| 230800 | Gaucher disease with cardiovascular calcification |
| 236730 | Urofacial syndrome |
| 249000 | Meckel syndrome |
| 253250 | Mulibrey nanism |
| 264470 | Adrenoleukodystrophy, pseudoneonatal |
| 266200 | Anemia, hemolytic, due to PK deficiency |
| 600140 | Rubenstein-Taybi syndrome, 180849 |
| 600194 | Ichthyosis bullosa of Siemens, 146800 |
| 600231 | Palmoplantar keratoderma, Bothnia type |
| 600273 | Polycystic kidney disease, infantile severe, with tuberous |
| | sclerosis |
| 600281 | Non-insulin-dependent diabetes mellitus, 125853 |
| 600281 | MODY, type 1, 125850 |
| 600584 | Atrial septal defect with atrioventricular conduction defects, |
| | 108900 |
| 600808 | Enuresis, nocturnal, 2 |
| 600897 | Cataract, zonular pulverulent-1, 116200 |
| 600957 | Persistent Mullerian duct syndrome, type I, 261550 |
| 601002 | 5-oxoprolinuria, 266130 |
| 601002 | Hemolytic anemia due to glutathione synthetase deficiency, |
| | 231900 |
| 601105 | Pycnodysostosis, 265800 |
| 601146 | Brachydactyly, type C, 113100 |
| 601146 | Acromesomelic dysplasia, Hunter-Thompson type, 201250 |
| 601146 | Chondrodysplasia, Grebe type, 200700 |
| 601238 | Cerebellar ataxia, Cayman type |
| 601284 | Hereditary hemorrhagic telangiectasia-2, 600376 |
| 601313 | Polycystic kidney disease, adult type I, 173900 |
| 601412 | Deafness, autosomal dominant 7 |
| 601493 | Cardiomyopathy, dilated 1C |
| 601596 | Charcot-Marie-Tooth neuropathy, demyelinating |
| 601652 | Glaucoma 1A, primary open angle, juvenile-onset, 137750 |
| 601769 | Osteoporosis, involutional |
| 601769 | Rickets, vitamin D-resistant, 277440 |
| 601785 | Carbohydrate-deficient glycoprotein syndrome, type I, 212065 |
| 601846 | Muscular dystrophy with rimmed vacuoles |
| 602116 | Glioma |
| 602136 | Refsum disease, infantile, 266510 |
| 602136 | Zellweger syndrome-1, 214100 |
| 602136 | Adrenoleukodystrophy, neonatal, 202370 |
| 602216 | Peutz-Jeghers syndrome, 175200 |
| 602447 | Coronary artery disease, susceptibility to |
| 602477 | Febrile convulsions, familial, 2 |
| 602491 | Hyperlipidemia, familial combined, 1 |
| 602782 | Faisalabad histiocytosis |

[0110] The present invention is directed to variants of the polynucleotide sequence disclosed in SEQ ID NO:X or the complementary strand thereto, nucleotide sequences encoding the polypeptide of SEQ ID NO:Y, the nucleotide sequence of SEQ ID NO:X encoding the polypeptide sequence as defined in column 7 of Table 1A, nucleotide sequences encoding the polypeptide as defined in column 7 of Table 1A, the nucleotide sequence as defined in columns 8 and 9 of Table 2, nucleotide sequences encoding the polypeptide encoded by the nucleotide sequence as defined in columns 8 and 9 of Table 2, the nucleotide sequence as defined in column 6 of Table 1B, nucleotide sequences encoding the polypeptide encoded by the nucleotide sequence as defined in column 6 of Table 1B, the cDNA sequence contained in Clone ID NO:Z, and/or nucleotide sequences encoding the polypeptide encoded by the cDNA sequence contained in Clone ID NO:Z.

[0111] The present invention also encompasses variants of the polypeptide sequence disclosed in SEQ ID NO:Y, the polypeptide sequence as defined in column 7 of Table 1A, a polypeptide sequence encoded by the polynucleotide sequence in SEQ ID NO:X, a polypeptide sequence encoded by the nucleotide sequence as defined in columns 8 and 9 of Table 2, a polypeptide sequence encoded by the nucleotide sequence as defined in column 6 of Table 1B, a polypeptide sequence encoded by the complement of the polynucleotide sequence in SEQ ID NO:X, and/or a polypeptide sequence encoded by the cDNA sequence contained in Clone ID NO:Z.

[0112] “Variant” refers to a polynucleotide or polypeptide differing from the polynucleotide or polypeptide of the present invention, but retaining essential properties thereof. Generally, variants are overall closely similar, and, in many regions, identical to the polynucleotide or polypeptide of the present invention.

[0113] Thus, one aspect of the invention provides an isolated nucleic acid molecule comprising, or alternatively consisting of, a polynucleotide having a nucleotide sequence selected from the group consisting of: (a) a nucleotide sequence described in SEQ ID NO:X or contained in the cDNA sequence of Clone ID NO:Z; (b) a nucleotide sequence in SEQ ID NO:X or the cDNA in Clone ID NO:Z which encodes the complete amino acid sequence of SEQ ID NO:Y or the complete amino acid sequence encoded by the cDNA in Clone ID NO:Z; (c) a nucleotide sequence in SEQ ID NO:X or the cDNA in Clone ID NO:Z which encodes a mature polypeptide; (d) a nucleotide sequence in SEQ ID NO:X or the cDNA sequence of Clone ID NO:Z, which encodes a biologically active fragment of a polypeptide; (e) a nucleotide sequence in SEQ ID NO:X or the cDNA sequence of Clone ID NO:Z, which encodes an antigenic fragment of a polypeptide; (f) a nucleotide sequence encoding a polypeptide comprising the complete amino acid sequence of SEQ ID NO:Y or the complete amino acid sequence encoded by the cDNA in Clone ID NO:Z; (g) a nucleotide sequence encoding a mature polypeptide of the amino acid sequence of SEQ ID NO:Y or the amino acid sequence encoded by the cDNA in Clone ID NO:Z; (h) a nucleotide sequence encoding a biologically active fragment of a polypeptide having the complete amino acid sequence of SEQ ID NO:Y or the complete amino acid sequence encoded by the cDNA in Clone ID NO:Z; (i) a nucleotide sequence encoding an antigenic fragment of a polypeptide having the complete amino acid sequence of SEQ ID NO:Y or the complete amino acid sequence encoded by the cDNA in Clone ID NO:Z; and (j) a nucleotide sequence complementary to any of the nucleotide sequences in (a), (b), (c), (d), (e), (f), (g), (h), or (i) above.

[0114] The present invention is also directed to nucleic acid molecules which comprise, or alternatively consist of, a nucleotide sequence which is at least 80%, 85%, 90%, 95%, 96%, 97%, 98%, 99% or 100%, identical to, for example, any of the nucleotide sequences in (a), (b), (c), (d), (e), (f), (g), (h), (i), or (j) above, the nucleotide coding sequence in SEQ ID NO:X or the complementary strand thereto, the nucleotide coding sequence of the cDNA contained in Clone ID NO:Z or the complementary strand thereto, a nucleotide sequence encoding the polypeptide of SEQ ID NO:Y, a nucleotide sequence encoding a polypeptide sequence encoded by the nucleotide sequence in SEQ ID NO:X, a polypeptide sequence encoded by the complement of the polynucleotide sequence in SEQ ID NO:X, a nucleotide sequence encoding the polypeptide encoded by the cDNA contained in Clone ID NO:Z, the nucleotide coding sequence in SEQ ID NO:X as defined in columns 8 and 9 of Table 2 or the complementary strand thereto, a nucleotide sequence encoding the polypeptide encoded by the nucleotide sequence in SEQ ID NO:X as defined in columns 8 and 9 of Table 2 or the complementary strand thereto, the nucleotide coding sequence in SEQ ID NO:B as defined in column 6 of Table 1B or the complementary strand thereto, a nucleotide sequence encoding the polypeptide encoded by the nucleotide sequence in SEQ ID NO:B as defined in column 6 of Table 1B or the complementary strand thereto, the nucleotide sequence in SEQ ID NO:X encoding the polypeptide sequence as defined in column 7 of Table 1A or the complementary strand thereto, nucleotide sequences encoding the polypeptide as defined in column 7 of Table 1A or the complementary strand thereto, and/or polynucleotide fragments of any of these nucleic acid molecules (e.g., those fragments described herein). Polynucleotides which hybridize to the complement of these nucleic acid molecules under stringent hybridization conditions or alternatively, under lower stringency conditions, are also encompassed by the invention, as are polypeptides encoded by these polynucleotides and nucleic acids.

[0115] In a preferred embodiment, the invention encompasses nucleic acid molecules which comprise, or alternatively, consist of a polynucleotide which hybridizes under stringent hybridization conditions, or alternatively, under lower stringency conditions, to a polynucleotide in (a), (b), (c), (d), (e), (f), (g), (h), or (i), above, as are polypeptides encoded by these polynucleotides. In another preferred embodiment, polynucleotides which hybridize to the complement of these nucleic acid molecules under stringent hybridization conditions, or alternatively, under lower stringency conditions, are also encompassed by the invention, as are polypeptides encoded by these polynucleotides.

[0116] In another embodiment, the invention provides a purified protein comprising, or alternatively consisting of, a polypeptide having an amino acid sequence selected from the group consisting of: (a) the complete amino acid sequence of SEQ ID NO:Y or the complete amino acid sequence encoded by the cDNA in Clone ID NO:Z; (b) the amino acid sequence of a mature form of a polypeptide having the amino acid sequence of SEQ ID NO:Y or the amino acid sequence encoded by the cDNA in Clone ID NO:Z; (c) the amino acid sequence of a biologically active fragment of a polypeptide having the complete amino acid sequence of SEQ ID NO:Y or the complete amino acid sequence encoded by the cDNA in Clone ID NO:Z; and (d) the amino acid sequence of an antigenic fragment of a polypeptide having the complete amino acid sequence of SEQ ID NO:Y or the complete amino acid sequence encoded by the cDNA in Clone ID NO:Z.

[0117] The present invention is also directed to proteins which comprise, or alternatively consist of, an amino acid sequence which is at least 80%, 85%, 90%, 95%, 96%, 97%, 98%, 99% or 100%, identical to, for example, any of the amino acid sequences in (a), (b), (c), or (d), above, the amino acid sequence shown in SEQ ID NO:Y, the amino acid sequence encoded by the cDNA contained in Clone ID NO:Z, the amino acid sequence of the polypeptide encoded by the nucleotide sequence in SEQ ID NO:X as defined in columns 8 and 9 of Table 2, the amino acid sequence of the polypeptide encoded by the nucleotide sequence in SEQ ID NO:B as defined in column 6 of Table 1B, the amino acid sequence as defined in column 7 of Table 1A, an amino acid sequence encoded by the nucleotide sequence in SEQ ID NO:X, and an amino acid sequence encoded by the complement of the polynucleotide sequence in SEQ ID NO:X. Fragments of these polypeptides are also provided (e.g., those fragments described herein). Further proteins encoded by polynucleotides which hybridize to the complement of the nucleic acid molecules encoding these amino acid sequences under stringent hybridization conditions or alternatively, under lower stringency conditions, are also encompassed by the invention, as are the polynucleotides encoding these proteins.

[0118] By a nucleic acid having a nucleotide sequence at least, for example, 95% “identical” to a reference nucleotide sequence of the present invention, it is intended that the nucleotide sequence of the nucleic acid is identical to the reference sequence except that the nucleotide sequence may include up to five point mutations per each 100 nucleotides of the reference nucleotide sequence encoding the polypeptide. In other words, to obtain a nucleic acid having a nucleotide sequence at least 95% identical to a reference nucleotide sequence, up to 5% of the nucleotides in the reference sequence may be deleted or substituted with another nucleotide, or a number of nucleotides up to 5% of the total nucleotides in the reference sequence may be inserted into the reference sequence. The query sequence may be an entire sequence referred to in Table 1A or 2 as the ORF (open reading frame), or any fragment specified as described herein.

[0119] As a practical matter, whether any particular nucleic acid molecule or polypeptide is at least 80%, 85%, 90%, 95%, 96%, 97%, 98% or 99% identical to a nucleotide sequence of the present invention can be determined conventionally using known computer programs. A preferred method for determining the best overall match between a query sequence (a sequence of the present invention) and a subject sequence, also referred to as a global sequence alignment, can be determined using the FASTDB computer program based on the algorithm of Brutlag et al. (Comp. App. Biosci. 6:237-245 (1990)). In a sequence alignment the query and subject sequences are both DNA sequences. An RNA sequence can be compared by converting U's to T's. The result of said global sequence alignment is expressed as percent identity. Preferred parameters used in a FASTDB alignment of DNA sequences to calculate percent identity are: Matrix=Unitary, k-tuple=4, Mismatch Penalty=1, Joining Penalty=30, Randomization Group Length=0, Cutoff Score=1, Gap Penalty=5, Gap Size Penalty 0.05, Window Size=500 or the length of the subject nucleotide sequence, whichever is shorter.

[0120] If the subject sequence is shorter than the query sequence because of 5′ or 3′ deletions, not because of internal deletions, a manual correction must be made to the results. This is because the FASTDB program does not account for 5′ and 3′ truncations of the subject sequence when calculating percent identity. For subject sequences truncated at the 5′ or 3′ ends, relative to the query sequence, the percent identity is corrected by calculating the number of bases of the query sequence that are 5′ and 3′ of the subject sequence, which are not matched/aligned, as a percent of the total bases of the query sequence. Whether a nucleotide is matched/aligned is determined by results of the FASTDB sequence alignment. This percentage is then subtracted from the percent identity, calculated by the above FASTDB program using the specified parameters, to arrive at a final percent identity score. This corrected score is what is used for the purposes of the present invention. Only bases outside the 5′ and 3′ bases of the subject sequence, as displayed by the FASTDB alignment, which are not matched/aligned with the query sequence, are calculated for the purposes of manually adjusting the percent identity score.

[0121] For example, a 90 base subject sequence is aligned to a 100 base query sequence to determine percent identity. The deletions occur at the 5′ end of the subject sequence and therefore, the FASTDB alignment does not show a matched/alignment of the first 10 bases at 5′ end. The 10 unpaired bases represent 10% of the sequence (number of bases at the 5′ and 3′ ends not matched/total number of bases in the query sequence) so 10% is subtracted from the percent identity score calculated by the FASTDB program. If the remaining 90 bases were perfectly matched the final percent identity would be 90%. In another example, a 90 base subject sequence is compared with a 100 base query sequence. This time the deletions are internal deletions so that there are no bases on the 5′ or 3′ of the subject sequence which are not matched/aligned with the query. In this case the percent identity calculated by FASTDB is not manually corrected. Once again, only bases 5′ and 3′ of the subject sequence which are not matched/aligned with the query sequence are manually corrected for. No other manual corrections are to be made for the purposes of the present invention.

[0122] By a polypeptide having an amino acid sequence at least, for example, 95% “identical” to a query amino acid sequence of the present invention, it is intended that the amino acid sequence of the subject polypeptide is identical to the query sequence except that the subject polypeptide sequence may include up to five amino acid alterations per each 100 amino acids of the query amino acid sequence. In other words, to obtain a polypeptide having an amino acid sequence at least 95% identical to a query amino acid sequence, up to 5% of the amino acid residues in the subject sequence may be inserted, deleted, (indels) or substituted with another amino acid. These alterations of the reference sequence may occur at the amino or carboxy terminal positions of the reference amino acid sequence or anywhere between those terminal positions, interspersed either individually among residues in the reference sequence or in one or more contiguous groups within the reference sequence.

[0123] As a practical matter, whether any particular polypeptide is at least 80%, 85%, 90%, 95%, 96%, 97%, 98% or 99% identical to, for instance, the amino acid sequence of a polypeptide referred to in Table 1A (e.g., the amino acid sequence identified in column 6) or Table 2 (e.g., the amino acid sequence of the polypeptide encoded by the polynucleotide sequence defined in columns 8 and 9 of Table 2) or a fragment thereof, the amino acid sequence of the polypeptide encoded by the polynucleotide sequence in SEQ ID NO:B as defined in column 6 of Table 1B or a fragment thereof, the amino acid sequence of the polypeptide encoded by the nucleotide sequence in SEQ ID NO:X or a fragment thereof, or the amino acid sequence of the polypeptide encoded by cDNA contained in Clone ID NO:Z, or a fragment thereof, can be determined conventionally using known computer programs. A preferred method for determining the best overall match between a query sequence (a sequence of the present invention) and a subject sequence, also referred to as a global sequence alignment, can be determined using the FASTDB computer program based on the algorithm of Brutlag et al. (Comp. App. Biosci.6:237-245 (1990)). In a sequence alignment the query and subject sequences are either both nucleotide sequences or both amino acid sequences. The result of said global sequence alignment is expressed as percent identity. Preferred parameters used in a FASTDB amino acid alignment are: Matrix=PAM 0, k-tuple=2, Mismatch Penalty=1, Joining Penalty=20, Randomization Group Length=0, Cutoff Score=1, Window Size=sequence length, Gap Penalty=5, Gap Size Penalty=0.05, Window Size=500 or the length of the subject amino acid sequence, whichever is shorter.

[0124] If the subject sequence is shorter than the query sequence due to N- or C-terminal deletions, not because of internal deletions, a manual correction must be made to the results. This is because the FASTDB program does not account for N- and C-terminal truncations of the subject sequence when calculating global percent identity. For subject sequences truncated at the N- and C-termini, relative to the query sequence, the percent identity is corrected by calculating the number of residues of the query sequence that are N- and C-terminal of the subject sequence, which are not matched/aligned with a corresponding subject residue, as a percent of the total bases of the query sequence. Whether a residue is matched/aligned is determined by results of the FASTDB sequence alignment. This percentage is then subtracted from the percent identity, calculated by the above FASTDB program using the specified parameters, to arrive at a final percent identity score. This final percent identity score is what is used for the purposes of the present invention. Only residues to the N- and C-termini of the subject sequence, which are not matched/aligned with the query sequence, are considered for the purposes of manually adjusting the percent identity score. That is, only query residue positions outside the farthest N- and C-terminal residues of the subject sequence.

[0125] For example, a 90 amino acid residue subject sequence is aligned with a 100 residue query sequence to determine percent identity. The deletion occurs at the N-terminus of the subject sequence and therefore, the FASTDB alignment does not show a matching/alignment of the first 10 residues at the N-terminus. The 10 unpaired residues represent 10% of the sequence (number of residues at the N- and C-termini not matched/total number of residues in the query sequence) so 10% is subtracted from the percent identity score calculated by the FASTDB program. If the remaining 90 residues were perfectly matched the final percent identity would be 90%. In another example, a 90 residue subject sequence is compared with a 100 residue query sequence. This time the deletions are internal deletions so there are no residues at the N- or C-termini of the subject sequence which are not matched/aligned with the query. In this case the percent identity calculated by FASTDB is not manually corrected. Once again, only residue positions outside the N- and C-terminal ends of the subject sequence, as displayed in the FASTDB alignment, which are not matched/aligned with the query sequence are manually corrected for. No other manual corrections are to made for the purposes of the present invention.

[0126] The polynucleotide variants of the invention may contain alterations in the coding regions, non-coding regions, or both. Especially preferred are polynucleotide variants containing alterations which produce silent substitutions, additions, or deletions, but do not alter the properties or activities of the encoded polypeptide. Nucleotide variants produced by silent substitutions due to the degeneracy of the genetic code are preferred. Moreover, polypeptide variants in which less than 50, less than 40, less than 30, less than 20, less than 10, or 5-50, 5-25, 5-10, 1-5, or 1-2 amino acids are substituted, deleted, or added in any combination are also preferred. Polynucleotide variants can be produced for a variety of reasons, e.g., to optimize codon expression for a particular host (change codons in the human mRNA to those preferred by a bacterial host such as E. coli).

[0127] Naturally occurring variants are called “allelic variants,” and refer to one of several alternate forms of a gene occupying a given locus on a chromosome of an organism. (Genes II, Lewin, B., ed., John Wiley & Sons, New York (1985)). These allelic variants can vary at either the polynucleotide and/or polypeptide level and are included in the present invention. Alternatively, non-naturally occurring variants may be produced by mutagenesis techniques or by direct synthesis.

[0128] Using known methods of protein engineering and recombinant DNA technology, variants may be generated to improve or alter the characteristics of the polypeptides of the present invention. For instance, one or more amino acids can be deleted from the N-terminus or C-terminus of the polypeptide of the present invention without substantial loss of biological function. As an example, Ron et al. (J. Biol. Chem. 268:2984-2988 (1993)) reported variant KGF proteins having heparin binding activity even after deleting 3, 8, or 27 amino-terminal amino acid residues. Similarly, Interferon gamma exhibited up to ten times higher activity after deleting 8-10 amino acid residues from the carboxy terminus of this protein. (Dobeli et al., J. Biotechnology 7:199-216 (1988).)

[0129] Moreover, ample evidence demonstrates that variants often retain a biological activity similar to that of the naturally occurring protein. For example, Gayle and coworkers (J. Biol. Chem. 268:22105-22111 (1993)) conducted extensive mutational analysis of human cytokine IL-1a. They used random mutagenesis to generate over 3,500 individual IL-1a mutants that averaged 2.5 amino acid changes per variant over the entire length of the molecule. Multiple mutations were examined at every possible amino acid position. The investigators found that “[m]ost of the molecule could be altered with little effect on either [binding or biological activity].” In fact, only 23 unique amino acid sequences, out of more than 3,500 nucleotide sequences examined, produced a protein that significantly differed in activity from wild-type.

[0130] Furthermore, even if deleting one or more amino acids from the N-terminus or C-terminus of a polypeptide results in modification or loss of one or more biological functions, other biological activities may still be retained. For example, the ability of a deletion variant to induce and/or to bind antibodies which recognize the secreted form will likely be retained when less than the majority of the residues of the secreted form are removed from the N-terminus or C-terminus. Whether a particular polypeptide lacking N- or C-terminal residues of a protein retains such immunogenic activities can readily be determined by routine methods described herein and otherwise known in the art.

[0131] Thus, the invention further includes polypeptide variants which show a functional activity (e.g., biological activity) of the polypeptides of the invention. Such variants include deletions, insertions, inversions, repeats, and substitutions selected according to general rules known in the art so as have little effect on activity.

[0132] The present application is directed to nucleic acid molecules at least 80%, 85%, 90%, 95%, 96%, 97%, 98%, 99% or 100% identical to the nucleic acid sequences disclosed herein, (e.g., encoding a polypeptide having the amino acid sequence of an N and/or C terminal deletion), irrespective of whether they encode a polypeptide having functional activity. This is because even where a particular nucleic acid molecule does not encode a polypeptide having functional activity, one of skill in the art would still know how to use the nucleic acid molecule, for instance, as a hybridization probe or a polymerase chain reaction (PCR) primer. Uses of the nucleic acid molecules of the present invention that do not encode a polypeptide having functional activity include, inter alia, (1) isolating a gene or allelic or splice variants thereof in a cDNA library; (2) in situ hybridization (e.g., “FISH”) to metaphase chromosomal spreads to provide precise chromosomal location of the gene, as described in Verma et al., Human Chromosomes: A Manual of Basic Techniques, Pergamon Press, New York (1988); (3) Northern Blot analysis for detecting mRNA expression in specific tissues (e.g., normal or diseased tissues); and (4) in situ hybridization (e.g., histochemistry) for detecting mRNA expression in specific tissues (e.g., normal or diseased tissues).

[0133] Preferred, however, are nucleic acid molecules having sequences at least 80%, 85%, 90%, 95%, 96%, 97%, 98%, 99% or 100% identical to the nucleic acid sequences disclosed herein, which do, in fact, encode a polypeptide having functional activity. By a polypeptide having “functional activity” is meant, a polypeptide capable of displaying one or more known functional activities associated with a full-length (complete) protein of the invention. Such functional activities include, but are not limited to, biological activity, antigenicity [ability to bind (or compete with a polypeptide of the invention for binding) to an anti-polypeptide of the invention antibody], immunogenicity (ability to generate antibody which binds to a specific polypeptide of the invention), ability to form multimers with polypeptides of the invention, and ability to bind to a receptor or ligand for a polypeptide of the invention.

[0134] The functional activity of the polypeptides, and fragments, variants and derivatives of the invention, can be assayed by various methods.

[0135] For example, in one embodiment where one is assaying for the ability to bind or compete with a full-length polypeptide of the present invention for binding to an anti-polypetide antibody, various immunoassays known in the art can be used, including but not limited to, competitive and non-competitive assay systems using techniques such as radioimmunoassays, ELISA (enzyme linked immunosorbent assay), “sandwich” immunoassays, immunoradiometric assays, gel diffusion precipitation reactions, immunodiffusion assays, in situ immunoassays (using colloidal gold, enzyme or radioisotope labels, for example), western blots, precipitation reactions, agglutination assays (e.g., gel agglutination assays, hemagglutination assays), complement fixation assays, immunofluorescence assays, protein A assays, and immunoelectrophoresis assays, etc. In one embodiment, antibody binding is detected by detecting a label on the primary antibody. In another embodiment, the primary antibody is detected by detecting binding of a secondary antibody or reagent to the primary antibody. In a further embodiment, the secondary antibody is labeled. Many means are known in the art for detecting binding in an immunoassay and are within the scope of the present invention.

[0136] In another embodiment, where a ligand is identified, or the ability of a polypeptide fragment, variant or derivative of the invention to multimerize is being evaluated, binding can be assayed, e.g., by means well-known in the art, such as, for example, reducing and non-reducing gel chromatography, protein affinity chromatography, and affinity blotting. See generally, Phizicky et al., Microbiol. Rev. 59:94-123 (1995). In another embodiment, the ability of physiological correlates of a polypeptide of the present invention to bind to a substrate(s) of the polypeptide of the invention can be routinely assayed using techniques known in the art.

[0137] In addition, assays described herein (see Examples) and otherwise known in the art may routinely be applied to measure the ability of polypeptides of the present invention and fragments, variants and derivatives thereof to elicit polypeptide related biological activity (either in vitro or in vivo). Other methods will be known to the skilled artisan and are within the scope of the invention.

[0138] Of course, due to the degeneracy of the genetic code, one of ordinary skill in the art will immediately recognize that a large number of the nucleic acid molecules having a sequence at least 80%, 85%, 90%, 95%, 96%, 97%, 98%, 99%, or 100% identical to, for example, the nucleic acid sequence of the cDNA contained in Clone ID NO:Z, the nucleic acid sequence referred to in Table 1A (SEQ ID NO:X), the nucleic acid sequence disclosed in Table 2 (e.g,. the nucleic acid sequence delineated in columns 8 and 9) or fragments thereof, will encode polypeptides “having functional activity.” In fact, since degenerate variants of any of these nucleotide sequences all encode the same polypeptide, in many instances, this will be clear to the skilled artisan even without performing the above described comparison assay. It will be further recognized in the art that, for such nucleic acid molecules that are not degenerate variants, a reasonable number will also encode a polypeptide having functional activity. This is because the skilled artisan is fully aware of amino acid substitutions that are either less likely or not likely to significantly effect protein function (e.g., replacing one aliphatic amino acid with a second aliphatic amino acid), as further described below.

[0139] For example, guidance concerning how to make phenotypically silent amino acid substitutions is provided in Bowie et al., “Deciphering the Message in Protein Sequences: Tolerance to Amino Acid Substitutions,” Science 247:1306-1310 (1990), wherein the authors indicate that there are two main strategies for studying the tolerance of an amino acid sequence to change.

[0140] The first strategy exploits the tolerance of amino acid substitutions by natural selection during the process of evolution. By comparing amino acid sequences in different species, conserved amino acids can be identified. These conserved amino acids are likely important for protein function. In contrast, the amino acid positions where substitutions have been tolerated by natural selection indicates that these positions are not critical for protein function. Thus, positions tolerating amino acid substitution could be modified while still maintaining biological activity of the protein.

[0141] The second strategy uses genetic engineering to introduce amino acid changes at specific positions of a cloned gene to identify regions critical for protein function. For example, site directed mutagenesis or alanine-scanning mutagenesis (introduction of single alanine mutations at every residue in the molecule) can be used. See Cunningham and Wells, Science 244:1081-1085 (1989). The resulting mutant molecules can then be tested for biological activity.

[0142] As the authors state, these two strategies have revealed that proteins are surprisingly tolerant of amino acid substitutions. The authors further indicate which amino acid changes are likely to be permissive at certain amino acid positions in the protein. For example, most buried (within the tertiary structure of the protein) amino acid residues require nonpolar side chains, whereas few features of surface side chains are generally conserved. Moreover, tolerated conservative amino acid substitutions involve replacement of the aliphatic or hydrophobic amino acids Ala, Val, Leu and Ile; replacement of the hydroxyl residues Ser and Thr; replacement of the acidic residues Asp and Glu; replacement of the amide residues Asn and Gln, replacement of the basic residues Lys, Arg, and His; replacement of the aromatic residues Phe, Tyr, and Trp, and replacement of the small-sized amino acids Ala, Ser, Thr, Met, and Gly. Besides conservative amino acid substitution, variants of the present invention include (i) substitutions with one or more of the non-conserved amino acid residues, where the substituted amino acid residues may or may not be one encoded by the genetic code, or (ii) substitutions with one or more of the amino acid residues having a substituent group, or (iii) fusion of the mature polypeptide with another compound, such as a compound to increase the stability and/or solubility of the polypeptide (for example, polyethylene glycol), (iv) fusion of the polypeptide with additional amino acids, such as, for example, an IgG Fc fusion region peptide, serum albumin (preferably human serum albumin) or a fragment thereof, or leader or secretory sequence, or a sequence facilitating purification, or (v) fusion of the polypeptide with another compound, such as albumin (including but not limited to recombinant albumin (see, e.g., U.S. Pat. No. 5,876,969, issued Mar. 2, 1999, EP Patent 0 413 622, and U.S. Pat. No. 5,766,883, issued Jun. 16, 1998, herein incorporated by reference in their entirety)). Such variant polypeptides are deemed to be within the scope of those skilled in the art from the teachings herein.

[0143] For example, polypeptide variants containing amino acid substitutions of charged amino acids with other charged or neutral amino acids may produce proteins with improved characteristics, such as less aggregation. Aggregation of pharmaceutical formulations both reduces activity and increases clearance due to the aggregate's immunogenic activity. See Pinckard et al., Clin. Exp. Immunol. 2:331-340 (1967); Robbins et al., Diabetes 36:838-845 (1987); Cleland et al., Crit. Rev. Therapeutic Drug Carrier Systems 10:307-377 (1993).

[0144] A further embodiment of the invention relates to polypeptides which comprise the amino acid sequence of a polypeptide having an amino acid sequence which contains at least one amino acid substitution, but not more than 50 amino acid substitutions, even more preferably, not more than 40 amino acid substitutions, still more preferably, not more than 30 amino acid substitutions, and still even more preferably, not more than 20 amino acid substitutions from a polypeptide sequence disclosed herein. Of course it is highly preferable for a polypeptide to have an amino acid sequence which comprises the amino acid sequence of a polypeptide of SEQ ID NO:Y, an amino acid sequence encoded by SEQ ID NO:X, an amino acid sequence encoded by the portion of SEQ ID NO:X as defined in columns 8 and 9 of Table 2, an amino acid sequence encoded by the complement of SEQ ID NO:X, and/or an amino acid sequence encoded by cDNA contained in Clone ID NO:Z which contains, in order of ever-increasing preference, at least one, but not more than 10, 9, 8, 7, 6, 5, 4, 3, 2 or 1 amino acid substitutions.

[0145] In specific embodiments, the polypeptides of the invention comprise, or alternatively, consist of, fragments or variants of a reference amino acid sequence selected from: (a) the amino acid sequence of SEQ ID NO:Y or fragments thereof (e.g., the mature form and/or other fragments described herein); (b) the amino acid sequence encoded by SEQ ID NO:X or fragments thereof, (c) the amino acid sequence encoded by the complement of SEQ ID NO:X or fragments thereof, (d) the amino acid sequence encoded by the portion of SEQ ID NO:X as defined in columns 8 and 9 of Table 2 or fragments thereof, and (e) the amino acid sequence encoded by cDNA contained in Clone ID NO:Z or fragments thereof; wherein the fragments or variants have 1-5, 5-10, 5-25, 5-50, 10-50 or 50-150, amino acid residue additions, substitutions, and/or deletions when compared to the reference amino acid sequence. In preferred embodiments, the amino acid substitutions are conservative. Polynucleotides encoding these polypeptides are also encompassed by the invention.

[0146] Polynucleotide and Polypeptide Fragments

[0147] The present invention is also directed to polynucleotide fragments of the polynucleotides (nucleic acids) of the invention. In the present invention, a “polynucleotide fragment” refers to a polynucleotide having a nucleic acid sequence which, for example: is a portion of the cDNA contained in Clone ID NO:Z or the complementary strand thereto; is a portion of the polynucleotide sequence encoding the polypeptide encoded by the cDNA contained in Clone ID NO:Z or the complementary strand thereto; is a portion of a polynucleotide sequence encoding the amino acid sequence encoded by the region of SEQ ID NO:X as defined in columns 8 and 9 of Table 2 or the complementary strand thereto; is a portion of the polynucleotide sequence of SEQ ID NO:X as defined in columns 8 and 9 of Table 2 or the complementary strand thereto; is a portion of the polynucleotide sequence in SEQ ID NO:X or the complementary strand thereto; is a polynucleotide sequence encoding a portion of the polypeptide of SEQ ID NO:Y; is a polynucleotide sequence encoding a portion of a polypeptide encoded by SEQ ID NO:X; is a polynucleotide sequence encoding a portion of a polypeptide encoded by the complement of the polynucleotide sequence in SEQ ID NO:X; is a portion of a polynucleotide sequence encoding the amino acid sequence encoded by the region of SEQ ID NO:B as defined in column 6 of Table 1B or the complementary strand thereto; or is a portion of the polynucleotide sequence of SEQ ID NO:B as defined in column 6 of Table 1B or the complementary strand thereto.

[0148] The polynucleotide fragments of the invention are preferably at least about 15 nt, and more preferably at least about 20 nt, still more preferably at least about 30 nt, and even more preferably, at least about 40 nt, at least about 50 nt, at least about 75 nt, or at least about 150 nt in length. A fragment “at least 20 nt in length,” for example, is intended to include 20 or more contiguous bases from the cDNA sequence contained in Clone ID NO:Z, or the nucleotide sequence shown in SEQ ID NO:X or the complementary stand thereto. In this context “about” includes the particularly recited value or a value larger or smaller by several (5, 4, 3, 2, or 1) nucleotides, at either terminus or at both termini. These nucleotide fragments have uses that include, but are not limited to, as diagnostic probes and primers as discussed herein. Of course, larger fragments (e.g., at least 160, 170, 180, 190, 200, 250, 500, 600, 1000, or 2000 nucleotides in length) are also encompassed by the invention.

[0149] Moreover, representative examples of polynucleotide fragments of the invention comprise, or alternatively consist of, a sequence from about nucleotide number 1-50, 51-100, 101-150, 151-200, 201-250, 251-300, 301-350, 351-400, 401-450, 451-500, 501-550, 551-600, 601-650, 651-700, 701-750, 751-800, 801-850, 851-900, 901-950, 951-1000, 1001-1050, 1051-1100, 1101-1150, 1151-1200, 1201-1250, 1251-1300, 1301-1350, 1351-1400, 1401-1450, 1451-1500, 1501-1550, 1551-1600, 1601-1650, 1651-1700, 1701-1750, 1751-1800, 1801-1850, 1851-1900, 1901-1950, 1951-2000, 2001-2050, 2051-2100, 2101-2150, 2151-2200, 2201-2250, 2251-2300, 2301-2350, 2351-2400, 2401-2450, 2451-2500, 2501-2550, 2551-2600, 2601-2650, 2651-2700, 2701-2750, 2751-2800, 2801-2850, 2851-2900, 2901-2950, 2951-3000, 3001-3050, 3051-3100, 3101-3150, 3151-3200, 3201-3250, 3251-3300, 3301-3350, 3351-3400, 3401-3450, 3451-3500, 3501-3550, 3551-3600, 3601-3650, 3651-3700, 3701-3750, 3751-3800, 3801-3850, 3851-3900, 3901-3950, 3951-4000, 4001-4050, 4051-4100, 4101-4150, 4151-4200, 4201-4250, 4251-4300, 4301-4350, 4351-4400, 4401-4450, 4451-4500, 4501-4550, 4551-4600, 4601-4650, 4651-4700, 4701-4750, 4751-4800, 4801-4850, 4851-4900, 4901-4950, 4951-5000, 5001-5050, 5051-5100, 5101-5150, 5151-5200, 5201-5250, 5251-5300, 5301-5350, 5351-5400, 5401-5450, 5451-5500, 5501-5550, 5551-5600, 5601-5650, 5651-5700, 5701-5750, 5751-5800, 5801-5850, 5851-5900, 5901-5950, 5951-6000, 6001-6050, 6051-6100, 6101-6150, 6151-6200, 6201-6250, 6251-6300, 6301-6350, 6351-6400, 6401-6450, 6451-6500, 6501-6550, 6551-6600, 6601-6650, 6651-6700, 6701-6750, 6751-6800, 6801-6850, 6851-6900, 6901-6950, 6951-7000, 7001-7050, 7051-7100, 7101-7150, 7151-7200, 7201-7250, 7251-7300 or 7301 to the end of SEQ ID NO:X, or the complementary strand thereto. In this context “about” includes the particularly recited range or a range larger or smaller by several (5, 4, 3, 2, or 1) nucleotides, at either terminus or at both termini. Preferably, these fragments encode a polypeptide which has a functional activity (e.g., biological activity). More preferably, these polynucleotides can be used as probes or primers as discussed herein. Polynucleotides which hybridize to one or more of these polynucleotides under stringent hybridization conditions or alternatively, under lower stringency conditions are also encompassed by the invention, as are polypeptides encoded by these polynucleotides.

[0150] Further representative examples of polynucleotide fragments of the invention comprise, or alternatively consist of, a sequence from about nucleotide number 1-50, 51-100, 101-150, 151-200, 201-250, 251-300, 301-350, 351-400, 401-450, 451-500, 501-550, 551-600, 601-650, 651-700, 701-750, 751-800, 801-850, 851-900, 901-950, 951-1000, 1001-1050, 1051-1100, 1101-1150, 1151-1200, 1201-1250, 1251-1300, 1301-1350, 1351-1400, 1401-1450, 1451-1500, 1501-1550, 1551-1600, 1601-1650, 1651-1700, 1701-1750, 1751-1800, 1801-1850, 1851-1900, 1901-1950, 1951-2000, 2001-2050, 2051-2100, 2101-2150, 2151-2200, 2201-2250, 2251-2300, 2301-2350, 2351-2400, 2401-2450, 2451-2500, 2501-2550, 2551-2600, 2601-2650, 2651-2700, 2701-2750, 2751-2800, 2801-2850, 2851-2900, 2901-2950, 2951-3000, 3001-3050, 3051-3100, 3101-3150, 3151-3200, 3201-3250, 3251-3300, 3301-3350, 3351-3400, 3401-3450, 3451-3500, 3501-3550, 3551-3600, 3601-3650, 3651-3700, 3701-3750, 3751-3800, 3801-3850, 3851-3900, 3901-3950, 3951-4000, 4001-4050, 4051-4100, 4101-4150, 4151-4200, 4201-4250, 4251-4300, 4301-4350, 4351-4400, 4401-4450, 4451-4500, 4501-4550, 4551-4600, 4601-4650, 4651-4700, 4701-4750, 4751-4800, 4801-4850, 4851-4900, 4901-4950, 4951-5000, 5001-5050, 5051-5100, 5101-5150, 5151-5200, 5201-5250, 5251-5300, 5301-5350, 5351-5400, 5401-5450, 5451-5500, 5501-5550, 5551-5600, 5601-5650, 5651-5700, 5701-5750, 5751-5800, 5801-5850, 5851-5900, 5901-5950, 5951-6000, 6001-6050, 6051-6100, 6101-6150, 6151-6200, 6201-6250, 6251-6300, 6301-6350, 6351-6400, 6401-6450, 6451-6500, 6501-6550, 6551-6600, 6601-6650, 6651-6700, 6701-6750, 6751-6800, 6801-6850, 6851-6900, 6901-6950, 6951-7000, 7001-7050, 7051-7100, 7101-7150, 7151-7200, 7201-7250, 7251-7300 or 7301 to the end of the cDNA sequence contained in Clone ID NO:Z, or the complementary strand thereto. In this context “about” includes the particularly recited range or a range larger or smaller by several (5, 4, 3, 2, or 1) nucleotides, at either terminus or at both termini. Preferably, these fragments encode a polypeptide which has a functional activity (e.g., biological activity). More preferably, these polynucleotides can be used as probes or primers as discussed herein. Polynucleotides which hybridize to one or more of these polynucleotides under stringent hybridization conditions or alternatively, under lower stringency conditions are also encompassed by the invention, as are polypeptides encoded by these polynucleotides.

[0151] Moreover, representative examples of polynucleotide fragments of the invention comprise, or alternatively consist of, a nucleic acid sequence comprising one, two, three, four, five, six, seven, eight, nine, ten, or more of the above described polynucleotide fragments of the invention in combination with a polynucleotide sequence delineated in Table 1B column 6. Additional, representative examples of polynucleotide fragments of the invention comprise, or alternatively consist of, a nucleic acid sequence comprising one, two, three, four, five, six, seven, eight, nine, ten, or more of the above described polynucleotide fragments of the invention in combination with a polynucleotide sequence that is the complementary strand of a sequence delineated in column 6 of Table 1B. In further embodiments, the above-described polynucleotide fragments of the invention comprise, or alternatively consist of, sequences delineated in Table 1B, column 6, and have a nucleic acid sequence which is different from that of the BAC fragment having the sequence disclosed in SEQ ID NO:B (see Table 1B, column 5). In additional embodiments, the above-described polynucleotide fragments of the invention comprise, or alternatively consist of, sequences delineated in Table 1B, column 6, and have a nucleic acid sequence which is different from that published for the BAC clone identified as BAC ID NO:A (see Table 1B, column 4). In additional embodiments, the above-described polynucleotides of the invention comprise, or alternatively consist of, sequences delineated Table 1B, column 6, and have a nucleic acid sequence which is different from that contained in the BAC clone identified as BAC ID NO:A (see Table 1B, column 4). Polypeptides encoded by these polynucleotides, other polynucleotides that encode these polypeptides, and antibodies that bind these polypeptides are also encompassed by the invention. Additionally, fragments and variants of the above-described polynucleotides and polypeptides are also encompassed by the invention.

[0152] In additional specific embodiments, polynucleotides of the invention comprise, or alternatively consist of, one, two, three, four, five, six, seven, eight, nine, ten, or more fragments of the sequences delineated in column 6 of Table 1B, and the polynucleotide sequence of SEQ ID NO:X (e.g., as defined in Table 1B, column 2) or fragments or variants thereof. Polypeptides encoded by these polynucleotides, other polynucleotides that encode these polypeptides, and antibodies that bind these polypeptides are also encompassed by the invention.

[0153] In additional specific embodiments, polynucleotides of the invention comprise, or alternatively consist of, one, two, three, four, five, six, seven, eight, nine, ten, or more fragments of the sequences delineated in column 6 of Table 1B which correspond to the same Clone ID NO:Z (see Table 1B, column 1), and the polynucleotide sequence of SEQ ID NO:X (e.g., as defined in Table 1A or 1B) or fragments or variants thereof. Polypeptides encoded by these polynucleotides, other polynucleotides that encode these polypeptides, and antibodies that bind these polypeptides are also encompassed by the invention.

[0154] In further specific embodiments, polynucleotides of the invention comprise, or alternatively consist of, one, two, three, four, five, six, seven, eight, nine, ten, or more fragments of the sequences delineated in the same row of column 6 of Table 1B, and the polynucleotide sequence of SEQ ID NO:X (e.g., as defined in Table 1A or 1B) or fragments or variants thereof. Polypeptides encoded by these polynucleotides, other polynucleotides that encode these polypeptides, and antibodies that bind these polypeptides are also encompassed by the invention.

[0155] In additional specific embodiments, polynucleotides of the invention comprise, or alternatively consist of a polynucleotide sequence in which the 3′ 10 polynucleotides of one of the sequences delineated in column 6 of Table 1B and the 5′ 10 polynucleotides of the sequence of SEQ ID NO:X are directly contiguous. Nucleic acids which hybridize to the complement of these 20 contiguous polynucleotides under stringent hybridization conditions or alternatively, under lower stringency conditions, are also encompassed by the invention. Polypeptides encoded by these polynucleotides and/or nucleic acids, other polynucleotides and/or nucleic acids that encode these polypeptides, and antibodies that bind these polypeptides are also encompassed by the invention. Additionally, fragments and variants of the above-described polynucleotides, nucleic acids, and polypeptides are also encompassed by the invention.

[0156] In additional specific embodiments, polynucleotides of the invention comprise, or alternatively consist of a polynucleotide sequence in which the 3′ 10 polynucleotides of one of the sequences delineated in column 6 of Table 1B and the 5′ 10 polynucleotides of a fragment or variant of the sequence of SEQ ID NO:X (e.g., as described herein) are directly contiguous Nucleic acids which hybridize to the complement of these 20 contiguous polynucleotides under stringent hybridization conditions or alternatively, under lower stringency conditions, are also encompassed by the invention. Polypeptides encoded by these polynucleotides and/or nucleic acids, other polynucleotides and/or nucleic acids encoding these polypeptides, and antibodies that bind these polypeptides are also encompassed by the invention. Additionally, fragments and variants of the above-described polynucleotides, nucleic acids, and polypeptides are also encompassed by the invention.

[0157] In further specific embodiments, polynucleotides of the invention comprise, or alternatively consist of a polynucleotide sequence in which the 3′ 10 polynucleotides of a fragment or variant of the sequence of SEQ ID NO:X and the 5′ 10 polynucleotides of the sequence of one of the sequences delineated in column 6 of Table 1B are directly contiguous. Nucleic acids which hybridize to the complement of these 20 contiguous polynucleotides under stringent hybridization conditions or alternatively, under lower stringency conditions, are also encompassed by the invention. Polypeptides encoded by these polynucleotides and/or nucleic acids, other polynucleotides and/or nucleic acids encoding these polypeptides, and antibodies that bind these polypeptides are also encompassed by the invention. Additionally, fragments and variants of the above-described polynucleotides, nucleic acids, and polypeptides are also encompassed by the invention.

[0158] In specific embodiments, polynucleotides of the invention comprise, or alternatively consist of a polynucleotide sequence in which the 3′ 10 polynucleotides of one of the sequences delineated in column 6 of Table 1B and the 5′ 10 polynucleotides of another sequence in column 6 are directly contiguous. In preferred embodiments, the 3′ 10 polynucleotides of one of the sequences delineated in column 6 of Table 1B is directly contiguous with the 5′ 10 polynucleotides of the next sequential exon delineated in Table 1B, column 6. Nucleic acids which hybridize to the complement of these 20 contiguous polynucleotides under stringent hybridization conditions or alternatively, under lower stringency conditions, are also encompassed by the invention. Polypeptides encoded by these polynucleotides and/or nucleic acids, other polynucleotides and/or nucleic acids encoding these polypeptides, and antibodies that bind these polypeptides are also encompassed by the invention. Additionally, fragments and variants of the above-described polynucleotides, nucleic acids, and polypeptides are also encompassed by the invention.

[0159] In the present invention, a “polypeptide fragment” refers to an amino acid sequence which is a portion of that contained in SEQ ID NO:Y, a portion of an amino acid sequence encoded by the portion of SEQ ID NO:X as defined in columns 8 and 9 of Table 2, a portion of an amino acid sequence encoded by the polynucleotide sequence of SEQ ID NO:X, a portion of an amino acid sequence encoded by the complement of the polynucleotide sequence in SEQ ID NO:X, and/or a portion of an amino acid sequence encoded by the cDNA contained in Clone ID NO:Z. Protein (polypeptide) fragments may be “free-standing,” or comprised within a larger polypeptide of which the fragment forms a part or region, most preferably as a single continuous region. Representative examples of polypeptide fragments of the invention, include, for example, fragments comprising, or alternatively consisting of, from about amino acid number 1-20, 21-40, 41-60, 61-80, 81-100, 101-120, 121-140, 141-160, 161-180, 181-200, 201-220, 221-240, 241-260, 261-280, 281-300, 301-320, 321-340, 341-360, 361-380, 381-400, 401-420, 421-440, 441-460, 461-480, 481-500, 501-520, 521-540, 541-560, 561-580, 581-600, 601-620, 621-640, 641-660, 661-680, 681-700, 701-720, 721-740, 741-760, 761-780, 781-800, 801-820, 821-840, 841-860, 861-880, 881-900, 901-920, 921-940, 941-960, 961-980, 981-1000, 1001-1020, 1021-1040, 1041-1060, 1061-1080, 1081-1100, 1101-1120, 1121-1140, 1141-1160, 1161-1180, 1181-1200, 1201-1220, 1221-1240, 1241-1260, 1261-1280, 1281-1300, 1301-1320, 1321-1340, 1341-1360, 1361-1380, 1381-1400, 1401-1420, 1421-1440, or 1441 to the end of the coding region of cDNA and SEQ ID NO: Y. In a preferred embodiment, polypeptide fragments of the invention include, for example, fragments comprising, or alternatively consisting of, from about amino acid number 1-20, 21-40, 41-60, 61-80, 81-100, 101-120, 121-140, 141-160, 161-180, 181-200, 201-220, 221-240, 241-260, 261-280, 281-300, 301-320, 321-340, 341-360, 361-380, 381-400, 401-420, 421-440, 441-460, 461-480, 481-500, 501-520, 521-540, 541-560, 561-580, 581-600, 601-620, 621-640, 641-660, 661-680, 681-700, 701-720, 721-740, 741-760, 761-780, 781-800, 801-820, 821-840, 841-860, 861-880, 881-900, 901-920, 921-940, 941-960, 961-980, 981-1000, 1001-1020, 1021-1040, 1041-1060, 1061-1080, 1081-1100, 1101-1120, 1121-1140, 1141-1160, 1161-1180, 1181-1200, 1201-1220, 1221-1240, 1241-1260, 1261-1280, 1281-1300, 1301-1320, 1321-1340, 1341-1360, 1361-1380, 1381-1400, 1401-1420, 1421-1440, or 1441 to the end of the coding region of SEQ ID NO:Y. Moreover, polypeptide fragments of the invention may be at least about 10, 15, 20, 25, 30, 35, 40, 45, 50, 55, 60, 65, 70, 75, 80, 85, 90, 100, 110, 120, 130, 140, or 150 amino acids in length. In this context “about” includes the particularly recited ranges or values, or ranges or values larger or smaller by several (5, 4, 3, 2, or 1) amino acids, at either extreme or at both extremes. Polynucleotides encoding these polypeptide fragments are also encompassed by the invention.

[0160] Even if deletion of one or more amino acids from the N-terminus of a protein results in modification of loss of one or more biological functions of the protein, other functional activities (e.g., biological activities, ability to multimerize, ability to bind a ligand) may still be retained. For example, the ability of shortened muteins to induce and/or bind to antibodies which recognize the complete or mature forms of the polypeptides generally will be retained when less than the majority of the residues of the complete or mature polypeptide are removed from the N-terminus. Whether a particular polypeptide lacking N-terminal residues of a complete polypeptide retains such immunologic activities can readily be determined by routine methods described herein and otherwise known in the art. It is not unlikely that a mutein with a large number of deleted N-terminal amino acid residues may retain some biological or immunogenic activities. In fact, peptides composed of as few as six amino acid residues may often evoke an immune response.

[0161] Accordingly, polypeptide fragments include the secreted protein as well as the mature form. Further preferred polypeptide fragments include the secreted protein or the mature form having a continuous series of deleted residues from the amino or the carboxy terminus, or both. For example, any number of amino acids, ranging from 1-60, can be deleted from the amino terminus of either the secreted polypeptide or the mature form. Similarly, any number of amino acids, ranging from 1-30, can be deleted from the carboxy terminus of the secreted protein or mature form. Furthermore, any combination of the above amino and carboxy terminus deletions are preferred. Similarly, polynucleotides encoding these polypeptide fragments are also preferred.

[0162] The present invention further provides polypeptides having one or more residues deleted from the amino terminus of the amino acid sequence of a polypeptide disclosed herein (e.g., a polypeptide of SEQ ID NO:Y, a polypeptide encoded by the polynucleotide sequence contained in SEQ ID NO:X or the complement thereof, a polypeptide encoded by the portion of SEQ ID NO:X as defined in columns 8 and 9 of Table 2, a polypeptide encoded by the portion of SEQ ID NO:B as defined in column 6 of Table 1B, and/or a polypeptide encoded by the cDNA contained in Clone ID NO:Z). In particular, N-terminal deletions may be described by the general formula m-q, where q is a whole integer representing the total number of amino acid residues in a polypeptide of the invention (e.g., the polypeptide disclosed in SEQ ID NO:Y, or the polypeptide encoded by the portion of SEQ ID NO:X as defined in columns 8 and 9 of Table 2), and m is defined as any integer ranging from 2 to q-6. Polynucleotides encoding these polypeptides are also encompassed by the invention.

[0163] The present invention further provides polypeptides having one or more residues from the carboxy terminus of the amino acid sequence of a polypeptide disclosed herein (e.g., a polypeptide of SEQ ID NO:Y, a polypeptide encoded by the polynucleotide sequence contained in SEQ ID NO:X, a polypeptide encoded by the portion of SEQ ID NO:X as defined in columns 8 and 9 of Table 2, and/or a polypeptide encoded by the cDNA contained in Clone ID NO:Z). In particular, C-terminal deletions may be described by the general formula 1-n, where n is any whole integer ranging from 6 to q-1, and where n corresponds to the position of amino acid residue in a polypeptide of the invention. Polynucleotides encoding these polypeptides are also encompassed by the invention.

[0164] In addition, any of the above described N- or C-terminal deletions can be combined to produce a N- and C-terminal deleted polypeptide. The invention also provides polypeptides having one or more amino acids deleted from both the amino and the carboxyl termini, which may be described generally as having residues m-n of a polypeptide encoded by SEQ ID NO:X (e.g., including, but not limited to, the preferred polypeptide disclosed as SEQ ID NO:Y and the polypeptide encoded by the portion of SEQ ID NO:X as defined in columns 8 and 9 of Table 2), the cDNA contained in Clone ID NO:Z, and/or the complement thereof, where n and m are integers as described above. Polynucleotides encoding these polypeptides are also encompassed by the invention.

[0165] Also as mentioned above, even if deletion of one or more amino acids from the C-terminus of a protein results in modification of loss of one or more biological functions of the protein, other functional activities (e.g., biological activities, ability to multimerize, ability to bind a ligand) may still be retained. For example the ability of the shortened mutein to induce and/or bind to antibodies which recognize the complete or mature forms of the polypeptide generally will be retained when less than the majority of the residues of the complete or mature polypeptide are removed from the C-terminus. Whether a particular polypeptide lacking C-terminal residues of a complete polypeptide retains such immunologic activities can readily be determined by routine methods described herein and otherwise known in the art. It is not unlikely that a mutein with a large number of deleted C-terminal amino acid residues may retain some biological or immunogenic activities. In fact, peptides composed of as few as six amino acid residues may often evoke an immune response.

[0166] The present application is also directed to proteins containing polypeptides at least 80%, 85%, 90%, 95%, 96%, 97%, 98% or 99% identical to a polypeptide sequence set forth herein. In preferred embodiments, the application is directed to proteins containing polypeptides at least 80%, 85%, 90%, 95%, 96%, 97%, 98% or 99% identical to polypeptides having the amino acid sequence of the specific N- and C-terminal deletions. Polynucleotides encoding these polypeptides are also encompassed by the invention.

[0167] Any polypeptide sequence encoded by, for example, the polynucleotide sequences set forth as SEQ ID NO:X or the complement thereof, (presented, for example, in Tables 1A and 2), the cDNA contained in Clone ID NO:Z, or the polynucleotide sequence as defined in column 6 of Table 1B, may be analyzed to determine certain preferred regions of the polypeptide. For example, the amino acid sequence of a polypeptide encoded by a polynucleotide sequence of SEQ ID NO:X (e.g., the polypeptide of SEQ ID NO:Y and the polypeptide encoded by the portion of SEQ ID NO:X as defined in columns 8 and 9 of Table 2) or the cDNA contained in Clone ID NO:Z may be analyzed using the default parameters of the DNASTAR computer algorithm (DNASTAR, Inc., 1228 S. Park St., Madison, Wis. 53715 USA; http://www.dnastar.com/).

[0168] Polypeptide regions that may be routinely obtained using the DNASTAR computer algorithm include, but are not limited to, Gamier-Robson alpha-regions, beta-regions, turn-regions, and coil-regions; Chou-Fasman alpha-regions, beta-regions, and turn-regions; Kyte-Doolittle hydrophilic regions and hydrophobic regions; Eisenberg alpha- and beta-amphipathic regions; Karplus-Schulz flexible regions; Emini surface-forming regions; and Jameson-Wolf regions of high antigenic index. Among highly preferred polynucleotides of the invention in this regard are those that encode polypeptides comprising regions that combine several structural features, such as several (e.g., 1, 2, 3 or 4) of the features set out above.

[0169] Additionally, Kyte-Doolittle hydrophilic regions and hydrophobic regions, Emini surface-forming regions, and Jameson-Wolf regions of high antigenic index (i.e., containing four or more contiguous amino acids having an antigenic index of greater than or equal to 1.5, as identified using the default parameters of the Jameson-Wolf program) can routinely be used to determine polypeptide regions that exhibit a high degree of potential for antigenicity. Regions of high antigenicity are determined from data by DNASTAR analysis by choosing values which represent regions of the polypeptide which are likely to be exposed on the surface of the polypeptide in an environment in which antigen recognition may occur in the process of initiation of an immune response.

[0170] Preferred polypeptide fragments of the invention are fragments comprising, or alternatively, consisting of, an amino acid sequence that displays a functional activity (e.g. biological activity) of the polypeptide sequence of which the amino acid sequence is a fragment. By a polypeptide displaying a “functional activity” is meant a polypeptide capable of one or more known functional activities associated with a full-length protein, such as, for example, biological activity, antigenicity, immunogenicity, and/or multimerization, as described herein.

[0171] Other preferred polypeptide fragments are biologically active fragments. Biologically active fragments are those exhibiting activity similar, but not necessarily identical, to an activity of the polypeptide of the present invention. The biological activity of the fragments may include an improved desired activity, or a decreased undesirable activity.

[0172] In preferred embodiments, polypeptides of the invention comprise, or alternatively consist of, one, two, three, four, five or more of the antigenic fragments of the polypeptide of SEQ ID NO:Y, or portions thereof. Polynucleotides encoding these polypeptides are also encompassed by the invention.

[0173] The present invention encompasses polypeptides comprising, or alternatively consisting of, an epitope of: the polypeptide sequence shown in SEQ ID NO:Y; a polypeptide sequence encoded by SEQ ID NO:X or the complementary strand thereto; the polypeptide sequence encoded by the portion of SEQ ID NO:X as defined in columns 8 and 9 of Table 2; the polypeptide sequence encoded by the portion of SEQ ID NO:B as defined in column 6 of Table 1B or the complement thereto; the polypeptide sequence encoded by the cDNA contained in Clone ID NO:Z; or the polypeptide sequence encoded by a polynucleotide that hybridizes to the sequence of SEQ ID NO:X, the complement of the sequence of SEQ ID NO:X, the complement of a portion of SEQ ID NO:X as defined in columns 8 and 9 of Table 2, or the cDNA sequence contained in Clone ID NO:Z under stringent hybridization conditions or alternatively, under lower stringency hybridization as defined supra. The present invention further encompasses polynucleotide sequences encoding an epitope of a polypeptide sequence of the invention (such as, for example, the sequence disclosed in SEQ ID NO:X, or a fragment thereof), polynucleotide sequences of the complementary strand of a polynucleotide sequence encoding an epitope of the invention, and polynucleotide sequences which hybridize to the complementary strand under stringent hybridization conditions or alternatively, under lower stringency hybridization conditions defined supra.

[0174] The term “epitopes,” as used herein, refers to portions of a polypeptide having antigenic or immunogenic activity in an animal, preferably a mammal, and most preferably in a human. In a preferred embodiment, the present invention encompasses a polypeptide comprising an epitope, as well as the polynucleotide encoding this polypeptide. An “immunogenic epitope,” as used herein, is defined as a portion of a protein that elicits an antibody response in an animal, as determined by any method known in the art, for example, by the methods for generating antibodies described infra. (See, for example, Geysen et al., Proc. Natl. Acad. Sci. USA 81:3998-4002 (1983)). The term “antigenic epitope,” as used herein, is defined as a portion of a protein to which an antibody can immunospecifically bind its antigen as determined by any method well known in the art, for example, by the immunoassays described herein. Immunospecific binding excludes non-specific binding but does not necessarily exclude cross-reactivity with other antigens. Antigenic epitopes need not necessarily be immunogenic.

[0175] Fragments which function as epitopes may be produced by any conventional means. (See, e.g., Houghten, R. A., Proc. Natl. Acad. Sci. USA 82:5131-5135 (1985) further described in U.S. Pat. No. 4,631,211.)

[0176] In the present invention, antigenic epitopes preferably contain a sequence of at least 4, at least 5, at least 6, at least 7, more preferably at least 8, at least 9, at least 10, at 11, at least 12, at least 13, at least 14, at least 15, at least 20, at least 25, at least 30, 40, at least 50, and, most preferably, between about 15 to about 30 amino acids. Preferred polypeptides comprising-immunogenic or antigenic epitopes are at least 10, 15, 20, 25, 30, 35, 40, 45, 50, 55, 60, 65, 70, 75, 80, 85, 90, 95, or 100 amino acid residues in length. Additional non-exclusive preferred antigenic epitopes include the antigenic epitopes disclosed herein, as well as portions thereof. Antigenic epitopes are useful, for example, to raise antibodies, including monoclonal antibodies, that specifically bind the epitope. Preferred antigenic epitopes include the antigenic epitopes disclosed herein, as well as any combination of two, three, four, five or more of these antigenic epitopes. Antigenic epitopes can be used as the target molecules in immunoassays. (See, for instance, Wilson et al., Cell 37:767-778 (1984); Sutcliffe et al., Science 219:660-666 (1983)).

[0177] Non-limiting examples of epitopes of polypeptides that can be used to generate antibodies of the invention include a polypeptide comprising, or alternatively consisting of, at least one, two, three, four, five, six or more of the portion(s) of SEQ ID NO:Y specified in column 7 of Table 1A. These polypeptide fragments have been determined to bear antigenic epitopes of the proteins of the invention by the analysis of the Jameson-Wolf antigenic index which is included in the DNAStar suite of computer programs. By “comprise” it is intended that a polypeptide contains at least one, two, three, four, five, six or more of the portion(s) of SEQ ID NO:Y shown in column 7 of Table 1A, but it may contain additional flanking residues on either the amino or carboxyl termini of the recited portion. Such additional flanking sequences are preferably sequences naturally found adjacent to the portion; i.e., contiguous sequence shown in SEQ ID NO:Y. The flanking sequence may, however, be sequences from a heterolgous polypeptide, such as from another protein described herein or from a heterologous polypeptide not described herein. In particular embodiments, epitope portions of a polypeptide of the invention comprise one, two, three, or more of the portions of SEQ ID NO:Y shown in column 7 of Table 1A.

[0178] Similarly, immunogenic epitopes can be used, for example, to induce antibodies according to methods well known in the art. See, for instance, Sutcliffe et al., supra; Wilson et al., supra; Chow et al., Proc. Natl. Acad. Sci. USA 82:910-914; and Bittle et al., J. Gen. Virol. 66:2347-2354 (1985). Preferred immunogenic epitopes include the immunogenic epitopes disclosed herein, as well as any combination of two, three, four, five or more of these immunogenic epitopes. The polypeptides comprising one or more immunogenic epitopes may be presented for eliciting an antibody response together with a carrier protein, such as an albumin, to an animal system (such as rabbit or mouse), or, if the polypeptide is of sufficient length (at least about 25 amino acids), the polypeptide may be presented without a carrier. However, immunogenic epitopes comprising as few as 8 to 10 amino acids have been shown to be sufficient to raise antibodies capable of binding to, at the very least, linear epitopes in a denatured polypeptide (e.g., in Western blotting).

[0179] Epitope-bearing polypeptides of the present invention may be used to induce antibodies according to methods well known in the art including, but not limited to, in vivo immunization, in vitro immunization, and phage display methods. See, e.g., Sutcliffe et al., supra; Wilson et al., supra, and Bittle et al., J. Gen. Virol., 66:2347-2354 (1985). If in vivo immunization is used, animals may be immunized with free peptide; however, anti-peptide antibody titer may be boosted by coupling the peptide to a macromolecular carrier, such as keyhole limpet hemacyanin (KLH) or tetanus toxoid. For instance, peptides containing cysteine residues may be coupled to a carrier using a linker such as maleimidobenzoyl- N-hydroxysuccinimide ester (MBS), while other peptides may be coupled to carriers using a more general linking agent such as glutaraldehyde. Animals such as rabbits, rats and mice are immunized with either free or carrier- coupled peptides, for instance, by intraperitoneal and/or intradermal injection of emulsions containing about 100 μg of peptide or carrier protein and Freund's adjuvant or any other adjuvant known for stimulating an immune response. Several booster injections may be needed, for instance, at intervals of about two weeks, to provide a useful titer of anti-peptide antibody which can be detected, for example, by ELISA assay using free peptide adsorbed to a solid surface. The titer of anti-peptide antibodies in serum from an immunized animal may be increased by selection of anti-peptide antibodies, for instance, by adsorption to the peptide on a solid support and elution of the selected antibodies according to methods well known in the art.

[0180] As one of skill in the art will appreciate, and as discussed above, the polypeptides of the present invention (e.g., those comprising an immunogenic or antigenic epitope) can be fused to heterologous polypeptide sequences. For example, polypeptides of the present invention (including fragments or variants thereof), may be fused with the constant domain of immunoglobulins (IgA, IgE, IgG, IgM), or portions thereof (CH1, CH2, CH3, or any combination thereof and portions thereof, resulting in chimeric polypeptides. By way of another non-limiting example, polypeptides and/or antibodies of the present invention (including fragments or variants thereof) may be fused with albumin (including but not limited to recombinant human serum albumin or fragments or variants thereof (see, e.g., U.S. Pat. No. 5,876,969, issued Mar. 2, 1999, EP Patent 0 413 622, and U.S. Pat. No. 5,766,883, issued Jun. 16, 1998, herein incorporated by reference in their entirety)). In a preferred embodiment, polypeptides and/or antibodies of the present invention (including fragments or variants thereof) are fused with the mature form of human serum albumin (i.e., amino acids 1-585 of human serum albumin as shown in FIGS. 1 and 2 of EP Patent 0 322 094) which is herein incorporated by reference in its entirety. In another preferred embodiment, polypeptides and/or antibodies of the present invention (including fragments or variants thereof) are fused with polypeptide fragments comprising, or alternatively consisting of, amino acid residues 1-z of human serum albumin, where z is an integer from 369 to 419, as described in U.S. Pat. No. 5,766,883 herein incorporated by reference in its entirety. Polypeptides and/or antibodies of the present invention (including fragments or variants thereof) may be fused to either the N- or C-terminal end of the heterologous protein (e.g., immunoglobulin Fc polypeptide or human serum albumin polypeptide). Polynucleotides encoding fusion proteins of the invention are also encompassed by the invention.

[0181] Such fusion proteins as those described above may facilitate purification and may increase half-life in vivo. This has been shown for chimeric proteins consisting of the first two domains of the human CD4-polypeptide and various domains of the constant regions of the heavy or light chains of mammalian immunoglobulins. See, e.g., EP 394,827; Traunecker et al., Nature, 331:84-86 (1988). Enhanced delivery of an antigen across the epithelial barrier to the immune system has been demonstrated for antigens (e.g., insulin) conjugated to an FcRn binding partner such as IgG or Fc fragments (see, e.g., PCT Publications WO 96/22024 and WO 99/04813). IgG fusion proteins that have a disulfide-linked dimeric structure due to the IgG portion desulfide bonds have also been found to be more efficient in binding and neutralizing other molecules than monomeric polypeptides or fragments thereof alone. See, e.g., Fountoulakis et al., J. Biochem., 270:3958-3964 (1995). Nucleic acids encoding the above epitopes can also be recombined with a gene of interest as an epitope tag (e.g., the hemagglutinin (HA) tag or flag tag) to aid in detection and purification of the expressed polypeptide. For example, a system described by Janknecht et al. allows for the ready purification of non-denatured fusion proteins expressed in human cell lines (Janknecht et al., 1991, Proc. Natl. Acad. Sci. USA 88:8972-897). In this system, the gene of interest is subcloned into a vaccinia recombination plasmid such that the open reading frame of the gene is translationally fused to an amino-terminal tag consisting of six histidine residues. The tag serves as a matrix binding domain for the fusion protein. Extracts from cells infected with the recombinant vaccinia virus are loaded onto Ni2+ nitriloacetic acid-agarose column and histidine-tagged proteins can be selectively eluted with imidazole-containing buffers.

[0182] Fusion Proteins

[0183] Any polypeptide of the present invention can be used to generate fusion proteins. For example, the polypeptide of the present invention, when fused to a second protein, can be used as an antigenic tag. Antibodies raised against the polypeptide of the present invention can be used to indirectly detect the second protein by binding to the polypeptide. Moreover, because secreted proteins target cellular locations based on trafficking signals, polypeptides of the present invention which are shown to be secreted can be used as targeting molecules once fused to other proteins.

[0184] Examples of domains that can be fused to polypeptides of the present invention include not only heterologous signal sequences, but also other heterologous functional regions. The fusion does not necessarily need to be direct, but may occur through linker sequences.

[0185] In certain preferred embodiments, proteins of the invention are fusion proteins comprising an amino acid sequence that is an N and/or C-terminal deletion of a polypeptide of the invention. In preferred embodiments, the invention is directed to a fusion protein comprising an amino acid sequence that is at least 90%, 95%, 96%, 97%, 98% or 99% identical to a polypeptide sequence of the invention. Polynucleotides encoding these proteins are also encompassed by the invention.

[0186] Moreover, fusion proteins may also be engineered to improve characteristics of the polypeptide of the present invention. For instance, a region of additional amino acids, particularly charged amino acids, may be added to the N-terminus of the polypeptide to improve stability and persistence during purification from the host cell or subsequent handling and storage. Also, peptide moieties may be added to the polypeptide to facilitate purification. Such regions may be removed prior to final preparation of the polypeptide. The addition of peptide moieties to facilitate handling of polypeptides are familiar and routine techniques in the art.

[0187] As one of skill in the art will appreciate that, as discussed above, polypeptides of the present invention, and epitope-bearing fragments thereof, can be combined with heterologous polypeptide sequences. For example, the polypeptides of the present invention may be fused with heterologous polypeptide sequences, for example, the polypeptides of the present invention may be fused with the constant domain of immunoglobulins (IgA, IgE, IgG, IgM) or portions thereof (CH1, CH2, CH3, and any combination thereof, including both entire domains and portions thereof), or albumin (including, but not limited to, native or recombinant human albumin or fragments or variants thereof (see, e.g., U.S. Pat. No. 5,876,969, issued Mar. 2, 1999, EP Patent 0 413 622, and U.S. Pat. No. 5,766,883, issued Jun. 16, 1998, herein incorporated by reference in their entirety)), resulting in chimeric polypeptides. For example, EP-A-O 464 533 (Canadian counterpart 2045869) discloses fusion proteins comprising various portions of constant region of immunoglobulin molecules together with another human protein or part thereof. In many cases, the Fc part in a fusion protein is beneficial in therapy and diagnosis, and thus can result in, for example, improved pharmacokinetic properties (EP-A 0232 262). Alternatively, deleting the Fc part after the fusion protein has been expressed, detected, and purified, would be desired. For example, the Fc portion may hinder therapy and diagnosis if the fusion protein is used as an antigen for immunizations. In drug discovery, for example, human proteins, such as hIL-5, have been fused with Fc portions for the purpose of high-throughput screening assays to identify antagonists of hIL-5. See, D. Bennett et al., J. Molecular Recognition 8:52-58 (1995); K. Johanson et al., J. Biol. Chem. 270:9459-9471 (1995).

[0188] Moreover, the polypeptides of the present invention can be fused to marker sequences, such as a polypeptide which facilitates purification of the fused polypeptide. In preferred embodiments, the marker amino acid sequence is a hexa-histidine peptide, such as the tag provided in a pQE vector (QIAGEN, Inc., 9259 Eton Avenue, Chatsworth, Calif., 91311), among others, many of which are commercially available. As described in Gentz et al., Proc. Natl. Acad. Sci. USA 86:821-824 (1989), for instance, hexa-histidine provides for convenient purification of the fusion protein. Another peptide tag useful for purification, the “HA” tag, corresponds to an epitope derived from the influenza hemagglutinin protein (Wilson et al., Cell 37:767 (1984)).

[0189] Additional fusion proteins of the invention may be generated through the techniques of gene-shuffling, motif-shuffling, exon-shuffling, and/or codon-shuffling (collectively referred to as “DNA shuffling”). DNA shuffling may be employed to modulate the activities of polypeptides of the invention, such methods can be used to generate polypeptides with altered activity, as well as agonists and antagonists of the polypeptides. See, generally, U.S. Pat. Nos. 5,605,793; 5,811,238; 5,830,721; 5,834,252; and 5,837,458, and Patten et al., Curr. Opinion Biotechnol. 8:724-33 (1997); Harayama, Trends Biotechnol. 16(2):76-82 (1998); Hansson, et al., J. Mol. Biol. 287:265-76 (1999); and Lorenzo and Blasco, Biotechniques 24(2):308-13 (1998) (each of these patents and publications are hereby incorporated by reference in its entirety). In one embodiment, alteration of polynucleotides corresponding to SEQ ID NO:X and the polypeptides encoded by these polynucleotides may be achieved by DNA shuffling. DNA shuffling involves the assembly of two or more DNA segments by homologous or site-specific recombination to generate variation in the polynucleotide sequence. In another embodiment, polynucleotides of the invention, or the encoded polypeptides, may be altered by being subjected to random mutagenesis by error-prone PCR, random nucleotide insertion or other methods prior to recombination. In another embodiment, one or more components, motifs, sections, parts, domains, fragments, etc., of a polynucleotide encoding a polypeptide of the invention may be recombined with one or more components, motifs, sections, parts, domains, fragments, etc. of one or more heterologous molecules.

[0190] Thus, any of these above fusions can be engineered using the polynucleotides or the polypeptides of the present invention.

[0191] Recombinant and Synthetic Production of Polypeptides of the Invention

[0192] The present invention also relates to vectors containing the polynucleotide of the present invention, host cells, and the production of polypeptides by synthetic and recombinant techniques. The vector may be, for example, a phage, plasmid, viral, or retroviral vector. Retroviral vectors may be replication competent or replication defective. In the latter case, viral propagation generally will occur only in complementing host cells.

[0193] The polynucleotides of the invention may be joined to a vector containing a selectable marker for propagation in a host. Generally, a plasmid vector is introduced in a precipitate, such as a calcium phosphate precipitate, or in a complex with a charged lipid. If the vector is a virus, it may be packaged in vitro using an appropriate packaging cell line and then transduced into host cells.

[0194] The polynucleotide insert should be operatively linked to an appropriate promoter, such as the phage lambda PL promoter, the E. coli lac, trp, phoA and tac promoters, the SV40 early and late promoters and promoters of retroviral LTRs, to name a few. Other suitable promoters will be known to the skilled artisan. The expression constructs will further contain sites for transcription initiation, termination, and, in the transcribed region, a ribosome binding site for translation. The coding portion of the transcripts expressed by the constructs will preferably include a translation initiating codon at the beginning and a termination codon (UAA, UGA or UAG) appropriately positioned at the end of the polypeptide to be translated.

[0195] As indicated, the expression vectors will preferably include at least one selectable marker. Such markers include dihydrofolate reductase, G418, glutamine synthase, or neomycin resistance for eukaryotic cell culture, and tetracycline, kanamycin or ampicillin resistance genes for culturing in E. coli and other bacteria. Representative examples of appropriate hosts include, but are not limited to, bacterial cells, such as E. coli, Streptomyces and Salmonella typhimurium cells; fungal cells, such as yeast cells (e.g., Saccharomyces cerevisiae or Pichia pastoris (ATCC Accession No. 201178)); insect cells such as Drosophila S2 and Spodoptera Sf9 cells; animal cells such as CHO, COS, 293, and Bowes melanoma cells; and plant cells. Appropriate culture mediums and conditions for the above-described host cells are known in the art.

[0196] Among vectors preferred for use in bacteria include pQE70, pQE60 and pQE-9, available from QIAGEN, Inc.; pBluescript vectors, Phagescript vectors, pNH8A, pNH16a, pNH18A, pNH46A, available from Stratagene Cloning Systems, Inc.; and ptrc99a, pKK223-3, pKK233-3, pDR540, pRIT5 available from Pharmacia Biotech, Inc. Among preferred eukaryotic vectors are pWLNEO, pSV2CAT, pOG44, pXT1 and pSG available from Stratagene; and pSVK3, pBPV, pMSG and pSVL available from Pharmacia. Preferred expression vectors for use in yeast systems include, but are not limited to pYES2, pYD1, pTEF1/Zeo, pYES2/GS, pPICZ, pGAPZ, pGAPZalph, pPIC9, pPIC3.5, pHIL-D2, pHIL-S1, pPIC3.5K, pPIC9K, and PAO815 (all available from Invitrogen, Carlbad, Calif.). Other suitable vectors will be readily apparent to the skilled artisan.

[0197] Vectors which use glutamine synthase (GS) or DHFR as the selectable markers can be amplified in the presence of the drugs methionine sulphoximine or methotrexate, respectively. An advantage of glutamine synthase based vectors are the availabilty of cell lines (e.g., the murine myeloma cell line, NS0) which are glutamine synthase negative. Glutamine synthase expression systems can also function in glutamine synthase expressing cells (e.g., Chinese Hamster Ovary (CHO) cells) by providing additional inhibitor to prevent the functioning of the endogenous gene. A glutamine synthase expression system and components thereof are detailed in PCT publications: WO87/04462; WO86/05807; WO89/01036; WO89/10404- and WO91/06657, which are hereby incorporated in their entireties by reference herein. Additionally, glutamine synthase expression vectors can be obtained from Lonza Biologics, Inc. (Portsmouth, N.H.). Expression and production of monoclonal antibodies using a GS expression system in murine myeloma cells is described in Bebbington et al., Bio/technology 10:169(1992) and in Biblia and Robinson Biotechnol. Prog. 11:1 (1995) which are herein incorporated by reference.

[0198] The present invention also relates to host cells containing the above-described vector constructs described herein, and additionally encompasses host cells containing nucleotide sequences of the invention that are operably associated with one or more heterologous control regions (e.g., promoter and/or enhancer) using techniques known of in the art. The host cell can be a higher eukaryotic cell, such as a mammalian cell (e.g., a human derived cell), or a lower eukaryotic cell, such as a yeast cell, or the host cell can be a prokaryotic cell, such as a bacterial cell. A host strain may be chosen which modulates the expression of the inserted gene sequences, or modifies and processes the gene product in the specific fashion desired. Expression from certain promoters can be elevated in the presence of certain inducers; thus expression of the genetically engineered polypeptide may be controlled. Furthermore, different host cells have characteristics and specific mechanisms for the translational and post-translational processing and modification (e.g., phosphorylation, cleavage) of proteins. Appropriate cell lines can be chosen to ensure the desired modifications and processing of the foreign protein expressed.

[0199] Introduction of the nucleic acids and nucleic acid constructs of the invention into the host cell can be effected by calcium phosphate transfection, DEAE-dextran mediated transfection, cationic lipid-mediated transfection, electroporation, transduction, infection, or other methods. Such methods are described in many standard laboratory manuals, such as Davis et al., Basic Methods In Molecular Biology (1986). It is specifically contemplated that the polypeptides of the present invention may in fact be expressed by a host cell lacking a recombinant vector.

[0200] In addition to encompassing host cells containing the vector constructs discussed herein, the invention also encompasses primary, secondary, and immortalized host cells of vertebrate origin, particularly mammalian origin, that have been engineered to delete or replace endogenous genetic material (e.g., the coding sequence), and/or to include genetic material (e.g., heterologous polynucleotide sequences) that is operably associated with polynucleotides of the invention, and which activates, alters, and/or amplifies endogenous polynucleotides. For example, techniques known in the art may be used to operably associate heterologous control regions (e.g., promoter and/or enhancer) and endogenous polynucleotide sequences via homologous recombination (see, e.g., U.S. Pat. No. 5,641,670, issued Jun. 24, 1997; International Publication Number WO 96/29411; International Publication Number WO 94/12650; Koller et al., Proc. Natl. Acad. Sci. USA 86:8932-8935 (1989); and Zijlstra et al., Nature 342:435-438 (1989), the disclosures of each of which are incorporated by reference in their entireties).

[0201] Polypeptides of the invention can be recovered and purified from recombinant cell cultures by well-known methods including ammonium sulfate or ethanol precipitation, acid extraction, anion or cation exchange chromatography, phosphocellulose chromatography, hydrophobic interaction chromatography, affinity chromatography, hydroxylapatite chromatography and lectin chromatography. Most preferably, high performance liquid chromatography (“HPLC”) is employed for purification.

[0202] Polypeptides of the present invention can also be recovered from: products purified from natural sources, including bodily fluids, tissues and cells, whether directly isolated or cultured; products of chemical synthetic procedures; and products produced by recombinant techniques from a prokaryotic or eukaryotic host, including, for example, bacterial, yeast, higher plant, insect, and mammalian cells. Depending upon the host employed in a recombinant production procedure, the polypeptides of the present invention may be glycosylated or may be non-glycosylated. In addition, polypeptides of the invention may also include an initial modified methionine residue, in some cases as a result of host-mediated processes. Thus, it is well known in the art that the N-terminal methionine encoded by the translation initiation codon generally is removed with high efficiency from any protein after translation in all eukaryotic cells. While the N-terminal methionine on most proteins also is efficiently removed in most prokaryotes, for some proteins, this prokaryotic removal process is inefficient, depending on the nature of the amino acid to which the N-terminal methionine is covalently linked.

[0203] In one embodiment, the yeast Pichia pastoris is used to express polypeptides of the invention in a eukaryotic system. Pichia pastoris is a methylotrophic yeast which can metabolize methanol as its sole carbon source. A main step in the methanol metabolization pathway is the oxidation of methanol to formaldehyde using O₂. This reaction is catalyzed by the enzyme alcohol oxidase. In order to metabolize methanol as its sole carbon source, Pichia pastoris must generate high levels of alcohol oxidase due, in part, to the relatively low affinity of alcohol oxidase for O₂ Consequently, in a growth medium depending on methanol as a main carbon source, the promoter region of one of the two alcohol oxidase genes (AOX1) is highly active. In the presence of methanol, alcohol oxidase produced from the AOX1 gene comprises up to approximately 30% of the total soluble protein in Pichia pastoris. See Ellis, S. B., et al., Mol. Cell. Biol. 5:1111-21 (1985); Koutz, P. J, et al., Yeast 5:167-77 (1989); Tschopp, J. F., et al., Nucl. Acids Res. 15:3859-76 (1987). Thus, a heterologous coding sequence, such as, for example, a polynucleotide of the present invention, under the transcriptional regulation of all or part of the AOX1 regulatory sequence is expressed at exceptionally high levels in Pichia yeast grown in the presence of methanol.

[0204] In one example, the plasmid vector pPIC9K is used to express DNA encoding a polypeptide of the invention, as set forth herein, in a Pichea yeast system essentially as described in “Pichia Protocols: Methods in Molecular Biology,” D. R. Higgins and J. Cregg, eds. The Humana Press, Totowa, N.J., 1998. This expression vector allows expression and secretion of a polypeptide of the invention by virtue of the strong AOX1 promoter linked to the Pichia pastoris alkaline phosphatase (PHO) secretory signal peptide (i.e., leader) located upstream of a multiple cloning site.

[0205] Many other yeast vectors could be used in place of pPIC9K, such as, pYES2, pYD1, pTEF1/Zeo, pYES2/GS, pPICZ, pGAPZ, pGAPZalpha, pPIC9, pPIC3.5, pHIL-D2, pHIL-S1, pPIC3.5K, and PAO815, as one skilled in the art would readily appreciate, as long as the proposed expression construct provides appropriately located signals for transcription, translation, secretion (if desired), and the like, including an in-frame AUG as required.

[0206] In another embodiment, high-level expression of a heterologous coding sequence, such as, for example, a polynucleotide of the present invention, may be achieved by cloning the heterologous polynucleotide of the invention into an expression vector such as, for example, pGAPZ or pGAPZalpha, and growing the yeast culture in the absence of methanol.

[0207] In addition to encompassing host cells containing the vector constructs discussed herein, the invention also encompasses primary, secondary, and immortalized host cells of vertebrate origin, particularly mammalian origin, that have been engineered to delete or replace endogenous genetic material (e.g., coding sequence), and/or to include genetic material (e.g., heterologous polynucleotide sequences) that is operably associated with polynucleotides of the invention, and which activates, alters, and/or amplifies endogenous polynucleotides. For example, techniques known in the art may be used to operably associate heterologous control regions (e.g., promoter and/or enhancer) and endogenous polynucleotide sequences via homologous recombination (see, e.g., U.S. Pat. No. 5,641,670, issued Jun. 24, 1997; International Publication No. WO 96/29411, published Sep. 26, 1996; International Publication No. WO 94/12650, published Aug. 4, 1994; Koller et al., Proc. Natl. Acad. Sci. USA 86:8932-8935 (1989); and Zijlstra et al., Nature 342:435-438 (1989), the disclosures of each of which are incorporated by reference in their entireties).

[0208] In addition, polypeptides of the invention can be chemically synthesized using techniques known in the art (e.g., see Creighton, 1983, Proteins: Structures and Molecular Principles, W. H. Freeman & Co., N.Y., and Hunkapiller et al., Nature, 310:105-111 (1984)). For example, a polypeptide corresponding to a fragment of a polypeptide can be synthesized by use of a peptide synthesizer. Furthermore, if desired, nonclassical amino acids or chemical amino acid analogs can be introduced as a substitution or addition into the polypeptide sequence. Non-classical amino acids include, but are not limited to, to the D-isomers of the common amino acids, 2,4-diaminobutyric acid, a-amino isobutyric acid, 4-aminobutyric acid, Abu, 2-amino butyric acid, g-Abu, e-Ahx, 6-amino hexanoic acid, Aib, 2-amino isobutyric acid, 3-amino propionic acid, ornithine, norleucine, norvaline, hydroxyproline, sarcosine, citrulline, homocitrulline, cysteic acid, t-butylglycine, t-butylalanine, phenylglycine, cyclohexylalanine, b-alanine, fluoro-amino acids, designer amino acids such as b-methyl amino acids, Ca-methyl amino acids, Na-methyl amino acids, and amino acid analogs in general. Furthermore, the amino acid can be D (dextrorotary) or L (levorotary).

[0209] The invention encompasses polypeptides of the present invention which are differentially modified during or after translation, e.g., by glycosylation, acetylation, phosphorylation, amidation, derivatization by known protecting/blocking groups, proteolytic cleavage, linkage to an antibody molecule or other cellular ligand, etc. Any of numerous chemical modifications may be carried out by known techniques, including but not limited, to specific chemical cleavage by cyanogen bromide, trypsin, chymotrypsin, papain, V8 protease, NaBH₄; acetylation, formylation, oxidation, reduction; metabolic synthesis in the presence of tunicamycin; etc.

[0210] Additional post-translational modifications encompassed by the invention include, for example, e.g., N-linked or O-linked carbohydrate chains, processing of N-terminal or C-terminal ends), attachment of chemical moieties to the amino acid backbone, chemical modifications of N-linked or O-linked carbohydrate chains, and addition or deletion of an N-terminal methionine residue as a result of procaryotic host cell expression. The polypeptides may also be modified with a detectable label, such as an enzymatic, fluorescent, isotopic or affinity label to allow for detection and isolation of the protein.

[0211] Examples of suitable enzymes include horseradish peroxidase, alkaline phosphatase, beta-galactosidase, or acetylcholinesterase; examples of suitable prosthetic group complexes include streptavidin/biotin and avidin/biotin; examples of suitable fluorescent materials include umbelliferone, fluorescein, fluorescein isothiocyanate, rhodamine, dichlorotriazinylamine fluorescein, dansyl chloride or phycoerythrin; an example of a luminescent material includes luminol; examples of bioluminescent materials include luciferase, luciferin, and aequorin; and examples of suitable radioactive material include iodine (¹²¹I, ¹²³I, ¹²⁵I, ¹³¹I), carbon (¹⁴C), sulfur (³⁵S), tritium (³H), indium (¹¹¹In, ¹¹²In, ^{113m}In, ^{115m}In), technetium (⁹⁹Tc,^{99m}Tc), thallium (²⁰¹Ti), gallium (⁶⁸Ga, ⁶⁷Ga), palladium (¹⁰³Pd) molybdenum (⁹⁹Mo), xenon (¹³³Xe), fluorine (¹⁸F), ¹⁵³Sm, ¹⁷⁷Lu, ¹⁵⁹Gd, ¹⁴⁹Pm, ¹⁴⁰La, ¹⁷⁵Yb, ¹⁶⁶Ho, ⁹⁰Y, ⁴⁷Sc, ¹⁸⁶Re, ¹⁸⁸Re, ¹⁴²Pr, ¹⁰⁵Rh, and ⁹⁷Ru.

[0212] In specific embodiments, a polypeptide of the present invention or fragment or variant thereof is attached to macrocyclic chelators that associate with radiometal ions, including but not limited to, ¹⁷⁷Lu, ⁹⁰Y, ¹⁶⁶Ho, and ¹⁵³Sm, to polypeptides. In a preferred embodiment, the radiometal ion associated with the macrocyclic chelators is ¹¹¹In. In another preferred embodiment, the radiometal ion associated with the macrocyclic chelator is ⁹⁰Y. In specific embodiments, the macrocyclic chelator is 1,4,7,10-tetraazacyclododecane-N,N′,N″,N′″-tetraacetic acid (DOTA). In other specific embodiments, DOTA is attached to an antibody of the invention or fragment thereof via a linker molecule. Examples of linker molecules useful for conjugating DOTA to a polypeptide are commonly known in the art—see, for example, DeNardo et al., Clin Cancer Res. 4(10):2483-90 (1998); Peterson et al., Bioconjug. Chem. 10(4):553-7 (1999); and Zimmerman et al, Nucl. Med. Biol. 26(8):943-50 (1999); which are hereby incorporated by reference in their entirety.

[0213] As mentioned, the proteins of the invention may be modified by either natural processes, such as posttranslational processing, or by chemical modification techniques which are well known in the art. It will be appreciated that the same type of modification may be present in the same or varying degrees at several sites in a given polypeptide. Polypeptides of the invention may be branched, for example, as a result of ubiquitination, and they may be cyclic, with or without branching. Cyclic, branched, and branched cyclic polypeptides may result from posttranslation natural processes or may be made by synthetic methods. Modifications include acetylation, acylation, ADP-ribosylation, amidation, covalent attachment of flavin, covalent attachment of a heme moiety, covalent attachment of a nucleotide or nucleotide derivative, covalent attachment of a lipid or lipid derivative, covalent attachment of phosphotidylinositol, cross-linking, cyclization, disulfide bond formation, demethylation, formation of covalent cross-links, formation of cysteine, formation of pyroglutamate, formylation, gamma-carboxylation, glycosylation, GPI anchor formation, hydroxylation, iodination, methylation, myristoylation, oxidation, pegylation, proteolytic processing, phosphorylation, prenylation, racemization, selenoylation, sulfation, transfer-RNA mediated addition of amino acids to proteins such as arginylation, and ubiquitination. (See, for instance, PROTEINS—STRUCTURE AND MOLECULAR PROPERTIES, 2nd Ed., T. E. Creighton, W. H. Freeman and Company, New York (1993); POSTTRANSLATIONAL COVALENT MODIFICATION OF PROTEINS, B. C. Johnson, Ed., Academic Press, New York, pgs. 1-12 (1983); Seifter et al., Meth. Enzymol. 182:626-646 (1990); Rattan et al., Ann. N.Y. Acad. Sci. 663:48-62 (1992)).

[0214] Also provided by the invention are chemically modified derivatives of the polypeptides of the invention which may provide additional advantages such as increased solubility, stability and circulating time of the polypeptide, or decreased immunogenicity (see U.S. Pat. No. 4,179,337). The chemical moieties for derivitization may be selected from water soluble polymers such as polyethylene glycol, ethylene glycol/propylene glycol copolymers, carboxymethylcellulose, dextran, polyvinyl alcohol and the like. The polypeptides may be modified at random positions within the molecule, or at predetermined positions within the molecule and may include one, two, three or more attached chemical moieties.

[0215] The polymer may be of any molecular weight, and may be branched or unbranched. For polyethylene glycol, the preferred molecular weight is between about 1 kDa and about 100 kDa (the term “about” indicating that in preparations of polyethylene glycol, some molecules will weigh more, some less, than the stated molecular weight) for ease in handling and manufacturing. Other sizes may be used, depending on the desired therapeutic profile (e.g., the duration of sustained release desired, the effects, if any on biological activity, the ease in handling, the degree or lack of antigenicity and other known effects of the polyethylene glycol to a therapeutic protein or analog). For example, the polyethylene glycol may have an average molecular weight of about 200, 500, 1000, 1500, 2000, 2500, 3000, 3500, 4000, 4500, 5000, 5500, 6000, 6500, 7000, 7500, 8000, 8500, 9000, 9500, 10,000, 10,500, 11,000, 11,500, 12,000, 12,500, 13,000, 13,500, 14,000, 14,500, 15,000, 15,500, 16,000, 16,500, 17,000, 17,500, 18,000, 18,500, 19,000, 19,500, 20,000, 25,000, 30,000, 35,000, 40,000, 45,000, 50,000, 55,000, 60,000, 65,000, 70,000, 75,000, 80,000, 85,000, 90,000, 95,000, or 100,000 kDa.

[0216] As noted above, the polyethylene glycol may have a branched structure. Branched polyethylene glycols are described, for example, in U.S. Pat. No. 5,643,575; Morpurgo et al., Appl. Biochem. Biotechnol. 56:59-72 (1996); Vorobjev et al., Nucleosides Nucleotides 18:2745-2750 (1999); and Caliceti et al., Bioconjug. Chem. 10:638-646 (1999), the disclosures of each of which are incorporated herein by reference.

[0217] The polyethylene glycol molecules (or other chemical moieties) should be attached to the protein with consideration of effects on functional or antigenic domains of the protein. There are a number of attachment methods available to those skilled in the art, such as, for example, the method disclosed in EP 0 401 384 (coupling PEG to G-CSF), herein incorporated by reference; see also Malik et al., Exp. Hematol. 20:1028-1035 (1992), reporting pegylation of GM-CSF using tresyl chloride. For example, polyethylene glycol may be covalently bound through amino acid residues via a reactive group, such as a free amino or carboxyl group. Reactive groups are those to which an activated polyethylene glycol molecule may be bound. The amino acid residues having a free amino group may include lysine residues and the N-terminal amino acid residues; those having a free carboxyl group may include aspartic acid residues glutamic acid residues and the C-terminal amino acid residue. Sulfhydryl groups may also be used as a reactive group for attaching the polyethylene glycol molecules. Preferred for therapeutic purposes is attachment at an amino group, such as attachment at the N-terminus or lysine group.

[0218] As suggested above, polyethylene glycol may be attached to proteins via linkage to any of a number of amino acid residues. For example, polyethylene glycol can be linked to proteins via covalent bonds to lysine, histidine, aspartic acid, glutamic acid, or cysteine residues. One or more reaction chemistries may be employed to attach polyethylene glycol to specific amino acid residues (e.g., lysine, histidine, aspartic acid, glutamic acid, or cysteine) of the protein or to more than one type of amino acid residue (e.g., lysine, histidine, aspartic acid, glutamic acid, cysteine and combinations thereof) of the protein.

[0219] One may specifically desire proteins chemically modified at the N-terminus. Using polyethylene glycol as an illustration of the present composition, one may select from a variety of polyethylene glycol molecules (by molecular weight, branching, etc.), the proportion of polyethylene glycol molecules to protein (polypeptide) molecules in the reaction mix, the type of pegylation reaction to be performed, and the method of obtaining the selected N-terminally pegylated protein. The method of obtaining the N-terminally pegylated preparation (i.e., separating this moiety from other monopegylated moieties if necessary) may be by purification of the N-terminally pegylated material from a population of pegylated protein molecules. Selective proteins chemically modified at the N-terminus modification may be accomplished by reductive alkylation which exploits differential reactivity of different types of primary amino groups (lysine versus the N-terminal) available for derivatization in a particular protein. Under the appropriate reaction conditions, substantially selective derivatization of the protein at the N-terminus with a carbonyl group containing polymer is achieved.

[0220] As indicated above, pegylation of the proteins of the invention may be accomplished by any number of means. For example, polyethylene glycol may be attached to the protein either directly or by an intervening linker. Linkerless systems for attaching polyethylene glycol to proteins are described in Delgado et al., Crit. Rev. Thera. Drug Carrier Sys. 9:249-304 (1992); Francis et al., Intern. J. of Hematol. 68:1-18 (1998); U.S. Pat. Nos. 4,002,531; 5,349,052; WO 95/06058; and WO 98/32466, the disclosures of each of which are incorporated herein by reference.

[0221] One system for attaching polyethylene glycol directly to amino acid residues of proteins without an intervening linker employs tresylated MPEG, which is produced by the modification of monmethoxy polyethylene glycol (MPEG) using tresylchloride (ClSO₂CH₂CF₃). Upon reaction of protein with tresylated MPEG, polyethylene glycol is directly attached to amine groups of the protein. Thus, the invention includes protein-polyethylene glycol conjugates produced by reacting proteins of the invention with a polyethylene glycol molecule having a 2,2,2-trifluoreothane sulphonyl group.

[0222] Polyethylene glycol can also be attached to proteins using a number of different intervening linkers. For example, U.S. Pat. No. 5,612,460, the entire disclosure of which is incorporated herein by reference, discloses urethane linkers for connecting polyethylene glycol to proteins. Protein-polyethylene glycol conjugates wherein the polyethylene glycol is attached to the protein by a linker can also be produced by reaction of proteins with compounds such as MPEG-succinimidylsuccinate, MPEG activated with 1,1′-carbonyldiimidazole, MPEG-2,4,5-trichloropenylcarbonate, MPEG-p-nitrophenolcarbonate, and various MPEG-succinate derivatives. A number of additional polyethylene glycol derivatives and reaction chemistries for attaching polyethylene glycol to proteins are described in International Publication No. WO 98/32466, the entire disclosure of which is incorporated herein by reference. Pegylated protein products produced using the reaction chemistries set out herein are included within the scope of the invention.

[0223] The number of polyethylene glycol moieties attached to each protein of the invention (i.e., the degree of substitution) may also vary. For example, the pegylated proteins of the invention may be linked, on average, to 1, 2, 3, 4, 5, 6, 7, 8, 9, 10, 12, 15, 17, 20, or more polyethylene glycol molecules. Similarly, the average degree of substitution within ranges such as 1-3, 2-4, 3-5, 4-6, 5-7, 6-8, 7-9, 8-10, 9-11, 10-12, 11-13, 12-14, 13-15, 14-16, 15-17, 16-18, 17-19, or 18-20 polyethylene glycol moieties per protein molecule. Methods for determining the degree of substitution are discussed, for example, in Delgado et al., Crit. Rev. Thera. Drug Carrier Sys. 9:249-304 (1992).

[0224] The polypeptides of the invention can be recovered and purified from chemical synthesis and recombinant cell cultures by standard methods which include, but are not limited to, ammonium sulfate or ethanol precipitation, acid extraction, anion or cation exchange chromatography, phosphocellulose chromatography, hydrophobic interaction chromatography, affinity chromatography, hydroxylapatite chromatography and lectin chromatography. Most preferably, high performance liquid chromatography (“HPLC”) is employed for purification. Well known techniques for refolding protein may be employed to regenerate active conformation when the polypeptide is denatured during isolation and/or purification.

[0225] The polypeptides of the invention may be in monomers or multimers (i.e., dimers, trimers, tetramers and higher multimers). Accordingly, the present invention relates to monomers and multimers of the polypeptides of the invention, their preparation, and compositions (preferably, Therapeutics) containing them. In specific embodiments, the polypeptides of the invention are monomers, dimers, trimers or tetramers. In additional embodiments, the multimers of the invention are at least dimers, at least trimers, or at least tetramers.

[0226] Multimers encompassed by the invention may be homomers or heteromers. As used herein, the term homomer refers to a multimer containing only polypeptides corresponding to a protein of the invention (e.g., the amino acid sequence of SEQ ID NO:Y, an amino acid sequence encoded by SEQ ID NO:X or the complement of SEQ ID NO:X, the amino acid sequence encoded by the portion of SEQ ID NO:X as defined in columns 8 and 9 of Table 2, and/or an amino acid sequence encoded by cDNA contained in Clone ID NO:Z (including fragments, variants, splice variants, and fusion proteins, corresponding to these as described herein)). These homomers may contain polypeptides having identical or different amino acid sequences. In a specific embodiment, a homomer of the invention is a multimer containing only polypeptides having an identical amino acid sequence. In another specific embodiment, a homomer of the invention is a multimer containing polypeptides having different amino acid sequences. In specific embodiments, the multimer of the invention is a homodimer (e.g., containing two polypeptides having identical or different amino acid sequences) or a homotrimer (e.g., containing three polypeptides having identical and/or different amino acid sequences). In additional embodiments, the homomeric multimer of the invention is at least a homodimer, at least a homotrimer, or at least a homotetramer.

[0227] As used herein, the term heteromer refers to a multimer containing one or more heterologous polypeptides (i.e., polypeptides of different proteins) in addition to the polypeptides of the invention. In a specific embodiment, the multimer of the invention is a heterodimer, a heterotrimer, or a heterotetramer. In additional embodiments, the heteromeric multimer of the invention is at least a heterodimer, at least a heterotrimer, or at least a heterotetramer.

[0228] Multimers of the invention may be the result of hydrophobic, hydrophilic, ionic and/or covalent associations and/or may be indirectly linked by, for example, liposome formation. Thus, in one embodiment, multimers of the invention, such as, for example, homodimers or homotrimers, are formed when polypeptides of the invention contact one another in solution. In another embodiment, heteromultimers of the invention, such as, for example, heterotrimers or heterotetramers, are formed when polypeptides of the invention contact antibodies to the polypeptides of the invention (including antibodies to the heterologous polypeptide sequence in a fusion protein of the invention) in solution. In other embodiments, multimers of the invention are formed by covalent associations with and/or between the polypeptides of the invention. Such covalent associations may involve one or more amino acid residues contained in the polypeptide sequence (e.g., that recited in SEQ ID NO:Y, encoded by the portion of SEQ ID NO:X as defined in columns 8 and 9 of Table 2, and/or encoded by the cDNA contained in Clone ID NO:Z). In one instance, the covalent associations are cross-linking between cysteine residues located within the polypeptide sequences which interact in the native (i.e., naturally occurring) polypeptide. In another instance, the covalent associations are the consequence of chemical or recombinant manipulation. Alternatively, such covalent associations may involve one or more amino acid residues contained in the heterologous polypeptide sequence in a fusion protein. In one example, covalent associations are between the heterologous sequence contained in a fusion protein of the invention (see, e.g., U.S. Pat. No. 5,478,925). In a specific example, the covalent associations are between the heterologous sequence contained in a Fc fusion protein of the invention (as described herein). In another specific example, covalent associations of fusion proteins of the invention are between heterologous polypeptide sequence from another protein that is capable of forming covalently associated multimers, such as for example, osteoprotegerin (see, e.g., International Publication NO: WO 98/49305, the contents of which are herein incorporated by reference in its entirety). In another embodiment, two or more polypeptides of the invention are joined through peptide linkers. Examples include those peptide linkers described in U.S. Pat. No. 5,073,627 (hereby incorporated by reference). Proteins comprising multiple polypeptides of the invention separated by peptide linkers may be produced using conventional recombinant DNA technology.

[0229] Another method for preparing multimer polypeptides of the invention involves use of polypeptides of the invention fused to a leucine zipper or isoleucine zipper polypeptide sequence. Leucine zipper and isoleucine zipper domains are polypeptides that promote multimerization of the proteins in which they are found. Leucine zippers were originally identified in several DNA-binding proteins (Landschulz et al., Science 240:1759, (1988)), and have since been found in a variety of different proteins. Among the known leucine zippers are naturally occurring peptides and derivatives thereof that dimerize or trimerize. Examples of leucine zipper domains suitable for producing soluble multimeric proteins of the invention are those described in PCT application WO 94/10308, hereby incorporated by reference. Recombinant fusion proteins comprising a polypeptide of the invention fused to a polypeptide sequence that dimerizes or trimerizes in solution are expressed in suitable host cells, and the resulting soluble multimeric fusion protein is recovered from the culture supernatant using techniques known in the art.

[0230] Trimeric polypeptides of the invention may offer the advantage of enhanced biological activity. Preferred leucine zipper moieties and isoleucine moieties are those that preferentially form trimers. One example is a leucine zipper derived from lung surfactant protein D (SPD), as described in Hoppe et al. (FEBS Letters 344:191, (1994)) and in U.S. patent application Ser. No. 08/446,922, hereby incorporated by reference. Other peptides derived from naturally occurring trimeric proteins may be employed in preparing trimeric polypeptides of the invention.

[0231] In another example, proteins of the invention are associated by interactions between Flag® polypeptide sequence contained in fusion proteins of the invention containing Flag® polypeptide sequence. In a further embodiment, proteins of the invention are associated by interactions between heterologous polypeptide sequence contained in Flag® fusion proteins of the invention and anti-Flag® antibody.

[0232] The multimers of the invention may be generated using chemical techniques known in the art. For example, polypeptides desired to be contained in the multimers of the invention may be chemically cross-linked using linker molecules and linker molecule length optimization techniques known in the art (see, e.g., U.S. Pat. No. 5,478,925, which is herein incorporated by reference in its entirety). Additionally, multimers of the invention may be generated using techniques known in the art to form one or more inter-molecule cross-links between the cysteine residues located within the sequence of the polypeptides desired to be contained in the multimer (see, e.g., U.S. Pat. No. 5,478,925, which is herein incorporated by reference in its entirety). Further, polypeptides of the invention may be routinely modified by the addition of cysteine or biotin to the C-terminus or N-terminus of the polypeptide and techniques known in the art may be applied to generate multimers containing one or more of these modified polypeptides (see, e.g., U.S. Pat. No. 5,478,925, which is herein incorporated by reference in its entirety). Additionally, techniques known in the art may be applied to generate liposomes containing the polypeptide components desired to be contained in the multimer of the invention (see, e.g., U.S. Pat. No. 5,478,925, which is herein incorporated by reference in its entirety).

[0233] Alternatively, multimers of the invention may be generated using genetic engineering techniques known in the art. In one embodiment, polypeptides contained in multimers of the invention are produced recombinantly using fusion protein technology described herein or otherwise known in the art (see, e.g., U.S. Pat. No. 5,478,925, which is herein incorporated by reference in its entirety). In a specific embodiment, polynucleotides coding for a homodimer of the invention are generated by ligating a polynucleotide sequence encoding a polypeptide of the invention to a sequence encoding a linker polypeptide and then further to a synthetic polynucleotide encoding the translated product of the polypeptide in the reverse orientation from the original C-terminus to the N-terminus (lacking the leader sequence) (see, e.g., U.S. Pat. No. 5,478,925, which is herein incorporated by reference in its entirety). In another embodiment, recombinant techniques described herein or otherwise known in the art are applied to generate recombinant polypeptides of the invention which contain a transmembrane domain (or hydrophobic or signal peptide) and which can be incorporated by membrane reconstitution techniques into liposomes (see, e.g., U.S. Pat. No. 5,478,925, which is herein incorporated by reference in its entirety).

[0234] Antibodies

[0235] Further polypeptides of the invention relate to antibodies and T-cell antigen receptors (TCR) which immunospecifically bind a polypeptide, polypeptide fragment, or variant of the invention (e.g., a polypeptide or fragment or variant of the amino acid sequence of SEQ ID NO:Y or a polypeptide encoded by the cDNA contained in Clone ID No:Z, and/or an epitope, of the present invention) as determined by immunoassays well known in the art for assaying specific antibody-antigen binding. Antibodies of the invention include, but are not limited to, polyclonal, monoclonal, multispecific, human, humanized or chimeric antibodies, single chain antibodies, Fab fragments, F(ab′) fragments, fragments produced by a Fab expression library, anti-idiotypic (anti-Id) antibodies (including, e.g., anti-Id antibodies to antibodies of the invention), intracellularly-made antibodies (i.e., intrabodies), and epitope-binding fragments of any of the above. The term “antibody,” as used herein, refers to immunoglobulin molecules and immunologically active portions of immunoglobulin molecules, i.e., molecules that contain an antigen binding site that immunospecifically binds an antigen. The immunoglobulin molecules of the invention can be of any type (e.g., IgG, IgE, IgM, IgD, IgA and IgY), class (e.g., IgG1,IgG2, IgG3, IgG4, IgA1 and IgA2) or subclass of immunoglobulin molecule. In preferred embodiments, the immunoglobulin molecules of the invention are IgG1. In other preferred embodiments, the immunoglobulin molecules of the invention are IgG4.

[0236] Most preferably the antibodies are human antigen-binding antibody fragments of the present invention and include, but are not limited to, Fab, Fab′ and F(ab′)2, Fd, single-chain Fvs (scFv), single-chain antibodies, disulfide-linked Fvs (sdFv) and fragments comprising either a VL or VH domain. Antigen-binding antibody fragments, including single-chain antibodies, may comprise the variable region(s) alone or in combination with the entirety or a portion of the following: hinge region, CH1, CH2, and CH3 domains. Also included in the invention are antigen-binding fragments also comprising any combination of variable region(s) with a hinge region, CH1, CH2, and CH3 domains. The antibodies of the invention may be from any animal origin including birds and mammals. Preferably, the antibodies are human, murine (e.g., mouse and rat), donkey, ship rabbit, goat, guinea pig, camel, horse, or chicken. As used herein, “human” antibodies include antibodies having the amino acid sequence of a human immunoglobulin and include antibodies isolated from human immunoglobulin libraries or from animals transgenic for one or more human immunoglobulin and that do not express endogenous immunoglobulins, as described infra and, for example in, U.S. Pat. No. 5,939,598 by Kucherlapati et al.

[0237] The antibodies of the present invention may be monospecific, bispecific, trispecific or of greater multispecificity. Multispecific antibodies may be specific for different epitopes of a polypeptide of the present invention or may be specific for both a polypeptide of the present invention as well as for a heterologous epitope, such as a heterologous polypeptide or solid support material. See, e.g., PCT publications WO 93/17715; WO 92/08802; WO 91/00360; WO 92/05793; Tutt, et al., J. Immunol. 147:60-69 (1991); U.S. Pat. Nos. 4,474,893; 4,714,681; 4,925,648; 5,573,920; 5,601,819; Kostelny et al., J. Immunol. 148:1547-1553 (1992).

[0238] Antibodies of the present invention may be described or specified in terms of the epitope(s) or portion(s) of a polypeptide of the present invention which they recognize or specifically bind. The epitope(s) or polypeptide portion(s) may be specified as described herein, e.g., by N-terminal and C-terminal positions, or by size in contiguous amino acid residues, or listed in the Tables and Figures. Preferred epitopes of the invention include the predicted epitopes shown in column 7 of Table 1A, as well as polynucleotides that encode these epitopes. Antibodies which specifically bind any epitope or polypeptide of the present invention may also be excluded. Therefore, the present invention includes antibodies that specifically bind polypeptides of the present invention, and allows for the exclusion of the same.

[0239] Antibodies of the present invention may also be described or specified in terms of their cross-reactivity. Antibodies that do not bind any other analog, ortholog, or homolog of a polypeptide of the present invention are included. Antibodies that bind polypeptides with at least 95%, at least 90%, at least 85%, at least 80%, at least 75%, at least 70%, at least 65%, at least 60%, at least 55%, and at least 50% identity (as calculated using methods known in the art and described herein) to a polypeptide of the present invention are also included in the present invention. In specific embodiments, antibodies of the present invention cross-react with murine, rat and/or rabbit homologs of human proteins and the corresponding epitopes thereof. Antibodies that do not bind polypeptides with less than 95%, less than 90%, less than 85%, less than 80%, less than 75%, less than 70%, less than 65%, less than 60%, less than 55%, and less than 50% identity (as calculated using methods known in the art and described herein) to a polypeptide of the present invention are also included in the present invention. In a specific embodiment, the above-described cross-reactivity is with respect to any single specific antigenic or immunogenic polypeptide, or combination(s) of 2, 3, 4, 5, or more of the specific antigenic and/or immunogenic polypeptides disclosed herein. Further included in the present invention are antibodies which bind polypeptides encoded by polynucleotides which hybridize to a polynucleotide of the present invention under stringent hybridization conditions (as described herein). Antibodies of the present invention may also be described or specified in terms of their binding affinity to a polypeptide of the invention. Preferred binding affinities include those with a dissociation constant or Kd less than 5×10⁻² M, 10⁻² M, 5×10⁻³ M, 10⁻³ M, 5×10⁻⁴ M, 10⁻⁴ M, 5×10⁻⁵ M, 10⁻⁵ M, 5×10⁻⁶ M, 10⁻⁶M, 5×10⁻⁷ M, 10⁷ M, 5×10⁻⁸ M, 10⁻⁸ M, 5×10⁻⁹ M, 10⁻⁹ M, 5×10⁻¹⁰ M, 10⁻¹⁰ M, 5×10⁻¹¹ M, 10⁻¹¹ M, 5×10⁻¹² M, 10⁻¹² M, 5×10⁻¹³ M, 10⁻¹³ M, 5×10⁻¹⁴ M, 10⁻¹⁴ M, 5×10⁻¹⁵ M, or 10⁻¹⁵ M.

[0240] The invention also provides antibodies that competitively inhibit binding of an antibody to an epitope of the invention as determined by any method known in the art for determining competitive binding, for example, the immunoassays described herein. In preferred embodiments, the antibody competitively inhibits binding to the epitope by at least 95%, at least 90%, at least 85 %, at least 80%, at least 75%, at least 70%, at least 60%, or at least 50%.

[0241] Antibodies of the present invention may act as agonists or antagonists of the polypeptides of the present invention. For example, the present invention includes antibodies which disrupt the receptor/ligand interactions with the polypeptides of the invention either partially or fully. Preferably, antibodies of the present invention bind an antigenic epitope disclosed herein, or a portion thereof. The invention features both receptor-specific antibodies and ligand-specific antibodies. The invention also features receptor-specific antibodies which do not prevent ligand binding but prevent receptor activation. Receptor activation (i.e., signaling) may be determined by techniques described herein or otherwise known in the art. For example, receptor activation can be determined by detecting the phosphorylation (e.g., tyrosine or serine/threonine) of the receptor or its substrate by immunoprecipitation followed by western blot analysis (for example, as described supra). In specific embodiments, antibodies are provided that inhibit ligand activity or receptor activity by at least 95%, at least 90%, at least 85%, at least 80%, at least 75%, at least 70%, at least 60%, or at least 50% of the activity in absence of the antibody.

[0242] The invention also features receptor-specific antibodies which both prevent ligand binding and receptor activation as well as antibodies that recognize the receptor-ligand complex, and, preferably, do not specifically recognize the unbound receptor or the unbound ligand. Likewise, included in the invention are neutralizing antibodies which bind the ligand and prevent binding of the ligand to the receptor, as well as antibodies which bind the ligand, thereby preventing receptor activation, but do not prevent the ligand from binding the receptor. Further included in the invention are antibodies which activate the receptor. These antibodies may act as receptor agonists, i.e., potentiate or activate either all or a subset of the biological activities of the ligand-mediated receptor activation, for example, by inducing dimerization of the receptor. The antibodies may be specified as agonists, antagonists or inverse agonists for biological activities comprising the specific biological activities of the peptides of the invention disclosed herein. The above antibody agonists can be made using methods known in the art. See, e.g., PCT publication WO 96/40281; U.S. Pat. No. 5,811,097; Deng et al., Blood 92(6):1981-1988 (1998); Chen et al., Cancer Res. 58(16):3668-3678 (1998); Harrop et al., J. Immunol. 161(4):1786-1794 (1998); Zhu et al., Cancer Res. 58(15):3209-3214 (1998); Yoon et al., J. Immunol. 160(7):3170-3179 (1998); Prat et al., J. Cell. Sci. 111(Pt2):237-247 (1998); Pitard et al., J. Immunol. Methods 205(2):177-190 (1997); Liautard et al., Cytokine 9(4):233-241 (1997); Carlson et al., J. Biol. Chem. 272(17):11295-11301 (1997); Taryman et al., Neuron 14(4):755-762 (1995); Muller et al., Structure 6(9):1153-1167 (1998); Bartunek et al., Cytokine 8(1):14-20 (1996) (which are all incorporated by reference herein in their entireties).

[0243] Antibodies of the present invention may be used, for example, to purify, detect, and target the polypeptides of the present invention, including both in vitro and in vivo diagnostic and therapeutic methods. For example, the antibodies have utility in immunoassays for qualitatively and quantitatively measuring levels of the polypeptides of the present invention in biological samples. See, e.g., Harlow et al., Antibodies: A Laboratory Manual, (Cold Spring Harbor Laboratory Press, 2nd ed. 1988); incorporated by reference herein in its entirety.

[0244] As discussed in more detail below, the antibodies of the present invention may be used either alone or in combination with other compositions. The antibodies may further be recombinantly fused to a heterologous polypeptide at the N- or C-terminus or chemically conjugated (including covalent and non-covalent conjugations) to polypeptides or other compositions. For example, antibodies of the present invention may be recombinantly fused or conjugated to molecules useful as labels in detection assays and effector molecules such as heterologous polypeptides, drugs, radionuclides, or toxins. See, e.g., PCT publications WO 92/08495; WO 91/14438; WO 89/12624; U.S. Pat. No. 5,314,995; and EP 396,387; the disclosures of which are incorporated herein by reference in their entireties.

[0245] The antibodies of the invention include derivatives that are modified, i.e, by the covalent attachment of any type of molecule to the antibody such that covalent attachment does not prevent the antibody from generating an anti-idiotypic response. For example, but not by way of limitation, the antibody derivatives include antibodies that have been modified, e.g., by glycosylation, acetylation, pegylation, phosphylation, amidation, derivatization by known protecting/blocking groups, proteolytic cleavage, linkage to a cellular ligand or other protein, etc. Any of numerous chemical modifications may be carried out by known techniques, including, but not limited to specific chemical cleavage, acetylation, formylation, metabolic synthesis of tunicamycin, etc. Additionally, the derivative may contain one or more non-classical amino acids.

[0246] The antibodies of the present invention may be generated by any suitable method known in the art. Polyclonal antibodies to an antigen-of- interest can be produced by various procedures well known in the art. For example, a polypeptide of the invention can be administered to various host animals including, but not limited to, rabbits, mice, rats, etc. to induce the production of sera containing polyclonal antibodies specific for the antigen. Various adjuvants may be used to increase the immunological response, depending on the host species, and include but are not limited to, Freund's (complete and incomplete), mineral gels such as aluminum hydroxide, surface active substances such as lysolecithin, pluronic polyols, polyanions, peptides, oil emulsions, keyhole limpet hemocyanins, dinitrophenol, and potentially useful human adjuvants such as BCG (bacille Calmette-Guerin) and corynebacterium parvum. Such adjuvants are also well known in the art.

[0247] Monoclonal antibodies can be prepared using a wide variety of techniques known in the art including the use of hybridoma, recombinant, and phage display technologies, or a combination thereof. For example, monoclonal antibodies can be produced using hybridoma techniques including those known in the art and taught, for example, in Harlow et al., Antibodies: A Laboratory Manual, (Cold Spring Harbor Laboratory Press, 2nd ed. 1988); Hammerling, et al., in: Monoclonal Antibodies and T-Cell Hybridomas 563-681 (Elsevier, N.Y., 1981) (said references incorporated by reference in their entireties). The term “monoclonal antibody” as used herein is not limited to antibodies produced through hybridoma technology. The term “monoclonal antibody” refers to an antibody that is derived from a single clone, including any eukaryotic, prokaryotic, or phage clone, and not the method by which it is produced.

[0248] Methods for producing and screening for specific antibodies using hybridoma technology are routine and well known in the art and are discussed in detail in the Examples. In a non-limiting example, mice can be immunized with a polypeptide of the invention or a cell expressing such peptide. Once an immune response is detected, e.g., antibodies specific for the antigen are detected in the mouse serum, the mouse spleen is harvested and splenocytes isolated. The splenocytes are then fused by well known techniques to any suitable myeloma cells, for example cells from cell line SP20 available from the ATCC. Hybridomas are selected and cloned by limited dilution. The hybridoma clones are then assayed by methods known in the art for cells that secrete antibodies capable of binding a polypeptide of the invention. Ascites fluid, which generally contains high levels of antibodies, can be generated by immunizing mice with positive hybridoma clones.

[0249] Accordingly, the present invention provides methods of generating monoclonal antibodies as well as antibodies produced by the method comprising culturing a hybridoma cell secreting an antibody of the invention wherein, preferably, the hybridoma is generated by fusing splenocytes isolated from a mouse immunized with an antigen of the invention with myeloma cells and then screening the hybridomas resulting from the fusion for hybridoma clones that secrete an antibody able to bind a polypeptide of the invention.

[0250] Another well known method for producing both polyclonal and monoclonal human B cell lines is transformation using Epstein Barr Virus (EBV). Protocols for generating EBV-transformed B cell lines are commonly known in the art, such as, for example, the protocol outlined in Chapter 7.22 of Current Protocols in Immunology, Coligan et al., Eds., 1994, John Wiley & Sons, NY, which is hereby incorporated in its entirety by reference. The source of B cells for transformation is commonly human peripheral blood, but B cells for transformation may also be derived from other sources including, but not limited to, lymph nodes, tonsil, spleen, tumor tissue, and infected tissues. Tissues are generally made into single cell suspensions prior to EBV transformation. Additionally, steps may be taken to either physically remove or inactivate T cells (e.g., by treatment with cyclosporin A) in B cell-containing samples, because T cells from individuals seropositive for anti-EBV antibodies can suppress B cell immortalization by EBV.

[0251] In general, the sample containing human B cells is innoculated with EBV, and cultured for 3-4 weeks. A typical source of EBV is the culture supernatant of the B95-8 cell line (ATCC #VR-1492). Physical signs of EBV transformation can generally be seen towards the end of the 3-4 week culture period. By phase-contrast microscopy, transformed cells may appear large, clear, hairy and tend to aggregate in tight clusters of cells. Initially, EBV lines are generally polyclonal. However, over prolonged periods of cell cultures, EBV lines may become monoclonal or polyclonal as a result of the selective outgrowth of particular B cell clones. Alternatively, polyclonal EBV transformed lines may be subcloned (e.g., by limiting dilution culture) or fused with a suitable fusion partner and plated at limiting dilution to obtain monoclonal B cell lines. Suitable fusion partners for EBV transformed cell lines include mouse myeloma cell lines (e.g., SP2/0, X63-Ag8.653), heteromyeloma cell lines (human x mouse; e.g, SPAM-8, SBC-H20, and CB-F7), and human cell lines (e.g., GM 1500, SKO-007, RPMI 8226, and KR-4). Thus, the present invention also provides a method of generating polyclonal or monoclonal human antibodies against polypeptides of the invention or fragments thereof, comprising EBV-transformation of human B cells.

[0252] Antibody fragments which recognize specific epitopes may be generated by known techniques. For example, Fab and F(ab′)2 fragments of the invention may be produced by proteolytic cleavage of immunoglobulin molecules, using enzymes such as papain (to produce Fab fragments) or pepsin (to produce F(ab′)2 fragments). F(ab′)2 fragments contain the variable region, the light chain constant region and the CH1 domain of the heavy chain.

[0253] For example, the antibodies of the present invention can also be generated using various phage display methods known in the art. In phage display methods, functional antibody domains are displayed on the surface of phage particles which carry the polynucleotide sequences encoding them. In a particular embodiment, such phage can be utilized to display antigen binding domains expressed from a repertoire or combinatorial antibody library (e.g., human or murine). Phage expressing an antigen binding domain that binds the antigen of interest can be selected or identified with antigen, e.g., using labeled antigen or antigen bound or captured to a solid surface or bead. Phage used in these methods are typically filamentous phage including fd and M13 binding domains expressed from phage with Fab, Fv or disulfide stabilized Fv antibody domains recombinantly fused to either the phage gene III or gene VIII protein. Examples of phage display methods that can be used to make the antibodies of the present invention include those disclosed in Brinkman et al., J. Immunol. Methods 182:41-50 (1995); Ames et al., J. Immunol. Methods 184:177-186 (1995); Kettleborough et al., Eur. J. Immunol. 24:952-958 (1994); Persic et al., Gene 187 9-18 (1997); Burton et al., Advances in Immunology 57:191-280 (1994); PCT application No. PCT/GB91/01134; PCT publications WO 90/02809; WO 91/10737; WO 92/01047; WO 92/18619; WO 93/11236; WO 95/15982; WO 95/20401; and U.S. Pat. Nos. 5,698,426; 5,223,409; 5,403,484; 5,580,717; 5,427,908; 5,750,753; 5,821,047; 5,571,698; 5,427,908; 5,516,637; 5,780,225; 5,658,727; 5,733,743 and 5,969,108; each of which is incorporated herein by reference in its entirety.

[0254] As described in the above references, after phage selection, the antibody coding regions from the phage can be isolated and used to generate whole antibodies, including human antibodies, or any other desired antigen binding fragment, and expressed in any desired host, including mammalian cells, insect cells, plant cells, yeast, and bacteria, e.g., as described in detail below. For example, techniques to recombinantly produce Fab, Fab′ and F(ab′)2 fragments can also be employed using methods known in the art such as those disclosed in PCT publication WO 92/22324; Mullinax et al., BioTechniques 12(6):864-869 (1992); and Sawai et al., AJRI 34:26-34 (1995); and Better et al., Science 240:1041-1043 (1988) (said references incorporated by reference in their entireties).

[0255] Examples of techniques which can be used to produce single-chain Fvs and antibodies include those described in U.S. Pat. Nos. 4,946,778 and 5,258,498; Huston et al., Methods in Enzymology 203:46-88 (1991); Shu et al., PNAS 90:7995-7999 (1993); and Skerra et al., Science 240:1038-1040 (1988). For some uses, including in vivo use of antibodies in humans and in vitro detection assays, it may be preferable to use chimeric, humanized, or human antibodies. A chimeric antibody is a molecule in which different portions of the antibody are derived from different animal species, such as antibodies having a variable region derived from a murine monoclonal antibody and a human immunoglobulin constant region. Methods for producing chimeric antibodies are known in the art. See e.g., Morrison, Science 229:1202 (1985); Oi et al., BioTechniques 4:214 (1986); Gillies et al., (1989) J. Immunol. Methods 125:191-202; U.S. Pat. Nos. 5,807,715; 4,816,567; and 4,816397, which are incorporated herein by reference in their entirety. Humanized antibodies are antibody molecules from non-human species antibody that binds the desired antigen having one or more complementarity determining regions (CDRs) from the non-human species and a framework regions from a human immunoglobulin molecule. Often, framework residues in the human framework regions will be substituted with the corresponding residue from the CDR donor antibody to alter, preferably improve, antigen binding. These framework substitutions are identified by methods well known in the art, e.g., by modeling of the interactions of the CDR and framework residues to identify framework residues important for antigen binding and sequence comparison to identify unusual framework residues at particular positions. (See, e.g., Queen et al., U.S. Pat. No. 5,585,089; Riechmann et al., Nature 332:323 (1988), which are incorporated herein by reference in their entireties.) Antibodies can be humanized using a variety of techniques known in the art including, for example, CDR-grafting (EP 239,400; PCT publication WO 91/09967; U.S. Pat. Nos. 5,225,539; 5,530,101; and 5,585,089), veneering or resurfacing (EP 592,106; EP 519,596; Padlan, Molecular Immunology 28(4/5):489-498 (1991); Studnicka et al., Protein Engineering 7(6):805-814 (1994); Roguska. et al., PNAS 91:969-973 (1994)), and chain shuffling (U.S. Pat. No. 5,565,332).

[0256] Completely human antibodies are particularly desirable for therapeutic treatment of human patients. Human antibodies can be made by a variety of methods known in the art including phage display methods described above using antibody libraries derived from human immunoglobulin sequences. See also, U.S. Pat. Nos. 4,444,887 and 4,716,111; and PCT publications WO 98/46645, WO 98/50433, WO 98/24893, WO 98/16654, WO 96/34096, WO 96/33735, and WO 91/10741; each of which is incorporated herein by reference in its entirety.

[0257] Human antibodies can also be produced using transgenic mice which are incapable of expressing functional endogenous immunoglobulins, but which can express human immunoglobulin genes. For example, the human heavy and light chain immunoglobulin gene complexes may be introduced randomly or by homologous recombination into mouse embryonic stem cells. Alternatively, the human variable region, constant region, and diversity region may be introduced into mouse embryonic stem cells in addition to the human heavy and light chain genes. The mouse heavy and light chain immunoglobulin genes may be rendered non-functional separately or simultaneously with the introduction of human immunoglobulin loci by homologous recombination. In particular, homozygous deletion of the JH region prevents endogenous antibody production. The modified embryonic stem cells are expanded and microinjected into blastocysts to produce chimeric mice. The chimeric mice are then bred to produce homozygous offspring which express human antibodies. The transgenic mice are immunized in the normal fashion with a selected antigen, e.g., all or a portion of a polypeptide of the invention. Monoclonal antibodies directed against the antigen can be obtained from the immunized, transgenic mice using conventional hybridoma technology. The human immunoglobulin transgenes harbored by the transgenic mice rearrange during B cell differentiation, and subsequently undergo class switching and somatic mutation. Thus, using such a technique, it is possible to produce therapeutically useful IgG, IgA, IgM and IgE antibodies. For an overview of this technology for producing human antibodies, see Lonberg and Huszar, Int. Rev. Immunol. 13:65-93 (1995). For a detailed discussion of this technology for producing human antibodies and human monoclonal antibodies and protocols for producing such antibodies, see, e.g., PCT publications WO 98/24893; WO 92/01047; WO 96/34096; WO 96/33735; European Patent No. 0 598 877; U.S. Pat. Nos. 5,413,923; 5,625,126; 5,633,425; 5,569,825; 5,661,016; 5,545,806; 5,814,318; 5,885,793; 5,916,771; 5,939,598; 6,075,181; and 6,114,598, which are incorporated by reference herein in their entirety. In addition, companies such as Abgenix, Inc. (Freemont, Calif.) and Genpharm (San Jose, Calif.) can be engaged to provide human antibodies directed against a selected antigen using technology similar to that described above.

[0258] Completely human antibodies which recognize a selected epitope can be generated using a technique referred to as “guided selection.” In this approach a selected non-human monoclonal antibody, e.g., a mouse antibody, is used to guide the selection of a completely human antibody recognizing the same epitope. (Jespers et al., Bio/technology 12:899-903 (1988)).

[0259] Further, antibodies to the polypeptides of the invention can, in turn, be utilized to generate anti-idiotype antibodies that “mimic” polypeptides of the invention using techniques well known to those skilled in the art. (See, e.g., Greenspan & Bona, FASEB J. 7(5):437-444; (1989) and Nissinoff, J. Immunol. 147(8):2429-2438 (1991)). For example, antibodies which bind to and competitively inhibit polypeptide multimerization and/or binding of a polypeptide of the invention to a ligand can be used to generate anti-idiotypes that “mimic” the polypeptide multimerization and/or binding domain and, as a consequence, bind to and neutralize polypeptide and/or its ligand. Such neutralizing anti-idiotypes or Fab fragments of such anti-idiotypes can be used in therapeutic regimens to neutralize polypeptide ligand(s)/receptor(s). For example, such anti-idiotypic antibodies can be used to bind a polypeptide of the invention and/or to bind its ligand(s)/receptor(s), and thereby block its biological activity. Alternatively, antibodies which bind to and enhance polypeptide multimerization and/or binding, and/or receptor/ligand multimerization, binding and/or signaling can be used to generate anti-idiotypes that function as agonists of a polypeptide of the invention and/or its ligand/receptor. Such agonistic anti-idiotypes or Fab fragments of such anti-idiotypes can be used in therapeutic regimens as agonists of the polypeptides of the invention or its ligand(s)/receptor(s). For example, such anti-idiotypic antibodies can be used to bind a polypeptide of the invention and/or to bind its ligand(s)/receptor(s), and thereby promote or enhance its biological activity.

[0260] Intrabodies of the invention can be produced using methods known in the art, such as those disclosed and reviewed in Chen et al., Hum. Gene Ther. 5:595-601 (1994); Marasco, W. A., Gene Ther. 4:11-15 (1997); Rondon and Marasco, Annu. Rev. Microbiol. 51:257-283 (1997); Proba et al., J. Mol. Biol. 275:245-253 (1998); Cohen et al., Oncogene 17:2445-2456 (1998); Ohage and Steipe, J. Mol. Biol. 291:1119-1128 (1999); Ohage et al., J. Mol. Biol. 291:1129-1134 (1999); Wirtz and Steipe, Protein Sci. 8:2245-2250 (1999); Zhu et al., J. Immunol. Methods 231:207-222 (1999); and references cited therein.

[0261] Polynucleotides Encoding Antibodies

[0262] The invention further provides polynucleotides comprising a nucleotide sequence encoding an antibody of the invention and fragments thereof. The invention also encompasses polynucleotides that hybridize under stringent or alternatively, under lower stringency hybridization conditions, e.g., as defined supra, to polynucleotides that encode an antibody, preferably, that specifically binds to a polypeptide of the invention, preferably, an antibody that binds to a polypeptide having the amino acid sequence of SEQ ID NO:Y, to a polypeptide encoded by a portion of SEQ ID NO:X as defined in columns 8 and 9 of Table 2, and/or to a polypeptide encoded by the cDNA contained in Clone ID NO:Z.

[0263] The polynucleotides may be obtained, and the nucleotide sequence of the polynucleotides determined, by any method known in the art. For example, if the nucleotide sequence of the antibody is known, a polynucleotide encoding the antibody may be assembled from chemically synthesized oligonucleotides (e.g., as described in Kutmeier et al., BioTechniques 17:242 (1994)), which, briefly, involves the synthesis of overlapping oligonucleotides containing portions of the sequence encoding the antibody, annealing and ligating of those oligonucleotides, and then amplification of the ligated oligonucleotides by PCR.

[0264] Alternatively, a polynucleotide encoding an antibody may be generated from nucleic acid from a suitable source. If a clone containing a nucleic acid encoding a particular antibody is not available, but the sequence of the antibody molecule is known, a nucleic acid encoding the immunoglobulin may be chemically synthesized or obtained from a suitable source (e.g., an antibody cDNA library, or a cDNA library generated from, or nucleic acid, preferably poly A+RNA, isolated from, any tissue or cells expressing the antibody, such as hybridoma cells selected to express an antibody of the invention) by PCR amplification using synthetic primers hybridizable to the 3′ and 5′ ends of the sequence or by cloning using an oligonucleotide probe specific for the particular gene sequence to identify, e.g., a cDNA clone from a cDNA library that encodes the antibody. Amplified nucleic acids generated by PCR may then be cloned into replicable cloning vectors using any method well known in the art.

[0265] Once the nucleotide sequence and corresponding amino acid sequence of the antibody is determined, the nucleotide sequence of the antibody may be manipulated using methods well known in the art for the manipulation of nucleotide sequences, e.g., recombinant DNA techniques, site directed mutagenesis, PCR, etc. (see, for example, the techniques described in Sambrook et al., 1990, Molecular Cloning, A Laboratory Manual, 2d Ed., Cold Spring Harbor Laboratory, Cold Spring Harbor, N.Y. and Ausubel et al., eds., 1998, Current Protocols in Molecular Biology, John Wiley & Sons, NY, which are both incorporated by reference herein in their entireties ), to generate antibodies having a different amino acid sequence, for example to create amino acid substitutions, deletions, and/or insertions.

[0266] In a specific embodiment, the amino acid sequence of the heavy and/or light chain variable domains may be inspected to identify the sequences of the complementarity determining regions (CDRs) by methods that are well know in the art, e.g., by comparison to known amino acid sequences of other heavy and light chain variable regions to determine the regions of sequence hypervariability. Using routine recombinant DNA techniques, one or more of the CDRs may be inserted within framework regions, e.g., into human framework regions to humanize a non-human antibody, as described supra. The framework regions may be naturally occurring or consensus framework regions, and preferably human framework regions (see, e.g., Chothia et al., J. Mol. Biol. 278:457-479 (1998) for a listing of human framework regions). Preferably, the polynucleotide generated by the combination of the framework regions and CDRs encodes an antibody that specifically binds a polypeptide of the invention. Preferably, as discussed supra, one or more amino acid substitutions may be made within the framework regions, and, preferably, the amino acid substitutions improve binding of the antibody to its antigen. Additionally, such methods may be used to make amino acid substitutions or deletions of one or more variable region cysteine residues participating in an intrachain disulfide bond to generate antibody molecules lacking one or more intrachain disulfide bonds. Other alterations to the polynucleotide are encompassed by the present invention and within the skill of the art.

[0267] In addition, techniques developed for the production of “chimeric antibodies” (Morrison et al., Proc. Natl. Acad. Sci. 81:851-855 (1984); Neuberger et al., Nature 312:604-608 (1984); Takeda et al., Nature 314:452-454 (1985)) by splicing genes from a mouse antibody molecule of appropriate antigen specificity together with genes from a human antibody molecule of appropriate biological activity can be used. As described supra, a chimeric antibody is a molecule in which different portions are derived from different animal species, such as those having a variable region derived from a murine mAb and a human immunoglobulin constant region, e.g., humanized antibodies.

[0268] Alternatively, techniques described for the production of single chain antibodies (U.S. Pat. No. 4,946,778; Bird, Science 242:423-42 (1988); Huston et al., Proc. Natl. Acad. Sci. USA 85:5879-5883 (1988); and Ward et al., Nature 334:544-54 (1989)) can be adapted to produce single chain antibodies. Single chain antibodies are formed by linking the heavy and light chain fragments of the Fv region via an amino acid bridge, resulting in a single chain polypeptide. Techniques for the assembly of functional Fv fragments in E. coli may also be used (Skerra et al., Science 242:1038-1041 (1988)).

[0269] Methods of Producing Antibodies

[0270] The antibodies of the invention can be produced by any method known in the art for the synthesis of antibodies, in particular, by chemical synthesis or preferably, by recombinant expression techniques. Methods of producing antibodies include, but are not limited to, hybridoma technology, EBV transformation, and other methods discussed herein as well as through the use recombinant DNA technology, as discussed below.

[0271] Recombinant expression of an antibody of the invention, or fragment, derivative or analog thereof, (e.g., a heavy or light chain of an antibody of the invention or a single chain antibody of the invention), requires construction of an expression vector containing a polynucleotide that encodes the antibody. Once a polynucleotide encoding an antibody molecule or a heavy or light chain of an antibody, or portion thereof (preferably containing the heavy or light chain variable domain), of the invention has been obtained, the vector for the production of the antibody molecule may be produced by recombinant DNA technology using techniques well known in the art. Thus, methods for preparing a protein by expressing a polynucleotide containing an antibody encoding nucleotide sequence are described herein. Methods which are well known to those skilled in the art can be used to construct expression vectors containing antibody coding sequences and appropriate transcriptional and translational control signals. These methods include, for example, in vitro recombinant DNA techniques, synthetic techniques, and in vivo genetic recombination. The invention, thus, provides replicable vectors comprising a nucleotide sequence encoding an antibody molecule of the invention, or a heavy or light chain thereof, or a heavy or light chain variable domain, operably linked to a promoter. Such vectors may include the nucleotide sequence encoding the constant region of the antibody molecule (see, e.g., PCT Publication WO 86/05807; PCT Publication WO 89/01036; and U.S. Pat. No. 5,122,464) and the variable domain of the antibody may be cloned into such a vector for expression of the entire heavy or light chain.

[0272] The expression vector is transferred to a host cell by conventional techniques and the transfected cells are then cultured by conventional techniques to produce an antibody of the invention. Thus, the invention includes host cells containing a polynucleotide encoding an antibody of the invention, or a heavy or light chain thereof, or a single chain antibody of the invention, operably linked to a heterologous promoter. In preferred embodiments for the expression of double-chained antibodies, vectors encoding both the heavy and light chains may be co-expressed in the host cell for expression of the entire immunoglobulin molecule, as detailed below.

[0273] A variety of host-expression vector systems may be utilized to express the antibody molecules of the invention. Such host-expression systems represent vehicles by which the coding sequences of interest may be produced and subsequently purified, but also represent cells which may, when transformed or transfected with the appropriate nucleotide coding sequences, express an antibody molecule of the invention in situ. These include but are not limited to microorganisms such as bacteria (e.g., E. coli, B. subtilis) transformed with recombinant bacteriophage DNA, plasmid DNA or cosmid DNA expression vectors containing antibody coding sequences; yeast (e.g., Saccharomyces, Pichia) transformed with recombinant yeast expression vectors containing antibody coding sequences; insect cell systems infected with recombinant virus expression vectors (e.g., baculovirus) containing antibody coding sequences; plant cell systems infected with recombinant virus expression vectors (e.g., cauliflower mosaic virus, CaMV; tobacco mosaic virus, TMV) or transformed with recombinant plasmid expression vectors (e.g., Ti plasmid) containing antibody coding sequences; or mammalian cell systems (e.g., COS, CHO, BHK, 293, 3T3 cells) harboring recombinant expression constructs containing promoters derived from the genome of mammalian cells (e.g., metallothionein promoter) or from mammalian viruses (e.g., the adenovirus late promoter; the vaccinia virus 7.5K promoter). Preferably, bacterial cells such as Escherichia coli, and more preferably, eukaryotic cells, especially for the expression of whole recombinant antibody molecule, are used for the expression of a recombinant antibody molecule. For example, mammalian cells such as Chinese hamster ovary cells (CHO), in conjunction with a vector such as the major intermediate early gene promoter element from human cytomegalovirus is an effective expression system for antibodies (Foecking et al., Gene 45:101 (1986); Cockett et al., Bio/Technology 8:2 (1990)).

[0274] In bacterial systems, a number of expression vectors may be advantageously selected depending upon the use intended for the antibody molecule being expressed. For example, when a large quantity of such a protein is to be produced, for the generation of pharmaceutical compositions of an antibody molecule, vectors which direct the expression of high levels of fusion protein products that are readily purified may be desirable. Such vectors include, but are not limited, to the E. coli expression vector pUR278 (Ruther et al., EMBO J. 2:1791 (1983)), in which the antibody coding sequence may be ligated individually into the vector in frame with the lac Z coding region so that a fusion protein is produced; pIN vectors (Inouye & Inouye, Nucleic Acids Res. 13:3101-3109 (1985); Van Heeke & Schuster, J. Biol. Chem. 24:5503-5509 (1989)); and the like. pGEX vectors may also be used to express foreign polypeptides as fusion proteins with glutathione S-transferase (GST). In general, such fusion proteins are soluble and can easily be purified from lysed cells by adsorption and binding to matrix glutathione-agarose beads followed by elution in the presence of free glutathione. The pGEX vectors are designed to include thrombin or factor Xa protease cleavage sites so that the cloned target gene product can be released from the GST moiety.

[0275] In an insect system, Autographa californica nuclear polyhedrosis virus (AcNPV) is used as a vector to express foreign genes. The virus grows in Spodoptera frugiperda cells. The antibody coding sequence may be cloned individually into non-essential regions (for example the polyhedrin gene) of the virus and placed under control of an AcNPV promoter (for example the polyhedrin promoter).

[0276] In mammalian host cells, a number of viral-based expression systems may be utilized. In cases where an adenovirus is used as an expression vector, the antibody coding sequence of interest may be ligated to an adenovirus transcription/translation control complex, e.g., the late promoter and tripartite leader sequence. This chimeric gene may then be inserted in the adenovirus genome by in vitro or in vivo recombination. Insertion in a non-essential region of the viral genome (e.g., region E1 or E3) will result in a recombinant virus that is viable and capable of expressing the antibody molecule in infected hosts. (e.g., see Logan & Shenk, Proc. Natl. Acad. Sci. USA 81:355-359 (1984)). Specific initiation signals may also be required for efficient translation of inserted antibody coding sequences. These signals include the ATG initiation codon and adjacent sequences. Furthermore, the initiation codon must be in phase with the reading frame of the desired coding sequence to ensure translation of the entire insert. These exogenous translational control signals and initiation codons can be of a variety of origins, both natural and synthetic. The efficiency of expression may be enhanced by the inclusion of appropriate transcription enhancer elements, transcription terminators, etc. (see Bittner et al., Methods in Enzymol. 153:51-544 (1987)).

[0277] In addition, a host cell strain may be chosen which modulates the expression of the inserted sequences, or modifies and processes the gene product in the specific fashion desired. Such modifications (e.g., glycosylation) and processing (e.g., cleavage) of protein products may be important for the function of the protein. Different host cells have characteristic and specific mechanisms for the post-translational processing and modification of proteins and gene products. Appropriate cell lines or host systems can be chosen to ensure the correct modification and processing of the foreign protein expressed. To this end, eukaryotic host cells which possess the cellular machinery for proper processing of the primary transcript, glycosylation, and phosphorylation of the gene product may be used. Such mammalian host cells include but are not limited to CHO, VERY, BHK, Hela, COS, MDCK, 293, 3T3, WI38, and in particular, breast cancer cell lines such as, for example, BT483, Hs578T, HTB2, BT20 and T47D, and normal mammary gland cell line such as, for example, CRL7030 and Hs578Bst.

[0278] For long-term, high-yield production of recombinant proteins, stable expression is preferred. For example, cell lines which stably express the antibody molecule may be engineered. Rather than using expression vectors which contain viral origins of replication, host cells can be transformed with DNA controlled by appropriate expression control elements (e.g., promoter, enhancer, sequences, transcription terminators, polyadenylation sites, etc.), and a selectable marker. Following the introduction of the foreign DNA, engineered cells may be allowed to grow for 1-2 days in an enriched media, and then are switched to a selective media. The selectable marker in the recombinant plasmid confers resistance to the selection and allows cells to stably integrate the plasmid into their chromosomes and grow to form foci which in turn can be cloned and expanded into cell lines. This method may advantageously be used to engineer cell lines which express the antibody molecule. Such engineered cell lines may be particularly useful in screening and evaluation of compounds that interact directly or indirectly with the antibody molecule.

[0279] A number of selection systems may be used, including but not limited to the herpes simplex virus thymidine kinase (Wigler et al., Cell 11:223 (1977)), hypoxanthine-guanine phosphoribosyltransferase (Szybalska & Szybalski, Proc. Natl. Acad. Sci. USA 48:202 (1992)), and adenine phosphoribosyltransferase (Lowy et al., Cell 22:817 (1980)) genes can be employed in tk-, hgprt- or aprt-cells, respectively. Also, antimetabolite resistance can be used as the basis of selection for the following genes: dhfr, which confers resistance to methotrexate (Wigler et al., Natl. Acad. Sci. USA 77:357 (1980); O'Hare et al., Proc. Natl. Acad. Sci. USA 78:1527 (1981)); gpt, which confers resistance to mycophenolic acid (Mulligan & Berg, Proc. Natl. Acad. Sci. USA 78:2072 (1981)); neo, which confers resistance to the aminoglycoside G-418 Clinical Pharmacy 12:488-505; Wu and Wu, Biotherapy 3:87-95 (1991); Tolstoshev, Ann. Rev. Pharmacol. Toxicol. 32:573-596 (1993); Mulligan, Science 260:926-932 (1993); and Morgan and Anderson, Ann. Rev. Biochem. 62:191-217 (1993); May, 1993, TIB TECH 11(5):155-215 (1993)); and hygro, which confers resistance to hygromycin (Santerre et al., Gene 30:147 (1984)). Methods commonly known in the art of recombinant DNA technology may be routinely applied to select the desired recombinant clone, and such methods are described, for example, in Ausubel et al. (eds.), Current Protocols in Molecular Biology, John Wiley & Sons, NY (1993); Kriegler, Gene Transfer and Expression, A Laboratory Manual, Stockton Press, NY (1990); and in Chapters 12 and 13, Dracopoli et al. (eds), Current Protocols in Human Genetics, John Wiley & Sons, NY (1994); Colberre-Garapin et al., J. Mol. Biol. 150:1 (1981), which are incorporated by reference herein in their entireties.

[0280] The expression levels of an antibody molecule can be increased by vector amplification (for a review, see Bebbington and Hentschel, The use of vectors based on gene amplification for the expression of cloned genes in mammalian cells in DNA cloning, Vol.3. (Academic Press, New York, 1987)). When a marker in the vector system expressing antibody is amplifiable, increase in the level of inhibitor present in culture of host cell will increase the number of copies of the marker gene. Since the amplified region is associated with the antibody gene, production of the antibody will also increase (Crouse et al., Mol. Cell. Biol. 3:257 (1983)).

[0281] Vectors which use glutamine synthase (GS) or DHFR as the selectable markers can be amplified in the presence of the drugs methionine sulphoximine or methotrexate, respectively. An advantage of glutamine synthase based vectors are the availabilty of cell lines (e.g., the murine myeloma cell line, NS0) which are glutamine synthase negative. Glutamine synthase expression systems can also function in glutamine synthase expressing cells (e.g. Chinese Hamster Ovary (CHO) cells) by providing additional inhibitor to prevent the functioning of the endogenous gene. A glutamine synthase expression system and components thereof are detailed in PCT publications: WO87/04462; WO86/05807; WO89/01036; WO89/10404; and WO91/06657 which are incorporated in their entireties by reference herein. Additionally, glutamine synthase expression vectors that may be used according to the present invention are commercially available from suppliers, including, for example Lonza Biologics, Inc. (Portsmouth, N.H.). Expression and production of monoclonal antibodies using a GS expression system in murine myeloma cells is described in Bebbington et al., Bio/technology 10:169(1992) and in Biblia and Robinson Biotechnol. Prog. 11:1 (1995) which are incorporated in their entirities by reference herein.

[0282] The host cell may be co-transfected with two expression vectors of the invention, the first vector encoding a heavy chain derived polypeptide and the second vector encoding a light chain derived polypeptide. The two vectors may contain identical selectable markers which enable equal expression of heavy and light chain polypeptides. Alternatively, a single vector may be used which encodes, and is capable of expressing, both heavy and light chain polypeptides. In such situations, the light chain should be placed before the heavy chain to avoid an excess of toxic free heavy chain (Proudfoot, Nature 322:52 (1986); Kohler, Proc. Natl. Acad. Sci. USA 77:2197 (1980)). The coding sequences for the heavy and light chains may comprise cDNA or genomic DNA.

[0283] Once an antibody molecule of the invention has been produced by an animal, chemically synthesized, or recombinantly expressed, it may be purified by any method known in the art for purification of an immunoglobulin molecule, for example, by chromatography (e.g., ion exchange, affinity, particularly by affinity for the specific antigen after Protein A, and sizing column chromatography), centrifugation, differential solubility, or by any other standard technique for the purification of proteins. In addition, the antibodies of the present invention or fragments thereof can be fused to heterologous polypeptide sequences described herein or otherwise known in the art, to facilitate purification.

[0284] The present invention encompasses antibodies recombinantly fused or chemically conjugated (including both covalently and non-covalently conjugations) to a polypeptide (or portion thereof, preferably at least 10, 20, 30, 40, 50, 60, 70, 80, 90 or 100 amino acids of the polypeptide) of the present invention to generate fusion proteins. The fusion does not necessarily need to be direct, but may occur through linker sequences. The antibodies may be specific for antigens other than polypeptides (or portion thereof, preferably at least 10, 20, 30, 40, 50, 60, 70, 80, 90 or 100 amino acids of the polypeptide) of the present invention. For example, antibodies may be used to target the polypeptides of the present invention to particular cell types, either in vitro or in vivo, by fusing or conjugating the polypeptides of the present invention to antibodies specific for particular cell surface receptors. Antibodies fused or conjugated to the polypeptides of the present invention may also be used in in vitro immunoassays and purification methods using methods known in the art. See e.g., Harbor et al., supra, and PCT publication WO 93/21232; EP 439,095; Naramura et al., Immunol. Lett. 39:91-99 (1994); U.S. Pat. 5,474,981; Gillies et al., PNAS 89:1428-1432 (1992); Fell et al., J. Immunol. 146:2446-2452 (1991), which are incorporated by reference in their entireties.

[0285] The present invention further includes compositions comprising the polypeptides of the present invention fused or conjugated to antibody domains other than the variable regions. For example, the polypeptides of the present invention may be fused or conjugated to an antibody Fc region, or portion thereof. The antibody portion fused to a polypeptide of the present invention may comprise the constant region, hinge region, CH1 domain, CH2 domain, and CH3 domain or any combination of whole domains or portions thereof. The polypeptides may also be fused or conjugated to the above antibody portions to form multimers. For example, Fc portions fused to the polypeptides of the present invention can form dimers through disulfide bonding between the Fc portions. Higher multimeric forms can be made by fusing the polypeptides to portions of IgA and IgM. Methods for fusing or conjugating the polypeptides of the present invention to antibody portions are known in the art. See, e.g., U.S. Pat. Nos. 5,336,603; 5,622,929; 5,359,046; 5,349,053; 5,447,851; 5,112,946; EP 307,434; EP 367,166; PCT publications WO 96/04388; WO 91/06570; Ashkenazi et al., Proc. Natl. Acad. Sci. USA 88:10535-10539 (1991); Zheng et al., J. Immunol. 154:5590-5600 (1995); and Vil et al., Proc. Natl. Acad. Sci. USA 89:11337-11341 (1992) (said references incorporated by reference in their entireties).

[0286] As discussed, supra, the polypeptides corresponding to a polypeptide, polypeptide fragment, or a variant of SEQ ID NO:Y may be fused or conjugated to the above antibody portions to increase the in vivo half life of the polypeptides or for use in immunoassays using methods known in the art. Further, the polypeptides corresponding to SEQ ID NO:Y may be fused or conjugated to the above antibody portions to facilitate purification. One reported example describes chimeric proteins consisting of the first two domains of the human CD4-polypeptide and various domains of the constant regions of the heavy or light chains of mammalian immunoglobulins. See EP 394,827; and Traunecker et al., Nature 331:84-86 (1988). The polypeptides of the present invention fused or conjugated to an antibody having disulfide-linked dimeric structures (due to the IgG) may also be more efficient in binding and neutralizing other molecules, than the monomeric secreted protein or protein fragment alone. See, for example, Fountoulakis et al., J. Biochem. 270:3958-3964 (1995). In many cases, the Fc part in a fusion protein is beneficial in therapy and diagnosis, and thus can result in, for example, improved pharmacokinetic properties. See, for example, EP A 232,262. Alternatively, deleting the Fc part after the fusion protein has been expressed, detected, and purified, would be desired. For example, the Fc portion may hinder therapy and diagnosis if the fusion protein is used as an antigen for immunizations. In drug discovery, for example, human proteins, such as hIL-5, have been fused with Fc portions for the purpose of high-throughput screening assays to identify antagonists of hIL-5. (See, Bennett et al., J. Molecular Recognition 8:52-58 (1995); Johanson et al., J. Biol. Chem. 270:9459-9471 (1995)).

[0287] Moreover, the antibodies or fragments thereof of the present invention can be fused to marker sequences, such as a peptide to facilitate purification. In preferred embodiments, the marker amino acid sequence is a hexa-histidine peptide, such as the tag provided in a pQE vector (QIAGEN, Inc., 9259 Eton Avenue, Chatsworth, Calif., 91311), among others, many of which are commercially available. As described in Gentz et al., Proc. Natl. Acad. Sci. USA 86:821-824 (1989), for instance, hexa-histidine provides for convenient purification of the fusion protein. Other peptide tags useful for purification include, but are not limited to, the “HA” tag, which corresponds to an epitope derived from the influenza hemagglutinin protein (Wilson et al., Cell 37:767 (1984)) and the “flag” tag.

[0288] The present invention further encompasses antibodies or fragments thereof conjugated to a diagnostic or therapeutic agent. The antibodies can be used diagnostically to, for example, monitor the development or progression of a tumor as part of a clinical testing procedure to, e.g., determine the efficacy of a given treatment regimen. Detection can be facilitated by coupling the antibody to a detectable substance. Examples of detectable substances include various enzymes, prosthetic groups, fluorescent materials, luminescent materials, bioluminescent materials, radioactive materials, positron emitting metals using various positron emission tomographies, and nonradioactive paramagnetic metal ions. The detectable substance may be coupled or conjugated either directly to the antibody (or fragment thereof) or indirectly, through an intermediate (such as, for example, a linker known in the art) using techniques known in the art. See, for example, U.S. Pat. No. 4,741,900 for metal ions which can be conjugated to antibodies for use as diagnostics according to the present invention. Examples of suitable enzymes include horseradish peroxidase, alkaline phosphatase, beta-galactosidase, or acetylcholinesterase; examples of suitable prosthetic group complexes include streptavidin/biotin and avidin/biotin; examples of suitable fluorescent materials include umbelliferone, fluorescein, fluorescein isothiocyanate, rhodamine, dichlorotriazinylamine fluorescein, dansyl chloride or phycoerythrin; an example of a luminescent material includes luminol; examples of bioluminescent materials include luciferase, luciferin, and aequorin; and examples of suitable radioactive material include 125I, 131I, 111In or 99Tc.

[0289] Further, an antibody or fragment thereof may be conjugated to a therapeutic moiety such as a cytotoxin, e.g., a cytostatic or cytocidal agent, a therapeutic agent or a radioactive metal ion, e.g., alpha-emitters such as, for example, 213Bi. A cytotoxin or cytotoxic agent includes any agent that is detrimental to cells. Examples include paclitaxol, cytochalasin B, gramicidin D, ethidium bromide, emetine, mitomycin, etoposide, tenoposide, vincristine, vinblastine, colchicin, doxorubicin, daunorubicin, dihydroxy anthracin dione, mitoxantrone, mithramycin, actinomycin D, 1-dehydrotestosterone, glucocorticoids, procaine, tetracaine, lidocaine, propranolol, and puromycin and analogs or homologs thereof. Therapeutic agents include, but are not limited to, antimetabolites (e.g., methotrexate, 6-mercaptopurine, 6-thioguanine, cytarabine, 5-fluorouracil decarbazine), alkylating agents (e.g., mechlorethamine, thioepa chlorambucil, melphalan, carmustine (BSNU) and lomustine (CCNU), cyclothosphamide, busulfan, dibromomannitol, streptozotocin, mitomycin C, and cis-dichlorodiamine platinum (II) (DDP) cisplatin), anthracyclines (e.g., daunorubicin (formerly daunomycin) and doxorubicin), antibiotics (e.g., dactinomycin (formerly actinomycin), bleomycin, mithramycin, and anthramycin (AMC)), and anti-mitotic agents (e.g., vincristine and vinblastine).

[0290] The conjugates of the invention can be used for modifying a given biological response, the therapeutic agent or drug moiety is not to be construed as limited to classical chemical therapeutic agents. For example, the drug moiety may be a protein or polypeptide possessing a desired biological activity. Such proteins may include, for example, a toxin such as abrin, ricin A, pseudomonas exotoxin, or diphtheria toxin; a protein such as tumor necrosis factor, a-interferon, β-interferon, nerve growth factor, platelet derived growth factor, tissue plasminogen activator, an apoptotic agent, e.g., TNF-alpha, TNF-beta, AIM I (See, International Publication No. WO 97/33899), AIM II (See, International Publication No. WO 97/34911), Fas Ligand (Takahashi et al., Int. Immunol., 6:1567-1574 (1994)), VEGI (See, International Publication No. WO 99/23105), a thrombotic agent or an anti-angiogenic agent, e.g., angiostatin or endostatin; or, biological response modifiers such as, for example, lymphokines, interleukin-1 (“IL-1”), interleukin-2 (“IL-2”), interleukin-6 (“IL-6”), granulocyte macrophage colony stimulating factor (“GM-CSF”), granulocyte colony stimulating factor (“G-CSF”), or other growth factors.

[0291] Antibodies may also be attached to solid supports, which are particularly useful for immunoassays or purification of the target antigen. Such solid supports include, but are not limited to, glass, cellulose, polyacrylamide, nylon, polystyrene, polyvinyl chloride or polypropylene.

[0292] Techniques for conjugating such therapeutic moiety to antibodies are well known. See, for example, Arnon et al., “Monoclonal Antibodies For Immunotargeting Of Drugs In Cancer Therapy”, in Monoclonal Antibodies And Cancer Therapy, Reisfeld et al. (eds.), pp. 243-56 (Alan R. Liss, Inc. 1985); Hellstrom et al., “Antibodies For Drug Delivery”, in Controlled Drug Delivery (2nd Ed.), Robinson et al. (eds.), pp. 623-53 (Marcel Dekker, Inc. 1987); Thorpe, “Antibody Carriers Of Cytotoxic Agents In Cancer Therapy: A Review”, in Monoclonal Antibodies '84: Biological And Clinical Applications, Pinchera et al. (eds.), pp. 475-506 (1985); “Analysis, Results, And Future Prospective Of The Therapeutic Use Of Radiolabeled Antibody In Cancer Therapy”, in Monoclonal Antibodies For Cancer Detection And Therapy, Baldwin et al. (eds.), pp. 303-16 (Academic Press 1985), and Thorpe et al., “The Preparation And Cytotoxic Properties Of Antibody-Toxin Conjugates”, Immunol. Rev. 62:119-58 (1982).

[0293] Alternatively, an antibody can be conjugated to a second antibody to form an antibody heteroconjugate as described by Segal in U.S. Pat. No. 4,676,980, which is incorporated herein by reference in its entirety.

[0294] An antibody, with or without a therapeutic moiety conjugated to it, administered alone or in combination with cytotoxic factor(s) and/or cytokine(s) can be used as a therapeutic.

[0295] Immunophenotyping

[0296] The antibodies of the invention may be utilized for immunophenotyping of cell lines and biological samples. Translation products of the gene of the present invention may be useful as cell-specific markers, or more specifically as cellular markers that are differentially expressed at various stages of differentiation and/or maturation of particular cell types. Monoclonal antibodies directed against a specific epitope, or combination of epitopes, will allow for the screening of cellular populations expressing the marker. Various techniques can be utilized using monoclonal antibodies to screen for cellular populations expressing the marker(s), and include magnetic separation using antibody-coated magnetic beads, “panning” with antibody attached to a solid matrix (i.e., plate), and flow cytometry (See, e.g., U.S. Pat. 5,985,660; and Morrison et al., Cell, 96:737-49 (1999)).

[0297] These techniques allow for the screening of particular populations of cells, such as might be found with hematological malignancies (i.e. minimal residual disease (MRD) in acute leukemic patients) and “non-self” cells in transplantations to prevent Graft-versus-Host Disease (GVHD). Alternatively, these techniques allow for the screening of hematopoietic stem and progenitor cells capable of undergoing proliferation and/or differentiation, as might be found in human umbilical cord blood.

[0298] Assays For Antibody Binding

[0299] The antibodies of the invention may be assayed for immunospecific binding by any method known in the art. The immunoassays which can be used include but are not limited to competitive and non-competitive assay systems using techniques such as western blots, radioimmunoassays, ELISA (enzyme linked immunosorbent assay), “sandwich” immunoassays, immunoprecipitation assays, precipitin reactions, gel diffusion precipitin reactions, immunodiffusion assays, agglutination assays, complement-fixation assays, immunoradiometric assays, fluorescent immunoassays, and protein A immunoassays, to name but a few. Such assays are routine and well known in the art (see, e.g., Ausubel et al, eds, 1994, Current Protocols in Molecular Biology, Vol. 1, John Wiley & Sons, Inc., New York, which is incorporated by reference herein in its entirety). Exemplary immunoassays are described briefly below (but are not intended by way of limitation).

[0300] Immunoprecipitation protocols generally comprise lysing a population of cells in a lysis buffer such as RIPA buffer (1% NP-40 or Triton X-100, 1% sodium deoxycholate, 0.1% SDS, 0.15 M NaCl, 0.01 M sodium phosphate at pH 7.2, 1% Trasylol) supplemented with protein phosphatase and/or protease inhibitors (e.g., EDTA, PMSF, aprotinin, sodium vanadate), adding the antibody of interest to the cell lysate, incubating for a period of time (e.g., 1-4 hours) at 4° C., adding protein A and/or protein G sepharose beads to the cell lysate, incubating for about an hour or more at 4° C., washing the beads in lysis buffer and resuspending the beads in SDS/sample buffer. The ability of the antibody of interest to immunoprecipitate a particular antigen can be assessed by, e.g., western blot analysis. One of skill in the art would be knowledgeable as to the parameters that can be modified to increase the binding of the antibody to an antigen and decrease the background (e.g., pre-clearing the cell lysate with sepharose beads). For further discussion regarding immunoprecipitation protocols see, e.g., Ausubel et al., eds., (1994), Current Protocols in Molecular Biology, Vol. 1, John Wiley & Sons, Inc., New York, section 10.16.1.

[0301] Western blot analysis generally comprises preparing protein samples, electrophoresis of the protein samples in a polyacrylamide gel (e.g., 8%-20% SDS-PAGE depending on the molecular weight of the antigen), transferring the protein sample from the polyacrylamide gel to a membrane such as nitrocellulose, PVDF or nylon, blocking the membrane in blocking solution (e.g., PBS with 3% BSA or non-fat milk), washing the membrane in washing buffer (e.g., PBS-Tween 20), blocking the membrane with primary antibody (the antibody of interest) diluted in blocking buffer, washing the membrane in washing buffer, blocking the membrane with a secondary antibody (which recognizes the primary antibody, e.g., an anti-human antibody) conjugated to an enzymatic substrate (e.g., horseradish peroxidase or alkaline phosphatase) or radioactive molecule (e.g., 32P or 125I) diluted in blocking buffer, washing the membrane in wash buffer, and detecting the presence of the antigen. One of skill in the art would be knowledgeable as to the parameters that can be modified to increase the signal detected and to reduce the background noise. For further discussion regarding western blot protocols see, e.g., Ausubel et al, eds, (1994), Current Protocols in Molecular Biology, Vol. 1, John Wiley & Sons, Inc., New York, section 10.8.1.

[0302] ELISAs comprise preparing antigen, coating the well of a 96 well microtiter plate with the antigen, adding the antibody of interest conjugated to a detectable compound such as an enzymatic substrate (e.g., horseradish peroxidase or alkaline phosphatase) to the well and incubating for a period of time, and detecting the presence of the antigen. In ELISAs the antibody of interest does not have to be conjugated to a detectable compound; instead, a second antibody (which recognizes the antibody of interest) conjugated to a detectable compound may be added to the well. Further, instead of coating the well with the antigen, the antibody may be coated to the well. In this case, a second antibody conjugated to a detectable compound may be added following the addition of the antigen of interest to the coated well. One of skill in the art would be knowledgeable as to the parameters that can be modified to increase the signal detected as well as other variations of ELISAs known in the art. For further discussion regarding ELISAs see, e.g., Ausubel et al, eds, (1994), Current Protocols in Molecular Biology, Vol. 1, John Wiley & Sons, Inc., New York, section 11.2.1.

[0303] The binding affinity of an antibody to an antigen and the off-rate of an antibody-antigen interaction can be determined by competitive binding assays. One example of a competitive binding assay is a radioimmunoassay comprising the incubation of labeled antigen (e.g., 3H or 125I) with the antibody of interest in the presence of increasing amounts of unlabeled antigen, and the detection of the antibody bound to the labeled antigen. The affinity of the antibody of interest for a particular antigen and the binding off-rates can be determined from the data by scatchard plot analysis. Competition with a second antibody can also be determined using radioimmunoassays. In this case, the antigen is incubated with antibody of interest conjugated to a labeled compound (e.g., 3H or 125I) in the presence of increasing amounts of an unlabeled second antibody.

[0304] Antibodies of the invention may be characterized using immunocytochemisty methods on cells (e.g., mammalian cells, such as CHO cells) transfected with a vector enabling the expression of an antigen or with vector alone using techniques commonly known in the art. Antibodies that bind antigen transfected cells, but not vector-only transfected cells, are antigen specific.

[0305] Therapeutic Uses

[0306] The present invention is further directed to antibody-based therapies which involve administering antibodies of the invention to an animal, preferably a mammal, and most preferably a human, patient for treating one or more of the disclosed diseases, disorders, or conditions. Therapeutic compounds of the invention include, but are not limited to, antibodies of the invention (including fragments, analogs and derivatives thereof as described herein) and nucleic acids encoding antibodies of the invention (including fragments, analogs and derivatives thereof and anti-idiotypic antibodies as described herein). The antibodies of the invention can be used to treat, inhibit or prevent diseases, disorders or conditions associated with aberrant expression and/or activity of a polypeptide of the invention, including, but not limited to, any one or more of the diseases, disorders, or conditions described herein. The treatment and/or prevention of diseases, disorders, or conditions associated with aberrant expression and/or activity of a polypeptide of the invention includes, but is not limited to, alleviating symptoms associated with those diseases, disorders or conditions. Antibodies of the invention may be provided in pharmaceutically acceptable compositions as known in the art or as described herein.

[0307] In a specific and preferred embodiment, the present invention is directed to antibody-based therapies which involve administering antibodies of the invention to an animal, preferably a mammal, and most preferably a human, patient for treating one or more diseases, disorders, or conditions, including but not limited to: neural disorders, immune system disorders, muscular disorders, reproductive disorders, gastrointestinal disorders, pulmonary disorders, cardiovascular disorders, renal disorders, proliferative disorders, and/or cancerous diseases and conditions., and/or as described elsewhere herein. Therapeutic compounds of the invention include, but are not limited to, antibodies of the invention (e.g., antibodies directed to the full length protein expressed on the cell surface of a mammalian cell; antibodies directed to an epitope of a polypeptide of the invention (such as, for example, a predicted linear epitope shown in column 7 of Table 1A; or a conformational epitope, including fragments, analogs and derivatives thereof as described herein) and nucleic acids encoding antibodies of the invention (including fragments, analogs and derivatives thereof and anti-idiotypic antibodies as described herein). The antibodies of the invention can be used to treat, inhibit or prevent diseases, disorders or conditions associated with aberrant expression and/or activity of a polypeptide of the invention, including, but not limited to, any one or more of the diseases, disorders, or conditions described herein. The treatment and/or prevention of diseases, disorders, or conditions associated with aberrant expression and/or activity of a polypeptide of the invention includes, but is not limited to, alleviating symptoms associated with those diseases, disorders or conditions. Antibodies of the invention may be provided in pharmaceutically acceptable compositions as known in the art or as described herein.

[0308] A summary of the ways in which the antibodies of the present invention may be used therapeutically includes binding polynucleotides or polypeptides of the present invention locally or systemically in the body or by direct cytotoxicity of the antibody, e.g. as mediated by complement (CDC) or by effector cells (ADCC). Some of these approaches are described in more detail below. Armed with the teachings provided herein, one of ordinary skill in the art will know how to use the antibodies of the present invention for diagnostic, monitoring or therapeutic purposes without undue experimentation.

[0309] The antibodies of this invention may be advantageously utilized in combination with other monoclonal or chimeric antibodies, or with lymphokines or hematopoietic growth factors (such as, e.g., IL-2, IL-3 and IL-7), for example, which serve to increase the number or activity of effector cells which interact with the antibodies.

[0310] The antibodies of the invention may be administered alone or in combination with other types of treatments (e.g., radiation therapy, chemotherapy, hormonal therapy, immunotherapy and anti-tumor agents). Generally, administration of products of a species origin or species reactivity (in the case of antibodies) that is the same species as that of the patient is preferred. Thus, in a preferred embodiment, human antibodies, fragments derivatives, analogs, or nucleic acids, are administered to a human patient for therapy or prophylaxis.

[0311] It is preferred to use high affinity and/or potent in vivo inhibiting and/or neutralizing antibodies against polypeptides or polynucleotides of the present invention, fragments or regions thereof, for both immunoassays directed to and therapy of disorders related to polynucleotides or polypeptides, including fragments thereof, of the present invention. Such antibodies, fragments, or regions, will preferably have an affinity for polynucleotides or polypeptides of the invention, including fragments thereof. Preferred binding affinities include those with a dissociation constant or Kd less than 5×10⁻² M, 10⁻² M, 5×10⁻³ M, 10⁻³ M, 5×10⁻⁴ M, 10⁻⁴ M, 5×10⁻⁵ M, 10⁻⁵ M, 5×10⁻⁶ M, 10⁻⁶ M, 5×10⁻⁷ M, 10⁻⁷ M, 5×10⁻⁸ M, 10⁻⁸ M, 5×10⁻⁹ M, 10⁻⁹ M, 5×10⁻¹⁰ M, 10⁻¹⁰ M, 5×10⁻¹¹ M, 10⁻¹¹ M, 5×10⁻¹² M, 10⁻¹² M, 5×10⁻¹³ M, 10⁻¹³M, 5×10⁻¹⁴ M, 10⁻¹⁴ M, 5×10⁻¹⁵ M, and 10⁻¹⁵ M.

[0312] Gene Therapy

[0313] In a specific embodiment, nucleic acids comprising sequences encoding antibodies or functional derivatives thereof, are administered to treat, inhibit or prevent a disease or disorder associated with aberrant expression and/or activity of a polypeptide of the invention, by way of gene therapy. Gene therapy refers to therapy performed by the administration to a subject of an expressed or expressible nucleic acid. In this embodiment of the invention, the nucleic acids produce their encoded protein that mediates a therapeutic effect.

[0314] Any of the methods for gene therapy available in the art can be used according to the present invention. Exemplary methods are described below.

[0315] For general reviews of the methods of gene therapy, see Goldspiel et al., Clinical Pharmacy 12:488-505 (1993); Wu and Wu, Biotherapy 3:87-95 (1991); Tolstoshev, Ann. Rev. Pharmacol. Toxicol. 32:573-596 (1993); Mulligan, Science 260:926-932 (1993); and Morgan and Anderson, Ann. Rev. Biochem. 62:191-217 (1993); May, TIBTECH 11(5):155-215 (1993). Methods commonly known in the art of recombinant DNA technology which can be used are described in Ausubel et al. (eds.), Current Protocols in Molecular Biology, John Wiley & Sons, NY (1993); and Kriegler, Gene Transfer and Expression, A Laboratory Manual, Stockton Press, NY (1990).

[0316] In a preferred embodiment, the compound comprises nucleic acid sequences encoding an antibody, said nucleic acid sequences being part of expression vectors that express the antibody or fragments or chimeric proteins or heavy or light chains thereof in a suitable host. In particular, such nucleic acid sequences have promoters operably linked to the antibody coding region, said promoter being inducible or constitutive, and, optionally, tissue-specific. In another particular embodiment, nucleic acid molecules are used in which the antibody coding sequences and any other desired sequences are flanked by regions that promote homologous recombination at a desired site in the genome, thus providing for intrachromosomal expression of the antibody encoding nucleic acids (Koller and Smithies, Proc. Natl. Acad. Sci. USA 86:8932-8935 (1989); Zijlstra et al., Nature 342:435-438 (1989). In specific embodiments, the expressed antibody molecule is a single chain antibody; alternatively, the nucleic acid sequences include sequences encoding both the heavy and light chains, or fragments thereof, of the antibody.

[0317] Delivery of the nucleic acids into a patient may be either direct, in which case the patient is directly exposed to the nucleic acid or nucleic acid-carrying vectors, or indirect, in which case, cells are first transformed with the nucleic acids in vitro, then transplanted into the patient. These two approaches are known, respectively, as in vivo or ex vivo gene therapy.

[0318] In a specific embodiment, the nucleic acid sequences are directly administered in vivo, where it is expressed to produce the encoded product. This can be accomplished by any of numerous methods known in the art, e.g., by constructing them as part of an appropriate nucleic acid expression vector and administering it so that they become intracellular, e.g., by infection using defective or attenuated retrovirals or other viral vectors (see U.S. Pat. No. 4,980,286), or by direct injection of naked DNA, or by use of microparticle bombardment (e.g., a gene gun; Biolistic, Dupont), or coating with lipids or cell-surface receptors or transfecting agents, encapsulation in liposomes, microparticles, or microcapsules, or by administering them in linkage to a peptide which is known to enter the nucleus, by administering it in linkage to a ligand subject to receptor-mediated endocytosis (see, e.g., Wu and Wu, J. Biol. Chem. 262:4429-4432 (1987)) (which can be used to target cell types specifically expressing the receptors), etc. In another embodiment, nucleic acid-ligand complexes can be formed in which the ligand comprises a fusogenic viral peptide to disrupt endosomes, allowing the nucleic acid to avoid lysosomal degradation. In yet another embodiment, the nucleic acid can be targeted in vivo for cell specific uptake and expression, by targeting a specific receptor (see, e.g., PCT Publications WO 92/06180; WO 92/22635; WO92/20316; WO93/14188, WO 93/20221). Alternatively, the nucleic acid can be introduced intracellularly and incorporated within host cell DNA for expression, by homologous recombination (Koller and Smithies, Proc. Natl. Acad. Sci. USA 86:8932-8935 (1989); Zijlstra et al., Nature 342:435-438 (1989)).

[0319] In a specific embodiment, viral vectors that contains nucleic acid sequences encoding an antibody of the invention are used. For example, a retroviral vector can be used (see Miller et al., Meth. Enzymol. 217:581-599 (1993)). These retroviral vectors contain the components necessary for the correct packaging of the viral genome and integration into the host cell DNA. The nucleic acid sequences encoding the antibody to be used in gene therapy are cloned into one or more vectors, which facilitates delivery of the gene into a patient. More detail about retroviral vectors can be found in Boesen et al., Biotherapy 6:291-302 (1994), which describes the use of a retroviral vector to deliver the mdr1 gene to hematopoietic stem cells in order to make the stem cells more resistant to chemotherapy. Other references illustrating the use of retroviral vectors in gene therapy are: Clowes et al., J. Clin. Invest. 93:644-651 (1994); Kiem et al., Blood 83:1467-1473 (1994); Salmons and Gunzberg, Human Gene Therapy 4:129-141 (1993); and Grossman and Wilson, Curr. Opin. in Genetics and Devel. 3:110-114 (1993).

[0320] Adenoviruses are other viral vectors that can be used in gene therapy. Adenoviruses are especially attractive vehicles for delivering genes to respiratory epithelia. Adenoviruses naturally infect respiratory epithelia where they cause a mild disease. Other targets for adenovirus-based delivery systems are liver, the central nervous system, endothelial cells, and muscle. Adenoviruses have the advantage of being capable of infecting non-dividing cells. Kozarsky and Wilson, Current Opinion in Genetics and Development 3:499-503 (1993) present a review of adenovirus-based gene therapy. Bout et al., Human Gene Therapy 5:3-10 (1994) demonstrated the use of adenovirus vectors to transfer genes to the respiratory epithelia of rhesus monkeys. Other instances of the use of adenoviruses in gene therapy can be found in Rosenfeld et al., Science 252:431-434 (1991); Rosenfeld et al., Cell 68:143-155 (1992); Mastrangeli et al., J. Clin. Invest. 91:225-234 (1993); PCT Publication WO94/12649; and Wang, et al., Gene Therapy 2:775-783 (1995). In a preferred embodiment, adenovirus vectors are used.

[0321] Adeno-associated virus (AAV)has also been proposed for use in gene therapy (Walsh et al., Proc. Soc. Exp. Biol. Med. 204:289-300 (1993); U.S. Pat. No. 5,436,146).

[0322] Another approach to gene therapy involves transferring a gene to cells in tissue culture by such methods as electroporation, lipofection, calcium phosphate mediated transfection, or viral infection. Usually, the method of transfer includes the transfer of a selectable marker to the cells. The cells are then placed under selection to isolate those cells that have taken up and are expressing the transferred gene. Those cells are then delivered to a patient.

[0323] In this embodiment, the nucleic acid is introduced into a cell prior to administration in vivo of the resulting recombinant cell. Such introduction can be carried out by any method known in the art, including but not limited to transfection, electroporation, microinjection, infection with a viral or bacteriophage vector containing the nucleic acid sequences, cell fusion, chromosome-mediated gene transfer, microcell-mediated gene transfer, spheroplast fusion, etc. Numerous techniques are known in the art for the introduction of foreign genes into cells (see, e.g., Loeffler and Behr, Meth. Enzymol. 217:599-618 (1993); Cohen et al., Meth. Enzymol. 217:618-644 (1993); Cline, Pharmac. Ther. 29:69-92m (1985) and may be used in accordance with the present invention, provided that the necessary developmental and physiological functions of the recipient cells are not disrupted. The technique should provide for the stable transfer of the nucleic acid to the cell, so that the nucleic acid is expressible by the cell and preferably heritable and expressible by its cell progeny.

[0324] The resulting recombinant cells can be delivered to a patient by various methods known in the art. Recombinant blood cells (e.g., hematopoietic stem or progenitor cells) are preferably administered intravenously. The amount of cells envisioned for use depends on the desired effect, patient state, etc., and can be determined by one skilled in the art.

[0325] Cells into which a nucleic acid can be introduced for purposes of gene therapy encompass any desired, available cell type, and include but are not limited to epithelial cells, endothelial cells, keratinocytes, fibroblasts, muscle cells, hepatocytes; blood cells such as T lymphocytes, B lymphocytes, monocytes, macrophages, neutrophils, eosinophils, megakaryocytes, granulocytes; various stem or progenitor cells, in particular hematopoietic stem or progenitor cells, e.g., as obtained from bone marrow, umbilical cord blood, peripheral blood, fetal liver, etc.

[0326] In a preferred embodiment, the cell used for gene therapy is autologous to the patient.

[0327] In an embodiment in which recombinant cells are used in gene therapy, nucleic acid sequences encoding an antibody are introduced into the cells such that they are expressible by the cells or their progeny, and the recombinant cells are then administered in vivo for therapeutic effect. In a specific embodiment, stem or progenitor cells are used. Any stem and/or progenitor cells which can be isolated and maintained in vitro can potentially be used in accordance with this embodiment of the present invention (see e.g. PCT Publication WO 94/08598; Stemple and Anderson, Cell 71:973-985 (1992); Rheinwald, Meth. Cell Bio. 21A:229 (1980); and Pittelkow and Scott, Mayo Clinic Proc. 61:771 (1986)).

[0328] In a specific embodiment, the nucleic acid to be introduced for purposes of gene therapy comprises an inducible promoter operably linked to the coding region, such that expression of the nucleic acid is controllable by the presence or absence of an appropriate inducer of transcription.

[0329] Demonstration of Therapeutic or Prophylactic Activity

[0330] The compounds or pharmaceutical compositions of the invention are preferably tested in vitro, and then in vivo for the desired therapeutic or prophylactic activity, prior to use in humans. For example, in vitro assays to demonstrate the therapeutic or prophylactic utility of a compound or pharmaceutical composition include, the effect of a compound on a cell line or a patient tissue sample. The effect of the compound or composition on the cell line and/or tissue sample can be determined utilizing techniques known to those of skill in the art including, but not limited to, rosette formation assays and cell lysis assays. In accordance with the invention, in vitro assays which can be used to determine whether administration of a specific compound is indicated, include in vitro cell culture assays in which a patient tissue sample is grown in culture, and exposed to or otherwise administered a compound, and the effect of such compound upon the tissue sample is observed.

[0331] Therapeutic/Prophylactic Administration and Composition

[0332] The invention provides methods of treatment, inhibition and prophylaxis by administration to a subject of an effective amount of a compound or pharmaceutical composition of the invention, preferably a polypeptide or antibody of the invention. In a preferred embodiment, the compound is substantially purified (e.g., substantially free from substances that limit its effect or produce undesired side-effects). The subject is preferably an animal, including but not limited to animals such as cows, pigs, horses, chickens, cats, dogs, etc., and is preferably a mammal, and most preferably human.

[0333] Formulations and methods of administration that can be employed when the compound comprises a nucleic acid or an immunoglobulin are described above; additional appropriate formulations and routes of administration can be selected from among those described herein below.

[0334] Various delivery systems are known and can be used to administer a compound of the invention, e.g., encapsulation in liposomes, microparticles, microcapsules, recombinant cells capable of expressing the compound, receptor-mediated endocytosis (see, e.g., Wu and Wu, J. Biol. Chem. 262:4429-4432 (1987)), construction of a nucleic acid as part of a retroviral or other vector, etc. Methods of introduction include but are not limited to intradermal, intramuscular, intraperitoneal, intravenous, subcutaneous, intranasal, epidural, and oral routes. The compounds or compositions may be administered by any convenient route, for example by infusion or bolus injection, by absorption through epithelial or mucocutaneous linings (e.g., oral mucosa, rectal and intestinal mucosa, etc.) and may be administered together with other biologically active agents. Administration can be systemic or local. In addition, it may be desirable to introduce the pharmaceutical compounds or compositions of the invention into the central nervous system by any suitable route, including intraventricular and intrathecal injection; intraventricular injection may be facilitated by an intraventricular catheter, for example, attached to a reservoir, such as an Ommaya reservoir. Pulmonary administration can also be employed, e.g., by use of an inhaler or nebulizer, and formulation with an aerosolizing agent.

[0335] In a specific embodiment, it may be desirable to administer the pharmaceutical compounds or compositions of the invention locally to the area in need of treatment; this may be achieved by, for example, and not by way of limitation, local infusion during surgery, topical application, e.g., in conjunction with a wound dressing after surgery, by injection, by means of a catheter, by means of a suppository, or by means of an implant, said implant being of a porous, non-porous, or gelatinous material, including membranes, such as sialastic membranes, or fibers. Preferably, when administering a protein, including an antibody, of the invention, care must be taken to use materials to which the protein does not absorb.

[0336] In another embodiment, the compound or composition can be delivered in a vesicle, in particular a liposome (see Langer, Science 249:1527-1533 (1990); Treat et al., in Liposomes in the Therapy of Infectious Disease and Cancer, Lopez-Berestein and Fidler (eds.), Liss, New York, pp. 353-365 (1989); Lopez-Berestein, ibid., pp. 317-327; see generally ibid.)

[0337] In yet another embodiment, the compound or composition can be delivered in a controlled release system. In one embodiment, a pump may be used (see Langer, supra; Sefton, CRC Crit. Ref. Biomed. Eng. 14:201 (1987); Buchwald et al., Surgery 88:507 (1980); Saudek et al., N. Engl. J. Med. 321:574 (1989)). In another embodiment, polymeric materials can be used (see Medical Applications of Controlled Release, Langer and Wise (eds.), CRC Pres., Boca Raton, Fla. (1974); Controlled Drug Bioavailability, Drug Product Design and Performance, Smolen and Ball (eds.), Wiley, N.Y. (1984); Ranger and Peppas, J., Macromol. Sci. Rev. Macromol. Chem. 23:61 (1983); see also Levy et al., Science 228:190 (1985); During et al., Ann. Neurol. 25:351 (1989); Howard et al., J. Neurosurg. 71:105 (1989)). In yet another embodiment, a controlled release system can be placed in proximity of the therapeutic target, e.g., the brain, thus requiring only a fraction of the systemic dose (see, e.g., Goodson, in Medical Applications of Controlled Release, supra, vol. 2, pp. 115-138 (1984)).

[0338] Other controlled release systems are discussed in the review by Langer (Science 249:1527-1533 (1990)).

[0339] In a specific embodiment where the compound of the invention is a nucleic acid encoding a protein, the nucleic acid can be administered in vivo to promote expression of its encoded protein, by constructing it as part of an appropriate nucleic acid expression vector and administering it so that it becomes intracellular, e.g., by use of a retroviral vector (see U.S. Pat. No. 4,980,286), or by direct injection, or by use of microparticle bombardment (e.g., a gene gun; Biolistic, Dupont), or coating with lipids or cell-surface receptors or transfecting agents, or by administering it in linkage to a homeobox-like peptide which is known to enter the nucleus (see e.g., Joliot et al., Proc. Natl. Acad. Sci. USA 88:1864-1868 (1991)), etc. Alternatively, a nucleic acid can be introduced intracellularly and incorporated within host cell DNA for expression, by homologous recombination.

[0340] The present invention also provides pharmaceutical compositions. Such compositions comprise a therapeutically effective amount of a compound, and a pharmaceutically acceptable carrier. In a specific embodiment, the term “pharmaceutically acceptable” means approved by a regulatory agency of the Federal or a state government or listed in the U.S. Pharmacopeia or other generally recognized pharmacopeia for use in animals, and more particularly in humans. The term “carrier” refers to a diluent, adjuvant, excipient, or vehicle with which the therapeutic is administered. Such pharmaceutical carriers can be sterile liquids, such as water and oils, including those of petroleum, animal, vegetable or synthetic origin, such as peanut oil, soybean oil, mineral oil, sesame oil and the like. Water is a preferred carrier when the pharmaceutical composition is administered intravenously. Saline solutions and aqueous dextrose and glycerol solutions can also be employed as liquid carriers, particularly for injectable solutions. Suitable pharmaceutical excipients include starch, glucose, lactose, sucrose, gelatin, malt, rice, flour, chalk, silica gel, sodium stearate, glycerol monostearate, talc, sodium chloride, dried skim milk, glycerol, propylene, glycol, water, ethanol and the like. The composition, if desired, can also contain minor amounts of wetting or emulsifying agents, or pH buffering agents. These compositions can take the form of solutions, suspensions, emulsion, tablets, pills, capsules, powders, sustained-release formulations and the like. The composition can be formulated as a suppository, with traditional binders and carriers such as triglycerides. Oral formulation can include standard carriers such as pharmaceutical grades of mannitol, lactose, starch, magnesium stearate, sodium saccharine, cellulose, magnesium carbonate, etc. Examples of suitable pharmaceutical carriers are described in “Remington's Pharmaceutical Sciences” by E. W. Martin. Such compositions will contain a therapeutically effective amount of the compound, preferably in purified form, together with a suitable amount of carrier so as to provide the form for proper administration to the patient. The formulation should suit the mode of administration.

[0341] In a preferred embodiment, the composition is formulated in accordance with routine procedures as a pharmaceutical composition adapted for intravenous administration to human beings. Typically, compositions for intravenous administration are solutions in sterile isotonic aqueous buffer. Where necessary, the composition may also include a solubilizing agent and a local anesthetic such as lignocaine to ease pain at the site of the injection. Generally, the ingredients are supplied either separately or mixed together in unit dosage form, for example, as a dry lyophilized powder or water free concentrate in a hermetically sealed container such as an ampoule or sachette indicating the quantity of active agent. Where the composition is to be administered by infusion, it can be dispensed with an infusion bottle containing sterile pharmaceutical grade water or saline. Where the composition is administered by injection, an ampoule of sterile water for injection or saline can be provided so that the ingredients may be mixed prior to administration.

[0342] The compounds of the invention can be formulated as neutral or salt forms. Pharmaceutically acceptable salts include those formed with anions such as those derived from hydrochloric, phosphoric, acetic, oxalic, tartaric acids, etc., and those formed with cations such as those derived from sodium, potassium, ammonium, calcium, ferric hydroxides, isopropylamine, triethylamine, 2-ethylamino ethanol, histidine, procaine, etc.

[0343] The amount of the compound of the invention which will be effective in the treatment, inhibition and prevention of a disease or disorder associated with aberrant expression and/or activity of a polypeptide of the invention can be determined by standard clinical techniques. In addition, in vitro assays may optionally be employed to help identify optimal dosage ranges. The precise dose to be employed in the formulation will also depend on the route of administration, and the seriousness of the disease or disorder, and should be decided according to the judgment of the practitioner and each patient's circumstances. Effective doses may be extrapolated from dose-response curves derived from in vitro or animal model test systems.

[0344] For antibodies, the dosage administered to a patient is typically 0.1 mg/kg to 100 mg/kg of the patient's body weight. Preferably, the dosage administered to a patient is between 0.1 mg/kg and 20 mg/kg of the patient's body weight, more preferably 1 mg/kg to 10 mg/kg of the patient's body weight. Generally, human antibodies have a longer half-life within the human body than antibodies from other species due to the immune response to the foreign polypeptides. Thus, lower dosages of human antibodies and less frequent administration is often possible. Further, the dosage and frequency of administration of antibodies of the invention may be reduced by enhancing uptake and tissue penetration (e.g., into the brain) of the antibodies by modifications such as, for example, lipidation.

[0345] The invention also provides a pharmaceutical pack or kit comprising one or more containers filled with one or more of the ingredients of the pharmaceutical compositions of the invention. Optionally associated with such container(s) can be a notice in the form prescribed by a governmental agency regulating the manufacture, use or sale of pharmaceuticals or biological products, which notice reflects approval by the agency of manufacture, use or sale for human administration.

[0346] Diagnosis and Imaging

[0347] Labeled antibodies, and derivatives and analogs thereof, which specifically bind to a polypeptide of interest can be used for diagnostic purposes to detect, diagnose, or monitor diseases, disorders, and/or conditions associated with the aberrant expression and/or activity of a polypeptide of the invention. The invention provides for the detection of aberrant expression of a polypeptide of interest, comprising (a) assaying the expression of the polypeptide of interest in cells or body fluid of an individual using one or more antibodies specific to the polypeptide interest and (b) comparing the level of gene expression with a standard gene expression level, whereby an increase or decrease in the assayed polypeptide gene expression level compared to the standard expression level is indicative of aberrant expression.

[0348] The invention provides a diagnostic assay for diagnosing a disorder, comprising (a) assaying the expression of the polypeptide of interest in cells or body fluid of an individual using one or more antibodies specific to the polypeptide interest and (b) comparing the level of gene expression with a standard gene expression level, whereby an increase or decrease in the assayed polypeptide gene expression level compared to the standard expression level is indicative of a particular disorder. With respect to cancer, the presence of a relatively high amount of transcript in biopsied tissue from an individual may indicate a predisposition for the development of the disease, or may provide a means for detecting the disease prior to the appearance of actual clinical symptoms. A more definitive diagnosis of this type may allow health professionals to employ preventative measures or aggressive treatment earlier thereby preventing the development or further progression of the cancer.

[0349] Antibodies of the invention can be used to assay protein levels in a biological sample using classical immunohistological methods known to those of skill in the art (e.g., see Jalkanen et al., J. Cell. Biol. 101:976-985 (1985); Jalkanen et al., J. Cell . Biol. 105:3087-3096 (1987)). Other antibody-based methods useful for detecting protein gene expression include immunoassays, such as the enzyme linked immunosorbent assay (ELISA) and the radioimmunoassay (RIA). Suitable antibody assay labels are known in the art and include enzyme labels, such as, glucose oxidase; radioisotopes, such as iodine (125I, 121I), carbon (14C), sulfur (35 S), tritium (3H), indium (112In), and technetium (99Tc); luminescent labels, such as luminol; and fluorescent labels, such as fluorescein and rhodamine, and biotin.

[0350] One facet of the invention is the detection and diagnosis of a disease or disorder associated with aberrant expression of a polypeptide of interest in an animal, preferably a mammal and most preferably a human. In one embodiment, diagnosis comprises: a) administering (for example, parenterally, subcutaneously, or intraperitoneally) to a subject an effective amount of a labeled molecule which specifically binds to the polypeptide of interest; b) waiting for a time interval following the administering for permitting the labeled molecule to preferentially concentrate at sites in the subject where the polypeptide is expressed (and for unbound labeled molecule to be cleared to background level); c) determining background level; and d) detecting the labeled molecule in the subject, such that detection of labeled molecule above the background level indicates that the subject has a particular disease or disorder associated with aberrant expression of the polypeptide of interest. Background level can be determined by various methods including, comparing the amount of labeled molecule detected to a standard value previously determined for a particular system.

[0351] It will be understood in the art that the size of the subject and the imaging system used will determine the quantity of imaging moiety needed to produce diagnostic images. In the case of a radioisotope moiety, for a human subject, the quantity of radioactivity injected will normally range from about 5 to 20 millicuries of 99 mTc. The labeled antibody or antibody fragment will then preferentially accumulate at the location of cells which contain the specific protein. In vivo tumor imaging is described in S. W. Burchiel et al., “Immunopharmacokinetics of Radiolabeled Antibodies and Their Fragments.” (Chapter 13 in Tumor Imaging: The Radiochemical Detection of Cancer, S. W. Burchiel and B. A. Rhodes, eds., Masson Publishing Inc. (1982)).

[0352] Depending on several variables, including the type of label used and the mode of administration, the time interval following the administration for permitting the labeled molecule to preferentially concentrate at sites in the subject and for unbound labeled molecule to be cleared to background level is 6 to 48 hours or 6 to 24 hours or 6 to 12 hours. In another embodiment the time interval following administration is 5 to 20 days or 5 to 10 days.

[0353] In an embodiment, monitoring of the disease or disorder is carried out by repeating the method for diagnosing the disease or disease, for example, one month after initial diagnosis, six months after initial diagnosis, one year after initial diagnosis, etc.

[0354] Presence of the labeled molecule can be detected in the patient using methods known in the art for in vivo scanning. These methods depend upon the type of label used. Skilled artisans will be able to determine the appropriate method for detecting a particular label. Methods and devices that may be used in the diagnostic methods of the invention include, but are not limited to, computed tomography (CT), whole body scan such as position emission tomography (PET), magnetic resonance imaging (MRI), and sonography.

[0355] In a specific embodiment, the molecule is labeled with a radioisotope and is detected in the patient using a radiation responsive surgical instrument (Thurston et al., U.S. Pat. No. 5,441,050). In another embodiment, the molecule is labeled with a fluorescent compound and is detected in the patient using a fluorescence responsive scanning instrument. In another embodiment, the molecule is labeled with a positron emitting metal and is detected in the patent using positron emission-tomography. In yet another embodiment, the molecule is labeled with a paramagnetic label and is detected in a patient using magnetic resonance imaging (MRI).

[0356] Kits

[0357] The present invention provides kits that can be used in the above methods. In one embodiment, a kit comprises an antibody of the invention, preferably a purified antibody, in one or more containers. In a specific embodiment, the kits of the present invention contain a substantially isolated polypeptide comprising an epitope which is specifically immunoreactive with an antibody included in the kit. Preferably, the kits of the present invention further comprise a control antibody which does not react with the polypeptide of interest. In another specific embodiment, the kits of the present invention contain a means for detecting the binding of an antibody to a polypeptide of interest (e.g., the antibody may be conjugated to a detectable substrate such as a fluorescent compound, an enzymatic substrate, a radioactive compound or a luminescent compound, or a second antibody which recognizes the first antibody may be conjugated to a detectable substrate).

[0358] In another specific embodiment of the present invention, the kit is a diagnostic kit for use in screening serum containing antibodies specific against proliferative and/or cancerous polynucleotides and polypeptides. Such a kit may include a control antibody that does not react with the polypeptide of interest. Such a kit may include a substantially isolated polypeptide antigen comprising an epitope which is specifically immunoreactive with at least one anti-polypeptide antigen antibody. Further, such a kit includes means for detecting the binding of said antibody to the antigen (e.g., the antibody may be conjugated to a fluorescent compound such as fluorescein or rhodamine which can be detected by flow cytometry). In specific embodiments, the kit may include a recombinantly produced or chemically synthesized polypeptide antigen. The polypeptide antigen of the kit may also be attached to a solid support.

[0359] In a more specific embodiment the detecting means of the above-described kit includes a solid support to which said polypeptide antigen is attached. Such a kit may also include a non-attached reporter-labeled anti-human antibody. In this embodiment, binding of the antibody to the polypeptide antigen can be detected by binding of the said reporter-labeled antibody.

[0360] In an additional embodiment, the invention includes a diagnostic kit for use in screening serum containing antigens of the polypeptide of the invention. The diagnostic kit includes a substantially isolated antibody specifically immunoreactive with polypeptide or polynucleotide antigens, and means for detecting the binding of the polynucleotide or polypeptide antigen to the antibody. In one embodiment, the antibody is attached to a solid support. In a specific embodiment, the antibody may be a monoclonal antibody. The detecting means of the kit may include a second, labeled monoclonal antibody. Alternatively, or in addition, the detecting means may include a labeled, competing antigen.

[0361] In one diagnostic configuration, test serum is reacted with a solid phase reagent having a surface-bound antigen obtained by the methods of the present invention. After binding with specific antigen antibody to the reagent and removing unbound serum components by washing, the reagent is reacted with reporter-labeled anti-human antibody to bind reporter to the reagent in proportion to the amount of bound anti-antigen antibody on the solid support. The reagent is again washed to remove unbound labeled antibody, and the amount of reporter associated with the reagent is determined. Typically, the reporter is an enzyme which is detected by incubating the solid phase in the presence of a suitable fluorometric, luminescent or colorimetric substrate (Sigma, St. Louis, Mo.).

[0362] The solid surface reagent in the above assay is prepared by known techniques for attaching protein material to solid support material, such as polymeric beads, dip sticks, 96-well plate or filter material. These attachment methods generally include non-specific adsorption of the protein to the support or covalent attachment of the protein, typically through a free amine group, to a chemically reactive group on the solid support, such as an activated carboxyl, hydroxyl, or aldehyde group. Alternatively, streptavidin coated plates can be used in conjunction with biotinylated antigen(s).

[0363] Thus, the invention provides an assay system or kit for carrying out this diagnostic method. The kit generally includes a support with surface- bound recombinant antigens, and a reporter-labeled anti-human antibody for detecting surface-bound anti-antigen antibody.

[0364] Uses of the Polynucleotides

[0365] Each of the polynucleotides identified herein can be used in numerous ways as reagents. The following description should be considered exemplary and utilizes known techniques.

[0366] The polynucleotides of the present invention are useful for chromosome identification. There exists an ongoing need to identify new chromosome markers, since few chromosome marking reagents, based on actual sequence data (repeat polymorphisms), are presently available. Each sequence is specifically targeted to and can hybridize with a particular location on an individual human chromosome, thus each polynucleotide of the present invention can routinely be used as a chromosome marker using techniques known in the art. Table 1A, column 9 provides the chromosome location of some of the polynucleotides of the invention.

[0367] Briefly, sequences can be mapped to chromosomes by preparing PCR primers (preferably at least 15 bp (e.g., 15-25 bp) from the sequences shown in SEQ ID NO:X. Primers can optionally be selected using computer analysis so that primers do not span more than one predicted exon in the genomic DNA. These primers are then used for PCR screening of somatic cell hybrids containing individual human chromosomes. Only those hybrids containing the human gene corresponding to SEQ ID NO:X will yield an amplified fragment.

[0368] Similarly, somatic hybrids provide a rapid method of PCR mapping the polynucleotides to particular chromosomes. Three or more clones can be assigned per day using a single thermal cycler. Moreover, sublocalization of the polynucleotides can be achieved with panels of specific chromosome fragments. Other gene mapping strategies that can be used include in situ hybridization, prescreening with labeled flow-sorted chromosomes, preselection by hybridization to construct chromosome specific-cDNA libraries, and computer mapping techniques (See, e.g., Shuler, Trends Biotechnol 16:456-459 (1998) which is hereby incorporated by reference in its entirety).

[0369] Precise chromosomal location of the polynucleotides can also be achieved using fluorescence in situ hybridization (FISH) of a metaphase chromosomal spread. This technique uses polynucleotides as short as 500 or 600 bases; however, polynucleotides 2,000-4,000 bp are preferred. For a review of this technique, see Verma et al., “Human Chromosomes: a Manual of Basic Techniques,” Pergamon Press, New York (1988).

[0370] For chromosome mapping, the polynucleotides can be used individually (to mark a single chromosome or a single site on that chromosome) or in panels (for marking multiple sites and/or multiple chromosomes).

[0371] Thus, the present invention also provides a method for chromosomal localization which involves (a) preparing PCR primers from the polynucleotide sequences in Table 1A and/or Table 2 and SEQ ID NO:X and (b) screening somatic cell hybrids containing individual chromosomes.

[0372] The polynucleotides of the present invention would likewise be useful for radiation hybrid mapping, HAPPY mapping, and long range restriction mapping. For a review of these techniques and others known in the art, see, e.g. Dear, “Genome Mapping: A Practical Approach,” IRL Press at Oxford University Press, London (1997); Aydin, J. Mol. Med. 77:691-694 (1999); Hacia et al., Mol. Psychiatry 3:483-492 (1998); Herrick et al., Chromosome Res. 7:409-423 (1999); Hamilton et al., Methods Cell Biol. 62:265-280 (2000); and/or Ott, J. Hered. 90:68-70 (1999) each of which is hereby incorporated by reference in its entirety.

[0373] Once a polynucleotide has been mapped to a precise chromosomal location, the physical position of the polynucleotide can be used in linkage analysis. Linkage analysis establishes coinheritance between a chromosomal location and presentation of a particular disease. (Disease mapping data are found, for example, in V. McKusick, Mendelian Inheritance in Man (available on line through Johns Hopkins University Welch Medical Library)). Column 10 of Table 1A provides an OMIM reference identification number of diseases associated with the cytologic band disclosed in column 9 of Table 1A, as determined using techniques described herein and by reference to Table 5. Assuming 1 megabase mapping resolution and one gene per 20 kb, a cDNA precisely localized to a chromosomal region associated with the disease could be one of 50-500 potential causative genes.

[0374] Thus, once coinheritance is established, differences in a polynucleotide of the invention and the corresponding gene between affected and unaffected individuals can be examined. First, visible structural alterations in the chromosomes, such as deletions or translocations, are examined in chromosome spreads or by PCR. If no structural alterations exist, the presence of point mutations are ascertained. Mutations observed in some or all affected individuals, but not in normal individuals, indicates that the mutation may cause the disease. However, complete sequencing of the polypeptide and the corresponding gene from several normal individuals is required to distinguish the mutation from a polymorphism. If a new polymorphism is identified, this polymorphic polypeptide can be used for further linkage analysis.

[0375] Furthermore, increased or decreased expression of the gene in affected individuals as compared to unaffected individuals can be assessed using the polynucleotides of the invention. Any of these alterations (altered expression, chromosomal rearrangement, or mutation) can be used as a diagnostic or prognostic marker. Diagnostic and prognostic methods, kits and reagents encompassed by the present invention are briefly described below and more thoroughly elsewhere herein (see e.g., the sections labeled “Antibodies”, “Diagnostic Assays”, and “Methods for Detecting Diseases”).

[0376] Thus, the invention also provides a diagnostic method useful during diagnosis of a disorder, involving measuring the expression level of polynucleotides of the present invention in cells or body fluid from an individual and comparing the measured gene expression level with a standard level of polynucleotide expression level, whereby an increase or decrease in the gene expression level compared to the standard is indicative of a disorder. Additional non-limiting examples of diagnostic methods encompassed by the present invention are more thoroughly described elsewhere herein (see, e.g., Example 12).

[0377] In still another embodiment, the invention includes a kit for analyzing samples for the presence of proliferative and/or cancerous polynucleotides derived from a test subject. In a general embodiment, the kit includes at least one polynucleotide probe containing a nucleotide sequence that will specifically hybridize with a polynucleotide of the invention and a suitable container. In a specific embodiment, the kit includes two polynucleotide probes defining an internal region of the polynucleotide of the invention, where each probe has one strand containing a 31′mer-end internal to the region. In a further embodiment, the probes may be useful as primers for polymerase chain reaction amplification.

[0378] Where a diagnosis of a related disorder, including, for example, diagnosis of a tumor, has already been made according to conventional methods, the present invention is useful as a prognostic indicator, whereby patients exhibiting enhanced or depressed polynucleotide of the invention expression will experience a worse clinical outcome relative to patients expressing the gene at a level nearer the standard level.

[0379] By “measuring the expression level of polynucleotides of the invention” is intended qualitatively or quantitatively measuring or estimating the level of the polypeptide of the invention or the level of the mRNA encoding the polypeptide of the invention in a first biological sample either directly (e.g., by determining or estimating absolute protein level or mRNA level) or relatively (e.g., by comparing to the polypeptide level or mRNA level in a second biological sample). Preferably, the polypeptide level or mRNA level in the first biological sample is measured or estimated and compared to a standard polypeptide level or mRNA level, the standard being taken from a second biological sample obtained from an individual not having the related disorder or being determined by averaging levels from a population of individuals not having a related disorder. As will be appreciated in the art, once a standard polypeptide level or mRNA level is known, it can be used repeatedly as a standard for comparison.

[0380] By “biological sample” is intended any biological sample obtained from an individual, body fluid, cell line, tissue culture, or other source which contains polypeptide of the present invention or the corresponding mRNA. As indicated, biological samples include body fluids (such as semen, lymph, vaginal pool, sera, plasma, urine, synovial fluid and spinal fluid) which contain the polypeptide of the present invention, and tissue sources found to express the polypeptide of the present invention. Methods for obtaining tissue biopsies and body fluids from mammals are well known in the art. Where the biological sample is to include mRNA, a tissue biopsy is the preferred source.

[0381] The method(s) provided above may preferably be applied in a diagnostic method and/or kits in which polynucleotides and/or polypeptides of the invention are attached to a solid support. In one exemplary method, the support may be a “gene chip” or a “biological chip” as described in U.S. Pat. Nos. 5,837,832, 5,874,219, and 5,856,174. Further, such a gene chip with polynucleotides of the invention attached may be used to identify polymorphisms between the isolated polynucleotide sequences of the invention, with polynucleotides isolated from a test subject. The knowledge of such polymorphisms (i.e. their location, as well as, their existence) would be beneficial in identifying disease loci for many disorders, such as for example, in neural disorders, immune system disorders, muscular disorders, reproductive disorders, gastrointestinal disorders, pulmonary disorders, digestive disorders, metabolic disorders, cardiovascular disorders, renal disorders, proliferative disorders, and/or cancerous diseases and conditions. Such a method is described in U.S. Pat. Nos. 5,858,659 and 5,856,104. The U.S. patents referenced supra are hereby incorporated by reference in their entirety herein.

[0382] The present invention encompasses polynucleotides of the present invention that are chemically synthesized, or reproduced as peptide nucleic acids (PNA), or according to other methods known in the art. The use of PNAs would serve as the preferred form if the polynucleotides of the invention are incorporated onto a solid support, or gene chip. For the purposes of the present invention, a peptide nucleic acid (PNA) is a polyamide type of DNA analog and the monomeric units for adenine, guanine, thymine and cytosine are available commercially (Perceptive Biosystems). Certain components of DNA, such as phosphorus, phosphorus oxides, or deoxyribose derivatives, are not present in PNAs. As disclosed by Nielsen et al., Science 254, 1497 (1991); and Egholm et al., Nature 365, 666 (1993), PNAs bind specifically and tightly to complementary DNA strands and are not degraded by nucleases. In fact, PNA binds more strongly to DNA than DNA itself does. This is probably because there is no electrostatic repulsion between the two strands, and also the polyamide backbone is more flexible. Because of this, PNA/DNA duplexes bind under a wider range of stringency conditions than DNA/DNA duplexes, making it easier to perform multiplex hybridization. Smaller probes can be used than with DNA due to the strong binding. In addition, it is more likely that single base mismatches can be determined with PNA/DNA hybridization because a single mismatch in a PNA/DNA 15-mer lowers the melting point (T.sub.m) by 8°-20° C., vs. 4°-16° C. for the DNA/DNA 15-mer duplex. Also, the absence of charge groups in PNA means that hybridization can be done at low ionic strengths and reduce possible interference by salt during the analysis.

[0383] The compounds of the present invention have uses which include, but are not limited to, detecting cancer in mammals. In particular the invention is useful during diagnosis of pathological cell proliferative neoplasias which include, but are not limited to: acute myelogenous leukemias including acute monocytic leukemia, acute myeloblastic leukemia, acute promyelocytic leukemia, acute myelomonocytic leukemia, acute erythroleukemia, acute megakaryocytic leukemia, and acute undifferentiated leukemia, etc.; and chronic myelogenous leukemias including chronic myelomonocytic leukemia, chronic granulocytic leukemia, etc. Preferred mammals include monkeys, apes, cats, dogs, cows, pigs, horses, rabbits and humans. Particularly preferred are humans.

[0384] Pathological cell proliferative disorders are often associated with inappropriate activation of proto-oncogenes. (Gelmann, E. P. et al., “The Etiology of Acute Leukemia: Molecular Genetics and Viral Oncology,” in Neoplastic Diseases of the Blood, Vol 1., Wiemik, P. H. et al. eds., 161-182 (1985)). Neoplasias are now believed to result from the qualitative alteration of a normal cellular gene product, or from the quantitative modification of gene expression by insertion into the chromosome of a viral sequence, by chromosomal translocation of a gene to a more actively transcribed region, or by some other mechanism. (Gelmann et al., supra) It is likely that mutated or altered expression of specific genes is involved in the pathogenesis of some leukemias, among other tissues and cell types. (Gelmann et al., supra) Indeed, the human counterparts of the oncogenes involved in some animal neoplasias have been amplified or translocated in some cases of human leukemia and carcinoma. (Gelmann et al., supra).

[0385] For example, c-myc expression is highly amplified in the non-lymphocytic leukemia cell line HL-60. When HL-60 cells are chemically induced to stop proliferation, the level of c-myc is found to be downregulated. (International Publication Number WO 91/15580). However, it has been shown that exposure of HL-60 cells to a DNA construct that is complementary to the 5′ end of c-myc or c-myb blocks translation of the corresponding mRNAs which downregulates expression of the c-myc or c-myb proteins and causes arrest of cell proliferation and differentiation of the treated cells. (International Publication Number WO 91/15580; Wickstrom et al., Proc. Natl. Acad. Sci. 85:1028 (1988); Anfossi et al., Proc. Natl. Acad. Sci. 86:3379 (1989)). However, the skilled artisan would appreciate the present invention's usefulness is not be limited to treatment, prevention, and/or prognosis of proliferative disorders of cells and tissues of hematopoietic origin, in light of the numerous cells and cell types of varying origins which are known to exhibit proliferative phenotypes.

[0386] In addition to the foregoing, a polynucleotide of the present invention can be used to control gene expression through triple helix formation or through antisense DNA or RNA. Antisense techniques are discussed, for example, in Okano, J. Neurochem. 56:560 (1991); “Oligodeoxynucleotides as Antisense Inhibitors of Gene Expression, CRC Press, Boca Raton, Fla. (1988). Triple helix formation is discussed in, for instance Lee et al., Nucleic Acids Research 6:3073 (1979); Cooney et al., Science 241:456 (1988); and Dervan et al., Science 251:1360 (1991). Both methods rely on binding of the polynucleotide to a complementary DNA or RNA. For these techniques, preferred polynucleotides are usually oligonucleotides 20 to 40 bases in length and complementary to either the region of the gene involved in transcription (triple helix—see Lee et al., Nucl. Acids Res. 6:3073 (1979); Cooney et al., Science 241:456 (1988); and Dervan et al., Science 251:1360 (1991)) or to the mRNA itself (antisense—Okano, J. Neurochem. 56:560 (1991); Oligodeoxy-nucleotides as Antisense Inhibitors of Gene Expression, CRC Press, Boca Raton, Fla. (1988)). Triple helix formation optimally results in a shut-off of RNA transcription from DNA, while antisense RNA hybridization blocks translation of an mRNA molecule into polypeptide. The oligonucleotide described above can also be delivered to cells such that the antisense RNA or DNA may be expressed in vivo to inhibit production of polypeptide of the present invention antigens. Both techniques are effective in model systems, and the information disclosed herein can be used to design antisense or triple helix polynucleotides in an effort to treat disease, and in particular, for the treatment of proliferative diseases and/or conditions. Non-limiting antisense and triple helix methods encompassed by the present invention are more thoroughly described elsewhere herein (see, e.g., the section labeled “Antisense and Ribozyme (Antagonists)”).

[0387] Polynucleotides of the present invention are also useful in gene therapy. One goal of gene therapy is to insert a normal gene into an organism having a defective gene, in an effort to correct the genetic defect. The polynucleotides disclosed in the present invention offer a means of targeting such genetic defects in a highly accurate manner. Another goal is to insert a new gene that was not present in the host genome, thereby producing a new trait in the host cell. Additional non-limiting examples of gene therapy methods encompassed by the present invention are more thoroughly described elsewhere herein (see, e.g., the sections labeled “Gene Therapy Methods”, and Examples 16, 17 and 18).

[0388] The polynucleotides are also useful for identifying individuals from minute biological samples. The United States military, for example, is considering the use of restriction fragment length polymorphism (RFLP) for identification of its personnel. In this technique, an individual's genomic DNA is digested with one or more restriction enzymes, and probed on a Southern blot to yield unique bands for identifying personnel. This method does not suffer from the current limitations of “Dog Tags” which can be lost, switched, or stolen, making positive identification difficult. The polynucleotides of the present invention can be used as additional DNA markers for RFLP.

[0389] The polynucleotides of the present invention can also be used as an alternative to RFLP, by determining the actual base-by-base DNA sequence of selected portions of an individual's genome. These sequences can be used to prepare PCR primers for amplifying and isolating such selected DNA, which can then be sequenced. Using this technique, individuals can be identified because each individual will have a unique set of DNA sequences. Once an unique ID database is established for an individual, positive identification of that individual, living or dead, can be made from extremely small tissue samples.

[0390] Forensic biology also benefits from using DNA-based identification techniques as disclosed herein. DNA sequences taken from very small biological samples such as tissues, e.g., hair or skin, or body fluids, e.g., blood, saliva, semen, synovial fluid, amniotic fluid, breast milk, lymph, pulmonary sputum or surfactant, urine, fecal matter, etc., can be amplified using PCR. In one prior art technique, gene sequences amplified from polymorphic loci, such as DQa class II HLA gene, are used in forensic biology to identify individuals. (Erlich, H., PCR Technology, Freeman and Co. (1992)). Once these specific polymorphic loci are amplified, they are digested with one or more restriction enzymes, yielding an identifying set of bands on a Southern blot probed with DNA corresponding to the DQa class II HLA gene. Similarly, polynucleotides of the present invention can be used as polymorphic markers for forensic purposes.

[0391] There is also a need for reagents capable of identifying the source of a particular tissue. Such need arises, for example, in forensics when presented with tissue of unknown origin. Appropriate reagents can comprise, for example, DNA probes or primers prepared from the sequences of the present invention, specific to tissues, including but not limited to those shown in Table 1A. Panels of such reagents can identify tissue by species and/or by organ type. In a similar fashion, these reagents can be used to screen tissue cultures for contamination. Additional non-limiting examples of such uses are further described herein.

[0392] The polynucleotides of the present invention are also useful as hybridization probes for differential identification of the tissue(s) or cell type(s) present in a biological sample. Similarly, polypeptides and antibodies directed to polypeptides of the present invention are useful to provide immunological probes for differential identification of the tissue(s) (e.g., immunohistochemistry assays) or cell type(s) (e.g., immunocytochemistry assays). In addition, for a number of disorders of the above tissues or cells, significantly higher or lower levels of gene expression of the polynucleotides/polypeptides of the present invention may be detected in certain tissues (e.g., tissues expressing polypeptides and/or polynucleotides of the present invention, for example, those disclosed in column 8 of Table 1A, and/or cancerous and/or wounded tissues) or bodily fluids (e.g., semen, lymph, vaginal pool, serum, plasma, urine, synovial fluid or spinal fluid) taken from an individual having such a disorder, relative to a “standard” gene expression level, i.e., the expression level in healthy tissue from an individual not having the disorder.

[0393] Thus, the invention provides a diagnostic method of a disorder, which involves: (a) assaying gene expression level in cells or body fluid of an individual; (b) comparing the gene expression level with a standard gene expression level, whereby an increase or decrease in the assayed gene expression level compared to the standard expression level is indicative of a disorder.

[0394] In the very least, the polynucleotides of the present invention can be used as molecular weight markers on Southern gels, as diagnostic probes for the presence of a specific mRNA in a particular cell type, as a probe to “subtract-out” known sequences in the process of discovering novel polynucleotides, for selecting and making oligomers for attachment to a “gene chip” or other support, to raise anti-DNA antibodies using DNA immunization techniques, and as an antigen to elicit an immune response.

[0395] Uses of the Polypeptides

[0396] Each of the polypeptides identified herein can be used in numerous ways. The following description should be considered exemplary and utilizes known techniques.

[0397] Polypeptides and antibodies directed to polypeptides of the present invention are useful to provide immunological probes for differential identification of the tissue(s) (e.g., immunohistochemistry assays such as, for example, ABC immunoperoxidase (Hsu et al., J. Histochem. Cytochem. 29:577-580 (1981)) or cell type(s) (e.g., immunocytochemistry assays).

[0398] Antibodies can be used to assay levels of polypeptides encoded by polynucleotides of the invention in a biological sample using classical immunohistological methods known to those of skill in the art (e.g., see Jalkanen, et al., J. Cell. Biol. 101:976-985 (1985); Jalkanen, et al., J. Cell. Biol. 105:3087-3096 (1987)). Other antibody-based methods useful for detecting protein gene expression include immunoassays, such as the enzyme linked immunosorbent assay (ELISA) and the radioimmunoassay (RIA). Suitable antibody assay labels are known in the art and include enzyme labels, such as, glucose oxidase; radioisotopes, such as iodine (¹³¹I, ¹²⁵I, ¹²³I, ¹²¹I), carbon (¹⁴C), sulfur (³⁵S), tritium (³H), indium (^{115m}In, ^{113m}In, ¹¹²In, ¹¹¹In), and technetium (⁹⁹Tc, ^{99m}Tc), thallium (²⁰¹Ti), gallium (⁶⁸Ga, ⁶⁷Ga), palladium (¹⁰³Pd), molybdenum (⁹⁹Mo), xenon (¹³³Xe), fluorine (¹⁸F), ¹⁵³Sm, ¹⁷⁷Lu, ¹⁵⁹Gd, ¹⁴⁹Pm, ¹⁴⁰La, ¹⁷⁵Yb, ¹⁶⁶Ho, ⁹⁰Y, ⁴⁷Sc, ¹⁸⁶Re, ¹⁸⁸Re, ¹⁴²Pr, ¹⁰⁵Rh, ⁹⁷Ru; luminescent labels, such as luminol; and fluorescent labels, such as fluorescein and rhodamine, and biotin.

[0399] In addition to assaying levels of polypeptide of the present invention in a biological sample, proteins can also be detected in vivo by imaging. Antibody labels or markers for in vivo imaging of protein include those detectable by X-radiography, NMR or ESR. For X-radiography, suitable labels include radioisotopes such as barium or cesium, which emit detectable radiation but are not overtly harmful to the subject. Suitable markers for NMR and ESR include those with a detectable characteristic spin, such as deuterium, which may be incorporated into the antibody by labeling of nutrients for the relevant hybridoma.

[0400] A protein-specific antibody or antibody fragment which has been labeled with an appropriate detectable imaging moiety, such as a radioisotope (for example, ¹³¹I, ¹¹²In, ^{99m}Tc, (¹³¹I, ¹²⁵I, ¹²³I, ¹²¹I), carbon (¹⁴C), sulfur (³⁵S), tritium (³H), indium (^{115m}In, ^{113m}In, ¹¹²In, ¹¹¹In), and technetium (⁹⁹Tc, ^{99m}Tc), thallium (²⁰¹Ti), gallium (⁶⁸Ga, ⁶⁷Ga), palladium (¹⁰³Pd), molybdenum (99Mo), xenon (¹³³Xe), fluorine (¹⁸F, ¹⁵³Sm, ¹⁷⁷Lu, ¹⁵⁹Gd, ¹⁴⁹Pm, ¹⁴⁰La, ¹⁷⁵Yb, ¹⁶⁶Ho, ⁹⁰Y, ⁴⁷Sc, ¹⁸⁶Re, ¹⁸⁸Re, ¹⁴²Pr, ¹⁰⁵Rh, ⁹⁷Ru), a radio-opaque substance, or a material detectable by nuclear magnetic resonance, is introduced (for example, parenterally, subcutaneously or intraperitoneally) into the mammal to be examined for immune system disorder. It will be understood in the art that the size of the subject and the imaging system used will determine the quantity of imaging moiety needed to produce diagnostic images. In the case of a radioisotope moiety, for a human subject, the quantity of radioactivity injected will normally range from about 5 to 20 millicuries of ^{99m}Tc. The labeled antibody or antibody fragment will then preferentially accumulate at the location of cells which express the polypeptide encoded by a polynucleotide of the invention. In vivo tumor imaging is described in S. W. Burchiel et al., “Immunopharmacokinetics of Radiolabeled Antibodies and Their Fragments” (Chapter 13 in Tumor Imaging: The Radiochemical Detection of Cancer, S. W. Burchiel and B. A. Rhodes, eds., Masson Publishing Inc. (1982)).

[0401] In one embodiment, the invention provides a method for the specific delivery of compositions of the invention to cells by administering polypeptides of the invention (e.g., polypeptides encoded by polynucleotides of the invention and/or antibodies) that are associated with heterologous polypeptides or nucleic acids. In one example, the invention provides a method for delivering a therapeutic protein into the targeted cell. In another example, the invention provides a method for delivering a single stranded nucleic acid (e.g., antisense or ribozymes) or double stranded nucleic acid (e.g., DNA that can integrate into the cell's genome or replicate episomally and that can be transcribed) into the targeted cell.

[0402] In another embodiment, the invention provides a method for the specific destruction of cells (e.g., the destruction of tumor cells) by administering polypeptides of the invention in association with toxins or cytotoxic prodrugs.

[0403] By “toxin” is meant one or more compounds that bind and activate endogenous cytotoxic effector systems, radioisotopes, holotoxins, modified toxins, catalytic subunits of toxins, or any molecules or enzymes not normally present in or on the surface of a cell that under defined conditions cause the cell's death. Toxins that may be used according to the methods of the invention include, but are not limited to, radioisotopes known in the art, compounds such as, for example, antibodies (or complement fixing containing portions thereof) that bind an inherent or induced endogenous cytotoxic effector system, thymidine kinase, endonuclease, RNAse, alpha toxin, ricin, abrin, Pseudomonas exotoxin A, diphtheria toxin, saporin, momordin, gelonin, pokeweed antiviral protein, alpha-sarcin and cholera toxin. “Toxin” also includes a cytostatic or cytocidal agent, a therapeutic agent or a radioactive metal ion, e.g., alpha-emitters such as, for example, ²¹³Bi, or other radioisotopes such as, for example, ¹⁰³Pd, ¹³³Xe, ¹³¹I, ⁶⁸Ge, ⁵⁷Co, ⁶⁵Zn, ⁸⁵Sr, ³²P, ³⁵S, ⁹⁰Y, ¹⁵³Sm, ¹⁵³Gd, ¹⁶⁹Yb, ⁵¹Cr, ⁵⁴Mn, ⁷⁵Se, ¹¹³Sn, ⁹⁰Yttrium, ¹¹⁷Tin, ¹⁸⁶Rhenium, ¹⁶⁶Holmium, and ¹⁸⁸Rhenium; luminescent labels, such as luminol; and fluorescent labels, such as fluorescein and rhodamine, and biotin. In a specific embodiment, the invention provides a method for the specific destruction of cells (e.g., the destruction of tumor cells) by administering polypeptides of the invention or antibodies of the invention in association with the radioisotope ⁹⁰Y. In another specific embodiment, the invention provides a method for the specific destruction of cells (e.g., the destruction of tumor cells) by administering polypeptides of the invention or antibodies of the invention in association with the radioisotope ¹¹¹In. In a further specific embodiment, the invention provides a method for the specific destruction of cells (e.g., the destruction of tumor cells) by administering polypeptides of the invention or antibodies of the invention in association with the radioisotope ¹³¹I.

[0404] Techniques known in the art may be applied to label polypeptides of the invention (including antibodies). Such techniques include, but are not limited to, the use of bifunctional conjugating agents (see e.g., U.S. Pat. Nos. 5,756,065; 5,714,631; 5,696,239; 5,652,361; 5,505,931; 5,489,425; 5,435,990; 5,428,139; 5,342,604; 5,274,119; 4,994,560; and 5,808,003; the contents of each of which are hereby incorporated by reference in its entirety).

[0405] Thus, the invention provides a diagnostic method of a disorder, which involves (a) assaying the expression level of a polypeptide of the present invention in cells or body fluid of an individual; and (b) comparing the assayed polypeptide expression level with a standard polypeptide expression level, whereby an increase or decrease in the assayed polypeptide expression level compared to the standard expression level is indicative of a disorder. With respect to cancer, the presence of a relatively high amount of transcript in biopsied tissue from an individual may indicate a predisposition for the development of the disease, or may provide a means for detecting the disease prior to the appearance of actual clinical symptoms. A more definitive diagnosis of this type may allow health professionals to employ preventative measures or aggressive treatment earlier thereby preventing the development or further progression of the cancer.

[0406] Moreover, polypeptides of the present invention can be used to treat or prevent diseases or conditions such as, for example, neural disorders, immune system disorders, muscular disorders, reproductive disorders, gastrointestinal disorders, pulmonary disorders, cardiovascular disorders, renal disorders, proliferative disorders, and/or cancerous diseases and conditions. For example, patients can be administered a polypeptide of the present invention in an effort to replace absent or decreased levels of the polypeptide (e.g., insulin), to supplement absent or decreased levels of a different polypeptide (e.g., hemoglobin S for hemoglobin B, SOD, catalase, DNA repair proteins), to inhibit the activity of a polypeptide (e.g., an oncogene or tumor supressor), to activate the activity of a polypeptide (e.g., by binding to a receptor), to reduce the activity of a membrane bound receptor by competing with it for free ligand (e.g., soluble TNF receptors used in reducing inflammation), or to bring about a desired response (e.g., blood vessel growth inhibition, enhancement of the immune response to proliferative cells or tissues).

[0407] Similarly, antibodies directed to a polypeptide of the present invention can also be used to treat disease (as described supra, and elsewhere herein). For example, administration of an antibody directed to a polypeptide of the present invention can bind, and/or neutralize the polypeptide, and/or reduce overproduction of the polypeptide. Similarly, administration of an antibody can activate the polypeptide, such as by binding to a polypeptide bound to a membrane (receptor).

[0408] At the very least, the polypeptides of the present invention can be used as molecular weight markers on SDS-PAGE gels or on molecular sieve gel filtration columns using methods well known to those of skill in the art. Polypeptides can also be used to raise antibodies, which in turn are used to measure protein expression from a recombinant cell, as a way of assessing transformation of the host cell. Moreover, the polypeptides of the present invention can be used to test the biological activities described herein.

[0409] Diagnostic Assays

[0410] The compounds of the present invention are useful for diagnosis, treatment, prevention and/or prognosis of various disorders in mammals, preferably humans. Such disorders include, but are not limited to, those described herein under the section heading “Biological Activities”.

[0411] For a number of disorders, substantially altered (increased or decreased) levels of gene expression can be detected in tissues, cells or bodily fluids (e.g., sera, plasma, urine, semen, synovial fluid or spinal fluid) taken from an individual having such a disorder, relative to a “standard” gene expression level, that is, the expression level in tissues or bodily fluids from an individual not having the disorder. Thus, the invention provides a diagnostic method useful during diagnosis of a disorder, which involves measuring the expression level of the gene encoding the polypeptide in tissues, cells or body fluid from an individual and comparing the measured gene expression level with a standard gene expression level, whereby an increase or decrease in the gene expression level(s) compared to the standard is indicative of a disorder. These diagnostic assays may be performed in vivo or in vitro, such as, for example, on blood samples, biopsy tissue or autopsy tissue.

[0412] The present invention is also useful as a prognostic indicator, whereby patients exhibiting enhanced or depressed gene expression will experience a worse clinical outcome relative to patients expressing the gene at a level nearer the standard level.

[0413] In certain embodiments, a polypeptide of the invention, or polynucleotides, antibodies, agonists, or antagonists corresponding to that polypeptide, may be used to diagnose and/or prognose diseases and/or disorders associated with the tissue(s) in which the polypeptide of the invention is expressed, including one, two, three, four, five, or more tissues disclosed in Table 1A, column 8 (Tissue Distribution Library Code).

[0414] By “assaying the expression level of the gene encoding the polypeptide” is intended qualitatively or quantitatively measuring or estimating the level of the polypeptide of the invention or the level of the mRNA encoding the polypeptide of the invention in a first biological sample either directly (e.g., by determining or estimating absolute protein level or mRNA level) or relatively (e.g., by comparing to the polypeptide level or mRNA level in a second biological sample). Preferably, the polypeptide expression level or mRNA level in the first biological sample is measured or estimated and compared to a standard polypeptide level or mRNA level, the standard being taken from a second biological sample obtained from an individual not having the disorder or being determined by averaging levels from a population of individuals not having the disorder. As will be appreciated in the art, once a standard polypeptide level or mRNA level is known, it can be used repeatedly as a standard for comparison.

[0415] By “biological sample” is intended any biological sample obtained from an individual, cell line, tissue culture, or other source containing polypeptides of the invention (including portions thereof) or mRNA. As indicated, biological samples include body fluids (such as sera, plasma, urine, synovial fluid and spinal fluid) and tissue sources found to express the full length or fragments thereof of a polypeptide or mRNA. Methods for obtaining tissue biopsies and body fluids from mammals are well known in the art. Where the biological sample is to include mRNA, a tissue biopsy is the preferred source.

[0416] Total cellular RNA can be isolated from a biological sample using any suitable technique such as the single-step guanidinium-thiocyanate-phenol-chloroform method described in Chomczynski and Sacchi, Anal. Biochem. 162:156-159 (1987). Levels of mRNA encoding the polypeptides of the invention are then assayed using any appropriate method. These include Northern blot analysis, S1 nuclease mapping, the polymerase chain reaction (PCR), reverse transcription in combination with the polymerase chain reaction (RT-PCR), and reverse transcription in combination with the ligase chain reaction (RT-LCR).

[0417] The present invention also relates to diagnostic assays such as quantitative and diagnostic assays for detecting levels of polypeptides of the invention, in a biological sample (e.g., cells and tissues), including determination of normal and abnormal levels of polypeptides. Thus, for instance, a diagnostic assay in accordance with the invention for detecting over-expression of polypeptides of the invention compared to normal control tissue samples may be used to detect the presence of tumors. Assay techniques that can be used to determine levels of a polypeptide, such as a polypeptide of the present invention in a sample derived from a host are well-known to those of skill in the art. Such assay methods include radioimmunoassays, competitive-binding assays, Western Blot analysis and ELISA assays. Assaying polypeptide levels in a biological sample can occur using any art-known method.

[0418] Assaying polypeptide levels in a biological sample can occur using antibody-based techniques. For example, polypeptide expression in tissues can be studied with classical immunohistological methods (Jalkanen et al., J. Cell. Biol. 101:976-985 (1985); Jalkanen, M., et al., J. Cell . Biol. 105:3087-3096 (1987)). Other antibody-based methods useful for detecting polypeptide gene expression include immunoassays, such as the enzyme linked immunosorbent assay (ELISA) and the radioimmunoassay (RIA). Suitable antibody assay labels are known in the art and include enzyme labels, such as, glucose oxidase, and radioisotopes, such as iodine (¹²⁵I, ¹²¹I), carbon (¹⁴C), sulfur (³⁵S), tritium (³H), indium (¹¹²In), and technetium (^{99m}Tc), and fluorescent labels, such as fluorescein and rhodamine, and biotin.

[0419] The tissue or cell type to be analyzed will generally include those which are known, or suspected, to express the gene of inteest (such as, for example, cancer). The protein isolation methods employed herein may, for example, be such as those described in Harlow and Lane (Harlow, E. and Lane, D., 1988, “Antibodies: A Laboratory Manual”, Cold Spring Harbor Laboratory Press, Cold Spring Harbor, N.Y.), which is incorporated herein by reference in its entirety. The isolated cells can be derived from cell culture or from a patient. The analysis of cells taken from culture may be a necessary step in the assessment of cells that could be used as part of a cell-based gene therapy technique or, alternatively, to test the effect of compounds on the expression of the gene.

[0420] For example, antibodies, or fragments of antibodies, such as those described herein, may be used to quantitatively or qualitatively detect the presence of gene products or conserved variants or peptide fragments thereof. This can be accomplished, for example, by immunofluorescence techniques employing a fluorescently labeled antibody coupled with light microscopic, flow cytometric, or fluorimetric detection.

[0421] In a preferred embodiment, antibodies, or fragments of antibodies directed to any one or all of the predicted epitope domains of the polypeptides of the invention (shown in column 7 of Table 1A) may be used to quantitatively or qualitatively detect the presence of gene products or conserved variants or peptide fragments thereof. This can be accomplished, for example, by immunofluorescence techniques employing a fluorescently labeled antibody coupled with light microscopic, flow cytometric, or fluorimetric detection.

[0422] In an additional preferred embodiment, antibodies, or fragments of antibodies directed to a conformational epitope of a polypeptide of the invention may be used to quantitatively or qualitatively detect the presence of gene products or conserved variants or peptide fragments thereof. This can be accomplished, for example, by immunofluorescence techniques employing a fluorescently labeled antibody coupled with light microscopic, flow cytometric, or fluorimetric detection.

[0423] The antibodies (or fragments thereof), and/or polypeptides of the present invention may, additionally, be employed histologically, as in immunofluorescence, immunoelectron microscopy or non-immunological assays, for in situ detection of gene products or conserved variants or peptide fragments thereof In situ detection may be accomplished by removing a histological specimen from a patient, and applying thereto a labeled antibody or polypeptide of the present invention. The antibody (or fragment thereof) or polypeptide is preferably applied by overlaying the labeled antibody (or fragment) onto a biological sample. Through the use of such a procedure, it is possible to determine not only the presence of the gene product, or conserved variants or peptide fragments, or polypeptide binding, but also its distribution in the examined tissue. Using the present invention, those of ordinary skill will readily perceive that any of a wide variety of histological methods (such as staining procedures) can be modified in order to achieve such in situ detection.

[0424] Immunoassays and non-immunoassays for gene products or conserved variants or peptide fragments thereof will typically comprise incubating a sample, such as a biological fluid, a tissue extract, freshly harvested cells, or lysates of cells which have been incubated in cell culture, in the presence of a detectably labeled antibody capable of binding gene products or conserved variants or peptide fragments thereof, and detecting the bound antibody by any of a number of techniques well-known in the art.

[0425] The biological sample may be brought in contact with and immobilized onto a solid phase support or carrier such as nitrocellulose, or other solid support which is capable of immobilizing cells, cell particles or soluble proteins. The support may then be washed with suitable buffers followed by treatment with the detectably labeled antibody or detectable polypeptide of the invention. The solid phase support may then be washed with the buffer a second time to remove unbound antibody or polypeptide. Optionally the antibody is subsequently labeled. The amount of bound label on solid support may then be detected by conventional means.

[0426] By “solid phase support or carrier” is intended any support capable of binding an antigen or an antibody. Well-known supports or carriers include glass, polystyrene, polypropylene, polyethylene, dextran, nylon, amylases, natural and modified celluloses, polyacrylamides, gabbros, and magnetite. The nature of the carrier can be either soluble to some extent or insoluble for the purposes of the present invention. The support material may have virtually any possible structural configuration so long as the coupled molecule is capable of binding to an antigen or antibody. Thus, the support configuration may be spherical, as in a bead, or cylindrical, as in the inside surface of a test tube, or the external surface of a rod. Alternatively, the surface may be flat such as a sheet, test strip, etc. Preferred supports include polystyrene beads. Those skilled in the art will know many other suitable carriers for binding antibody or antigen, or will be able to ascertain the same by use of routine experimentation.

[0427] The binding activity of a given lot of antibody or antigen polypeptide may be determined according to well known methods. Those skilled in the art will be able to determine operative and optimal assay conditions for each determination by employing routine experimentation.

[0428] In addition to assaying polypeptide levels or polynucleotide levels in a biological sample obtained from an individual, polypeptide or polynucleotide can also be detected in vivo by imaging. For example, in one embodiment of the invention, polypeptides and/or antibodies of the invention are used to image diseased cells, such as neoplasms. In another embodiment, polynucleotides of the invention (e.g., polynucleotides complementary to all or a portion of an mRNA) and/or antibodies (e.g., antibodies directed to any one or a combination of the epitopes of a polypeptide of the invention, antibodies directed to a conformational epitope of a polypeptide of the invention, or antibodies directed to the full length polypeptide expressed on the cell surface of a mammalian cell) are used to image diseased or neoplastic cells.

[0429] Antibody labels or markers for in vivo imaging of polypeptides of the invention include those detectable by X-radiography, NMR, MRI, CAT-scans or ESR. For X-radiography, suitable labels include radioisotopes such as barium or cesium, which emit detectable radiation but are not overtly harmful to the subject. Suitable markers for NMR and ESR include those with a detectable characteristic spin, such as deuterium, which may be incorporated into the antibody by labeling of nutrients for the relevant hybridoma. Where in vivo imaging is used to detect enhanced levels of polypeptides for diagnosis in humans, it may be preferable to use human antibodies or “humanized” chimeric monoclonal antibodies. Such antibodies can be produced using techniques described herein or otherwise known in the art. For example methods for producing chimeric antibodies are known in the art. See, for review, Morrison, Science 229:1202 (1985); Oi et al., BioTechniques 4:214 (1986); Cabilly et al., U.S. Pat. No. 4,816,567; Taniguchi et al., EP 171496; Morrison et al., EP 173494; Neuberger et al., WO 8601533; Robinson et al., WO 8702671; Boulianne et al., Nature 312:643 (1984); Neuberger et al., Nature 314:268 (1985).

[0430] Additionally, any polypeptides of the invention whose presence can be detected, can be administered. For example, polypeptides of the invention labeled with a radio-opaque or other appropriate compound can be administered and visualized in vivo, as discussed, above for labeled antibodies. Further, such polypeptides can be utilized for in vitro diagnostic procedures.

[0431] A polypeptide-specific antibody or antibody fragment which has been labeled with an appropriate detectable imaging moiety, such as a radioisotope (for example, ¹³¹I, ¹¹²In, ^{99m}Tc), a radio-opaque substance, or a material detectable by nuclear magnetic resonance, is introduced (for example, parenterally, subcutaneously or intraperitoneally) into the mammal to be examined for a disorder. It will be understood in the art that the size of the subject and the imaging system used will determine the quantity of imaging moiety needed to produce diagnostic images. In the case of a radioisotope moiety, for a human subject, the quantity of radioactivity injected will normally range from about 5 to 20 millicuries of ^{99m}Tc. The labeled antibody or antibody fragment will then preferentially accumulate at the location of cells which contain the antigenic protein. In vivo tumor imaging is described in S. W. Burchiel et al., “Immunopharmacokinetics of Radiolabeled Antibodies and Their Fragments” (Chapter 13 in Tumor Imaging: The Radiochemical Detection of Cancer, S. W. Burchiel and B. A. Rhodes, eds., Masson Publishing Inc. (1982)).

[0432] With respect to antibodies, one of the ways in which an antibody of the present invention can be detectably labeled is by linking the same to a reporter enzyme and using the linked product in an enzyme immunoassay (EIA) (Voller, A., “The Enzyme Linked Immunosorbent Assay (ELISA)”, 1978, Diagnostic Horizons 2:1-7, Microbiological Associates Quarterly Publication, Walkersville, Md.); Voller et al., J. Clin. Pathol. 31:507-520 (1978); Butler, J. E., Meth. Enzymol. 73:482-523 (1981); Maggio, E. (ed.), 1980, Enzyme Immunoassay, CRC Press, Boca Raton, Fla.,; Ishikawa, E. et al., (eds.), 1981, Enzyme Immunoassay, Kgaku Shoin, Tokyo). The reporter enzyme which is bound to the antibody will react with an appropriate substrate, preferably a chromogenic substrate, in such a manner as to produce a chemical moiety which can be detected, for example, by spectrophotometric, fluorimetric or by visual means. Reporter enzymes which can be used to detectably label the antibody include, but are not limited to, malate dehydrogenase, staphylococcal nuclease, delta-5-steroid isomerase, yeast alcohol dehydrogenase, alpha-glycerophosphate, dehydrogenase, triose phosphate isomerase, horseradish peroxidase, alkaline phosphatase, asparaginase, glucose oxidase, beta-galactosidase, ribonuclease, urease, catalase, glucose-6-phosphate dehydrogenase, glucoamylase and acetylcholinesterase. Additionally, the detection can be accomplished by colorimetric methods which employ a chromogenic substrate for the reporter enzyme. Detection may also be accomplished by visual comparison of the extent of enzymatic reaction of a substrate in comparison with similarly prepared standards.

[0433] Detection may also be accomplished using any of a variety of other immunoassays. For example, by radioactively labeling the antibodies or antibody fragments, it is possible to detect polypeptides through the use of a radioimmunoassay (RIA) (see, for example, Weintraub, B., Principles of Radioimmunoassays, Seventh Training Course on Radioligand Assay Techniques, The Endocrine Society, March, 1986, which is incorporated by reference herein). The radioactive isotope can be detected by means including, but not limited to, a gamma counter, a scintillation counter, or autoradiography.

[0434] It is also possible to label the antibody with a fluorescent compound. When the fluorescently labeled antibody is exposed to light of the proper wave length, its presence can then be detected due to fluorescence. Among the most commonly used fluorescent labeling compounds, are fluorescein isothiocyanate, rhodamine, phycoerythrin, phycocyanin, allophycocyanin, ophthaldehyde and fluorescamine.

[0435] The antibody can also be detectably labeled using fluorescence emitting metals such as ¹⁵²Eu, or others of the lanthanide series. These metals can be attached to the antibody using such metal chelating groups as diethylenetriaminepentacetic acid (DTPA) or ethylenediaminetetraacetic acid (EDTA).

[0436] The antibody also can be detectably labeled by coupling it to a chemiluminescent compound. The presence of the chemiluminescent-tagged antibody is then determined by detecting the presence of luminescence that arises during the course of a chemical reaction. Examples of particularly useful chemiluminescent labeling compounds are luminol, isoluminol, theromatic acridinium ester, imidazole, acridinium salt and oxalate ester.

[0437] Likewise, a bioluminescent compound may be used to label the antibody of the present invention. Bioluminescence is a type of chemiluminescence found in biological systems in, which a catalytic protein increases the efficiency of the chemiluminescent reaction. The presence of a bioluminescent protein is determined by detecting the presence of luminescence. Important bioluminescent compounds for purposes of labeling are luciferin, luciferase and aequorin.

[0438] Methods for Detecting Diseases

[0439] In general, a disease may be detected in a patient based on the presence of one or more proteins of the invention and/or polynucleotides encoding such proteins in a biological sample (for example, blood, sera, urine, and/or tumor biopsies) obtained from the patient. In other words, such proteins may be used as markers to indicate the presence or absence of a disease or disorder, including cancer and/or as described elsewhere herein. In addition, such proteins may be useful for the detection of other diseases and cancers. The binding agents provided herein generally permit detection of the level of antigen that binds to the agent in the biological sample. Polynucleotide primers and probes may be used to detect the level of mRNA encoding polypeptides of the invention, which is also indicative of the presence or absence of a disease or disorder, including cancer. In general, polypeptides of the invention should be present at a level that is at least three fold higher in diseased tissue than in normal tissue.

[0440] There are a variety of assay formats known to those of ordinary skill in the art for using a binding agent to detect polypeptide markers in a sample. See, e.g., Harlow and Lane, supra. In general, the presence or absence of a disease in a patient may be determined by (a) contacting a biological sample obtained from a patient with a binding agent; (b) detecting in the sample a level of polypeptide that binds to the binding agent; and (c) comparing the level of polypeptide with a predetermined cut-off value.

[0441] In a preferred embodiment, the assay involves the use of a binding agent(s) immobilized on a solid support to bind to and remove the polypeptide of the invention from the remainder of the sample. The bound polypeptide may then be detected using a detection reagent that contains a reporter group and specifically binds to the binding agent/polypeptide complex. Such detection reagents may comprise, for example, a binding agent that specifically binds to the polypeptide or an antibody or other agent that specifically binds to the binding agent, such as an anti-immunoglobulin, protein G, protein A or a lectin. Alternatively, a competitive assay may be utilized, in which a polypeptide is labeled with a reporter group and allowed to bind to the immobilized binding agent after incubation of the binding agent with the sample. The extent to which components of the sample inhibit the binding of the labeled polypeptide to the binding agent is indicative of the reactivity of the sample with the immobilized binding agent. Suitable polypeptides for use within such assays include polypeptides of the invention and portions thereof, or antibodies, to which the binding agent binds, as described above.

[0442] The solid support may be any material known to those of skill in the art to which polypeptides of the invention may be attached. For example, the solid support may be a test well in a microtiter plate or a nitrocellulose or other suitable membrane. Alternatively, the support may be a bead or disc, such as glass fiberglass, latex or a plastic material such as polystyrene or polyvinylchloride. The support may also be a magnetic particle or a fiber optic sensor, such as those disclosed, for example, in U.S. Pat. No. 5,359,681. The binding agent may be immobilized on the solid support using a variety of techniques known to those of skill in the art, which are amply described in the patent and scientific literature. In the context of the present invention, the term “immobilization” refers to both noncovalent association, such as adsorption, and covalent attachment (which may be a direct linkage between the agent and functional groups on the support or may be a linkage by way of a cross-linking agent). Immobilization by adsorption to a well in a microtiter plate or to a membrane is preferred. In such cases, adsorption may be achieved by contacting the binding agent, in a suitable buffer, with the solid support for the suitable amount of time. The contact time varies with temperature, but is typically between about 1 hour and about 1 day. In general, contacting a well of plastic microtiter plate (such as polystyrene or polyvinylchloride) with an amount of binding agent ranging from about 10 ng to about 10 ug, and preferably about 100 ng to about 1 ug, is sufficient to immobilize an adequate amount of binding agent.

[0443] Covalent attachment of binding agent to a solid support may generally be achieved by first reacting the support with a bifunctional reagent that will react with both the support and a functional group, such as a hydroxyl or amino group, on the binding agent. For example, the binding agent may be covalently attached to supports having an appropriate polymer coating using benzoquinone or by condensation of an aldehyde group on the support with an amine and an active hydrogen on the binding partner (see, e.g., Pierce Immunotechnology Catalog and Handbook, 1991, at A12-A13).

[0444] Gene Therapy Methods

[0445] Also encompassed by the invention are gene therapy methods for treating or preventing disorders, diseases and conditions. The gene therapy methods relate to the introduction of nucleic acid (DNA, RNA and antisense DNA or RNA) sequences into an animal to achieve expression of the polypeptide of the present invention. This method requires a polynucleotide which codes for a polypeptide of the present invention operatively linked to a promoter and any other genetic elements necessary for the expression of the polypeptide by the target tissue. Such gene therapy and delivery techniques are known in the art, see, for example, WO90/11092, which is herein incorporated by reference.

[0446] Thus, for example, cells from a patient may be engineered with a polynucleotide (DNA or RNA) comprising a promoter operably linked to a polynucleotide of the present invention ex vivo, with the engineered cells then being provided to a patient to be treated with the polypeptide of the present invention. Such methods are well-known in the art. For example, see Belldegrun, A., et al., J. Natl. Cancer Inst. 85: 207-216 (1993); Ferrantini, M. et al., Cancer Research 53:1107-1112 (1993); Ferrantini, M. et al., J. Immunology 153:4604-4615 (1994); Kaido, T., et al., Int. J. Cancer 60:221-229 (1995); Ogura, H., et al., Cancer Research 50:5102-5106 (1990); Santodonato, L., et al., Human Gene Therapy 7:1-10 (1996); Santodonato, L., et al., Gene Therapy 4:1246-1255 (1997); and Zhang, J. -F. et al., Cancer Gene Therapy 3:31-38 (1996)), which are herein incorporated by reference. In one embodiment, the cells which are engineered are arterial cells. The arterial cells may be reintroduced into the patient through direct injection to the artery, the tissues surrounding the artery, or through catheter injection.

[0447] As discussed in more detail below, the polynucleotide constructs can be delivered by any method that delivers injectable materials to the cells of an animal, such as, injection into the interstitial space of tissues (heart, muscle, skin, lung, liver, and the like). The polynucleotide constructs may be delivered in a pharmaceutically acceptable liquid or aqueous carrier.

[0448] In one embodiment, the polynucleotide of the present invention is delivered as a naked polynucleotide. The term “naked” polynucleotide, DNA or RNA refers to sequences that are free from any delivery vehicle that acts to assist, promote or facilitate entry into the cell, including viral sequences, viral particles, liposome formulations, lipofectin or precipitating agents and the like. However, the polynucleotide of the present invention can also be delivered in liposome formulations and lipofectin formulations and the like can be prepared by methods well known to those skilled in the art. Such methods are described, for example, in U.S. Pat. Nos. 5,593,972, 5,589,466, and 5,580,859, which are herein incorporated by reference.

[0449] The polynucleotide vector constructs used in the gene therapy method are preferably constructs that will not integrate into the host genome nor will they contain sequences that allow for replication. Appropriate vectors include pWLNEO, pSV2CAT, pOG44, pXT1 and pSG available from Stratagene; pSVK3, pBPV, pMSG and pSVL available from Pharmacia; and pEF1/V5, pcDNA3.1, and pRc/CMV2 available from Invitrogen. Other suitable vectors will be readily apparent to the skilled artisan.

[0450] Any strong promoter known to those skilled in the art can be used for driving the expression of the polynucleotide sequence. Suitable promoters include adenoviral promoters, such as the adenoviral major late promoter; or heterologous promoters, such as the cytomegalovirus (CMV) promoter; the respiratory syncytial virus (RSV) promoter; inducible promoters, such as the MMT promoter, the metallothionein promoter; heat shock promoters; the albumin promoter; the ApoAI promoter; human globin promoters; viral thymidine kinase promoters, such as the Herpes Simplex thymidine kinase promoter; retroviral LTRs; the b-actin promoter; and human growth hormone promoters. The promoter also may be the native promoter for the polynucleotide of the present invention.

[0451] Unlike other gene therapy techniques, one major advantage of introducing naked nucleic acid sequences into target cells is the transitory nature of the polynucleotide synthesis in the cells. Studies have shown that non-replicating DNA sequences can be introduced into cells to provide production of the desired polypeptide for periods of up to six months.

[0452] The polynucleotide construct can be delivered to the interstitial space of tissues within the an animal, including of muscle, skin, brain, lung, liver, spleen, bone marrow, thymus, heart, lymph, blood, bone, cartilage, pancreas, kidney, gall bladder, stomach, intestine, testis, ovary, uterus, rectum, nervous system, eye, gland, and connective tissue. Interstitial space of the tissues comprises the intercellular, fluid, mucopolysaccharide matrix among the reticular fibers of organ tissues, elastic fibers in the walls of vessels or chambers, collagen fibers of fibrous tissues, or that same matrix within connective tissue ensheathing muscle cells or in the lacunae of bone. It is similarly the space occupied by the plasma of the circulation and the lymph fluid of the lymphatic channels. Delivery to the interstitial space of muscle tissue is preferred for the reasons discussed below. They may be conveniently delivered by injection into the tissues comprising these cells. They are preferably delivered to and expressed in persistent, non-dividing cells which are differentiated, although delivery and expression may be achieved in non-differentiated or less completely differentiated cells, such as, for example, stem cells of blood or skin fibroblasts. In vivo muscle cells are particularly competent in their ability to take up and express polynucleotides.

[0453] For the naked nucleic acid sequence injection, an effective dosage amount of DNA or RNA will be in the range of from about 0.05 mg/kg body weight to about 50 mg/kg body weight. Preferably the dosage will be from about 0.005 mg/kg to about 20 mg/kg and more preferably from about 0.05 mg/kg to about 5 mg/kg. Of course, as the artisan of ordinary skill will appreciate, this dosage will vary according to the tissue site of injection. The appropriate and effective dosage of nucleic acid sequence can readily be determined by those of ordinary skill in the art and may depend on the condition being treated and the route of administration.

[0454] The preferred route of administration is by the parenteral route of injection into the interstitial space of tissues. However, other parenteral routes may also be used, such as, inhalation of an aerosol formulation particularly for delivery to lungs or bronchial tissues, throat or mucous membranes of the nose. In addition, naked DNA constructs can be delivered to arteries during angioplasty by the catheter used in the procedure.

[0455] The naked polynucleotides are delivered by any method known in the art, including, but not limited to, direct needle injection at the delivery site, intravenous injection, topical administration, catheter infusion, and so-called “gene guns”. These delivery methods are known in the art.

[0456] The constructs may also be delivered with delivery vehicles such as viral sequences, viral particles, liposome formulations, lipofectin, precipitating agents, etc. Such methods of delivery are known in the art.

[0457] In certain embodiments, the polynucleotide constructs are complexed in a liposome preparation. Liposomal preparations for use in the instant invention include cationic (positively charged), anionic (negatively charged) and neutral preparations. However, cationic liposomes are particularly preferred because a tight charge complex can be formed between the cationic liposome and the polyanionic nucleic acid. Cationic liposomes have been shown to mediate intracellular delivery of plasmid DNA (Felgner et al., Proc. Natl. Acad. Sci. USA (1987) 84:7413-7416, which is herein incorporated by reference); mRNA (Malone et al., Proc. Natl. Acad. Sci. USA (1989) 86:6077-6081, which is herein incorporated by reference); and purified transcription factors (Debs et al., J. Biol. Chem. (1990) 265:10189-10192, which is herein incorporated by reference), in functional form.

[0458] Cationic liposomes are readily available. For example, N[1-2,3-dioleyloxy)propyl]-N,N,N-triethylammonium (DOTMA) liposomes are particularly useful and are available under the trademark Lipofectin, from GIBCO BRL, Grand Island, N.Y. (See, also, Felgner et al., Proc. Natl Acad. Sci. USA (1987) 84:7413-7416, which is herein incorporated by reference). Other commercially available liposomes include transfectace (DDAB/DOPE) and DOTAP/DOPE (Boehringer).

[0459] Other cationic liposomes can be prepared from readily available materials using techniques well known in the art. See, e.g. PCT Publication No. WO 90/11092 (which is herein incorporated by reference) for a description of the synthesis of DOTAP (1,2-bis(oleoyloxy)-3-(trimethylammonio)propane) liposomes. Preparation of DOTMA liposomes is explained in the literature, see, e.g., P. Felgner et al., Proc. Natl. Acad. Sci. USA 84:7413-7417, which is herein incorporated by reference. Similar methods can be used to prepare liposomes from other cationic lipid materials.

[0460] Similarly, anionic and neutral liposomes are readily available, such as from Avanti Polar Lipids (Birmingham, Ala.), or can be easily prepared using readily available materials. Such materials include phosphatidyl, choline, cholesterol, phosphatidyl ethanolamine, dioleoylphosphatidyl choline (DOPC), dioleoylphosphatidyl glycerol (DOPG), dioleoylphoshatidyl ethanolamine (DOPE), among others. These materials can also be mixed with the DOTMA and DOTAP starting materials in appropriate ratios. Methods for making liposomes using these materials are well known in the art.

[0461] For example, commercially dioleoylphosphatidyl choline (DOPC), dioleoylphosphatidyl glycerol (DOPG), and dioleoylphosphatidyl ethanolamine (DOPE) can be used in various combinations to make conventional liposomes, with or without the addition of cholesterol. Thus, for example, DOPG/DOPC vesicles can be prepared by drying 50 mg each of DOPG and DOPC under a stream of nitrogen gas into a sonication vial. The sample is placed under a vacuum pump overnight and is hydrated the following day with deionized water. The sample is then sonicated for 2 hours in a capped vial, using a Heat Systems model 350 sonicator equipped with an inverted cup (bath type) probe at the maximum setting while the bath is circulated at 15EC. Alternatively, negatively charged vesicles can be prepared without sonication to produce multilamellar vesicles or by extrusion through nucleopore membranes to produce unilamellar vesicles of discrete size. Other methods are known and available to those of skill in the art.

[0462] The liposomes can comprise multilamellar vesicles (MLVs), small unilamellar vesicles (SUVs), or large unilamellar vesicles (LUVs), with SUVs being preferred. The various liposome-nucleic acid complexes are prepared using methods well known in the art. See, e.g., Straubinger et al., Methods of Immunology (1983), 101:512-527, which is herein incorporated by reference. For example, MLVs containing nucleic acid can be prepared by depositing a thin film of phospholipid on the walls of a glass tube and subsequently hydrating with a solution of the material to be encapsulated. SUVs are prepared by extended sonication of MLVs to produce a homogeneous population of unilamellar liposomes. The material to be entrapped is added to a suspension of preformed MLVs and then sonicated. When using liposomes containing cationic lipids, the dried lipid film is resuspended in an appropriate solution such as sterile water or an isotonic buffer solution such as 10 mM Tris/NaCl, sonicated, and then the preformed liposomes are mixed directly with the DNA. The liposome and DNA form a very stable complex due to binding of the positively charged liposomes to the cationic DNA. SUVs find use with small nucleic acid fragments. LUVs are prepared by a number of methods, well known in the art. Commonly used methods include Ca²⁺-EDTA chelation (Papahadjopoulos et al., Biochim. Biophys. Acta (1975) 394:483; Wilson et al., Cell 17:77 (1979)); ether injection (Deamer, D. and Bangham, A., Biochim. Biophys. Acta 443:629 (1976); Ostro et al., Biochem. Biophys. Res. Commun. 76:836 (1977); Fraley et al., Proc. Natl. Acad. Sci. USA 76:3348 (1979)); detergent dialysis (Enoch, H. and Strittmatter, P., Proc. Natl. Acad. Sci. USA 76:145 (1979)); and reverse-phase evaporation (REV) (Fraley et al., J. Biol. Chem. 255:10431 (1980); Szoka, F. and Papahadjopoulos, D., Proc. Natl. Acad. Sci. USA 75:145 (1978); Schaefer-Ridder et al., Science 215:166 (1982)), which are herein incorporated by reference.

[0463] Generally, the ratio of DNA to liposomes will be from about 10:1 to about 1:10. Preferably, the ration will be from about 5:1 to about 1:5. More preferably, the ration will be about 3:1 to about 1:3. Still more preferably, the ratio will be about 1:1.

[0464] U.S. Pat. No. 5,676,954 (which is herein incorporated by reference) reports on the injection of genetic material, complexed with cationic liposomes carriers, into mice. U.S. Pat. Nos. 4,897,355, 4,946,787, 5,049,386, 5,459,127, 5,589,466, 5,693,622, 5,580,859, 5,703,055, and international publication no. WO 94/9469 (which are herein incorporated by reference) provide cationic lipids for use in transfecting DNA into cells and mammals. U.S. Pat. Nos. 5,589,466, 5,693,622, 5,580,859, 5,703,055, and international publication no. WO 94/9469 provide methods for delivering DNA-cationic lipid complexes to mammals.

[0465] In certain embodiments, cells are engineered, ex vivo or in vivo, using a retroviral particle containing RNA which comprises a sequence encoding a polypeptide of the present invention. Retroviruses from which the retroviral plasmid vectors may be derived include, but are not limited to, Moloney Murine Leukemia Virus, spleen necrosis virus, Rous sarcoma Virus, Harvey Sarcoma Virus, avian leukosis virus, gibbon ape leukemia virus, human immunodeficiency virus, Myeloproliferative Sarcoma Virus, and mammary tumor virus.

[0466] The retroviral plasmid vector is employed to transduce packaging cell lines to form producer cell lines. Examples of packaging cells which may be transfected include, but are not limited to, the PE501, PA317, R-2, R-AM, PA12, T19-14X, VT-19-17-H2, RCRE, RCRIP, GP+E-86, GP+envAm12, and DAN cell lines as described in Miller, Human Gene Therapy 1:5-14 (1990), which is incorporated herein by reference in its entirety. The vector may transduce the packaging cells through any means known in the art. Such means include, but are not limited to, electroporation, the use of liposomes, and CaPO₄ precipitation. In one alternative, the retroviral plasmid vector may be encapsulated into a liposome, or coupled to a lipid, and then administered to a host.

[0467] The producer cell line generates infectious retroviral vector particles which include polynucleotide encoding a polypeptide of the present invention. Such retroviral vector particles then may be employed, to transduce eukaryotic cells, either in vitro or in vivo. The transduced eukaryotic cells will express a polypeptide of the present invention.

[0468] In certain other embodiments, cells are engineered, ex vivo or in vivo, with polynucleotide contained in an adenovirus vector. Adenovirus can be manipulated such that it encodes and expresses a polypeptide of the present invention, and at the same time is inactivated in terms of its ability to replicate in a normal lytic viral life cycle. Adenovirus expression is achieved without integration of the viral DNA into the host cell chromosome, thereby alleviating concerns about insertional mutagenesis. Furthermore, adenoviruses have been used as live enteric vaccines for many years with an excellent safety profile (Schwartz et al. Am. Rev. Respir. Dis.109:233-238 (1974)). Finally, adenovirus mediated gene transfer has been demonstrated in a number of instances including transfer of alpha-1-antitrypsin and CFTR to the lungs of cotton rats (Rosenfeld, M. A. et al. (1991) Science 252:431-434; Rosenfeld et al., (1992) Cell 68:143-155). Furthermore, extensive studies to attempt to establish adenovirus as a causative agent in human cancer were uniformly negative (Green, M. et al. (1979) Proc. Natl. Acad. Sci. USA 76:6606).

[0469] Suitable adenoviral vectors useful in the present invention are described, for example, in Kozarsky and Wilson, Curr. Opin Genet. Devel. 3:499-503 (1993); Rosenfeld et al., Cell 68:143-155 (1992); Engelhardt et al., Human Genet. Ther. 4:759-769 (1993); Yang et al., Nature Genet. 7:362-369 (1994); Wilson et al., Nature 365:691-692 (1993); and U.S. Pat. No. 5,652,224, which are herein incorporated by reference. For example, the adenovirus vector Ad2 is useful and can be grown in human 293 cells. These cells contain the E1 region of adenovirus and constitutively express E1a and E1b, which complement the defective adenoviruses by providing the products of the genes deleted from the vector. In addition to Ad2, other varieties of adenovirus (e.g., Ad3, Ad5, and Ad7) are also useful in the present invention.

[0470] Preferably, the adenoviruses used in the present invention are replication deficient. Replication deficient adenoviruses require the aid of a helper virus and/or packaging cell line to form infectious particles. The resulting virus is capable of infecting cells and can express a polynucleotide of interest which is operably linked to a promoter, but cannot replicate in most cells. Replication deficient adenoviruses may be deleted in one or more of all or a portion of the following genes: E1a, E1b, E3, E4, E2a, or L1 through L5.

[0471] In certain other embodiments, the cells are engineered, ex vivo or in vivo, using an adeno-associated virus (AAV). AAVs are naturally occurring defective viruses that require helper viruses to produce infectious particles (Muzyczka, N., Curr. Topics in Microbiol. Immunol. 158:97 (1992)). It is also one of the few viruses that may integrate its DNA into non-dividing cells. Vectors containing as little as 300 base pairs of AAV can be packaged and can integrate, but space for exogenous DNA is limited to about 4.5 kb. Methods for producing and using such AAVs are known in the art. See, for example, U.S. Pat. Nos. 5,139,941, 5,173,414, 5,354,678, 5,436,146, 5,474,935, 5,478,745, and 5,589,377.

[0472] For example, an appropriate AAV vector for use in the present invention will include all the sequences necessary for DNA replication, encapsidation, and host-cell integration. The polynucleotide construct is inserted into the AAV vector using standard cloning methods, such as those found in Sambrook et al., Molecular Cloning: A Laboratory Manual, Cold Spring Harbor Press (1989). The recombinant AAV vector is then transfected into packaging cells which are infected with a helper virus, using any standard technique, including lipofection, electroporation, calcium phosphate precipitation, etc. Appropriate helper viruses include adenoviruses, cytomegaloviruses, vaccinia viruses, or herpes viruses. Once the packaging cells are transfected and infected, they will produce infectious AAV viral particles which contain the polynucleotide construct. These viral particles are then used to transduce eukaryotic cells, either ex vivo or in vivo. The transduced cells will contain the polynucleotide construct integrated into its genome, and will express a polypeptide of the invention.

[0473] Another method of gene therapy involves operably associating heterologous control regions and endogenous polynucleotide sequences (e.g. encoding a polypeptide of the present invention) via homologous recombination (see, e.g., U.S. Pat. No. 5,641,670, issued Jun. 24, 1997; International Publication No. WO 96/29411, published Sep. 26, 1996; International Publication No. WO 94/12650, published Aug. 4, 1994; Koller et al., Proc. Natl. Acad. Sci. USA 86:8932-8935 (1989); and Zijlstra et al., Nature 342:435-438 (1989), which are herein encorporated by reference. This method involves the activation of a gene which is present in the target cells, but which is not normally expressed in the cells, or is expressed at a lower level than desired.

[0474] Polynucleotide constructs are made, using standard techniques known in the art, which contain the promoter with targeting sequences flanking the promoter. Suitable promoters are described herein. The targeting sequence is sufficiently complementary to an endogenous sequence to permit homologous recombination of the promoter-targeting sequence with the endogenous sequence. The targeting sequence will be sufficiently near the 5′ end of the desired endogenous polynucleotide sequence so the promoter will be operably linked to the endogenous sequence upon homologous recombination.

[0475] The promoter and the targeting sequences can be amplified using PCR. Preferably, the amplified promoter contains distinct restriction enzyme sites on the 5′ and 3′ ends. Preferably, the 3′ end of the first targeting sequence contains the same restriction enzyme site as the 5′ end of the amplified promoter and the 5′ end of the second targeting sequence contains the same restriction site as the 3′ end of the amplified promoter. The amplified promoter and targeting sequences are digested and ligated together.

[0476] The promoter-targeting sequence construct is delivered to the cells, either as naked polynucleotide, or in conjunction with transfection-facilitating agents, such as liposomes, viral sequences, viral particles, whole viruses, lipofection, precipitating agents, etc., described in more detail above. The P promoter-targeting sequence can be delivered by any method, included direct needle injection, intravenous injection, topical administration, catheter infusion, particle accelerators, etc. The methods are described in more detail below.

[0477] The promoter-targeting sequence construct is taken up by cells. Homologous recombination between the construct and the endogenous sequence takes place, such that an endogenous sequence is placed under the control of the promoter. The promoter then drives the expression of the endogenous sequence.

[0478] The polynucleotide encoding a polypeptide of the present invention may contain a secretory signal sequence that facilitates secretion of the protein. Typically, the signal sequence is positioned in the coding region of the polynucleotide to be expressed towards or at the 5′ end of the coding region. The signal sequence may be homologous or heterologous to the polynucleotide of interest and may be homologous or heterologous to the cells to be transfected. Additionally, the signal sequence may be chemically synthesized using methods known in the art.

[0479] Any mode of administration of any of the above-described polynucleotides constructs can be used so long as the mode results in the expression of one or more molecules in an amount sufficient to provide a therapeutic effect. This includes direct needle injection, systemic injection, catheter infusion, biolistic injectors, particle accelerators (i.e., “gene guns”), gelfoam sponge depots, other commercially available depot materials, osmotic pumps (e.g., Alza minipumps), oral or suppositorial solid (tablet or pill) pharmaceutical formulations, and decanting or topical applications during surgery. For example, direct injection of naked calcium phosphate-precipitated plasmid into rat liver and rat spleen or a protein-coated plasmid into the portal vein has resulted in gene expression of the foreign gene in the rat livers (Kaneda et al., Science 243:375 (1989)).

[0480] A preferred method of local administration is by direct injection. Preferably, a recombinant molecule of the present invention complexed with a delivery vehicle is administered by direct injection into or locally within the area of arteries. Administration of a composition locally within the area of arteries refers to injecting the composition centimeters and preferably, millimeters within arteries.

[0481] Another method of local administration is to contact a polynucleotide construct of the present invention in or around a surgical wound. For example, a patient can undergo surgery and the polynucleotide construct can be coated on the surface of tissue inside the wound or the construct can be injected into areas of tissue inside the wound.

[0482] Therapeutic compositions useful in systemic administration, include recombinant molecules of the present invention complexed to a targeted delivery vehicle of the present invention. Suitable delivery vehicles for use with systemic administration comprise liposomes comprising ligands for targeting the vehicle to a particular site. In specific embodiments, suitable delivery vehicles for use with systemic administration comprise liposomes comprising polypeptides of the invention for targeting the vehicle to a particular site.

[0483] Preferred methods of systemic administration, include intravenous injection, aerosol, oral and percutaneous (topical) delivery. Intravenous injections can be performed using methods standard in the art. Aerosol delivery can also be performed using methods standard in the art (see, for example, Stribling et al., Proc. Natl. Acad. Sci. USA 189:11277-11281, 1992, which is incorporated herein by reference). Oral delivery can be performed by complexing a polynucleotide construct of the present invention to a carrier capable of withstanding degradation by digestive enzymes in the gut of an animal. Examples of such carriers, include plastic capsules or tablets, such as those known in the art. Topical delivery can be performed by mixing a polynucleotide construct of the present invention with a lipophilic reagent (e.g., DMSO) that is capable of passing into the skin.

[0484] Determining an effective amount of substance to be delivered can depend upon a number of factors including, for example, the chemical structure and biological activity of the substance, the age and weight of the animal, the precise condition requiring treatment and its severity, and the route of administration. The frequency of treatments depends upon a number of factors, such as the amount of polynucleotide constructs administered per dose, as well as the health and history of the subject. The precise amount, number of doses, and timing of doses will be determined by the attending physician or veterinarian.

[0485] Therapeutic compositions of the present invention can be administered to any animal, preferably to mammals and birds. Preferred mammals include humans, dogs, cats, mice, rats, rabbits sheep, cattle, horses and pigs, with humans being particularly preferred.

[0486] Biological Activities

[0487] Polynucleotides or polypeptides, or agonists or antagonists of the present invention, can be used in assays to test for one or more biological activities. If these polynucleotides or polypeptides, or agonists or antagonists of the present invention, do exhibit activity in a particular assay, it is likely that these molecules may be involved in the diseases associated with the biological activity. Thus, the polynucleotides and polypeptides, and agonists or antagonists could be used to diagnose, prognose, prevent, and/or treat the associated disease.

[0488] Signal transduction pathway component proteins are believed to be involved in biological activities associated with cellular proliferation, differentiation, survival, metabolism, movement and secretion. Accordingly, compositions of the invention (including polynucleotides, polypeptides and antibodies of the invention, and fragments and variants thereof) may be used in the diagnosis, prognosis, prevention and/or treatment of diseases and/or disorders associated with aberrant signal transduction pathway component activity.

[0489] In preferred embodiments, compositions of the invention (including polynucleotides, polypeptides and antibodies of the invention, and fragments and variants thereof) may be used in the diagnosis, prognosis, prevention and/or treatment of diseases and/or disorders relating to cancer and other proliferative disorders (e.g., chronic myelogenous leukemia and/or other diseases and disorders as described in the “Hyperproliferative Disorders” and “Diseases at the Cellular Level” section, below); and immune system disorders (e.g., X-linked agammaglobulinemia, severe combined immunodeficiency, and/or diseases and disorders described in the “Immune Activity” section below).

[0490] Indeed, because signal transduction plays such a vital role in cellular function, diseases and disorders relating to aberrant signal transduction will be numerous and will affect nearly every, if not every, system and cell type of the body. Because signal transduction plays a role in the regulation of cellular movements and migration, such as chemotaxis of immune system cells into wounded areas and areas of infection, or the migration of nerve cells in the developing nervous system, the compositions of the present invention may be useful for the detection, diagnosis, and/or treatment of wounds and infectious diseases (e.g., as described in the “Wound Healing and Epithelial Cell Proliferation,” “Chemotaxis,” and “Infectious Diseases” sections below) as well as of learning and cognitive diseases, depression, dementia, pyschosis, mania, bipolar syndromes, schizophrenia and other psychiatric conditions. Potentially, one or more of the gene products of the present invention is involved in synapse formation, neurotransmission, learning, cognition, homeostasis, or neuronal differentiation or survival, and therefore may be useful in the treatment of a variety of neurological disorders (e.g., as described in the “Neurological Diseases” section below). Additionally, signal tranduction regulates the formation of blood vessels and therefore the compositions of the present invention may be useful as angiogenic or anti-angiogenic agents or treating disorders in which undesired blood vessels are formed (e.g., tumors) or in which the formation of new blood vessels could be beneficial (e.g., cardiovascular diseases).

[0491] In certain embodiments, a polypeptide of the invention, or polynucleotides, antibodies, agonists, or antagonists corresponding to that polypeptide, may be used to diagnose and/or prognose diseases and/or disorders associated with the tissue(s) in which the polypeptide of the invention is expressed including one, two, three, four, five, or more tissues disclosed in Table 1 a, column 8 (Tissue Distribution Library Code).

[0492] Thus, polynucleotides, translation products and antibodies of the invention are useful in the diagnosis, prognosis, prevention and/or treatment of diseases and/or disorders associated with activities that include, but are not limited to, cellular proliferation, differentiation, survival, metabolism, movement and secretion.

[0493] More generally, polynucleotides, translation products and antibodies corresponding to this gene may be useful for the diagnosis, prognosis, prevention and/or treatment of diseases and/or disorders associated with the following systems and activities.

[0494] Immune Activity

[0495] Polynucleotides, polypeptides, antibodies, and/or agonists or antagonists of the present invention may be useful in treating, preventing, diagnosing and/or prognosing diseases, disorders, and/or conditions of the immune system, by, for example, activating or inhibiting the proliferation, differentiation, or mobilization (chemotaxis) of immune cells. Immune cells develop through a process called hematopoiesis, producing myeloid (platelets, red blood cells, neutrophils, and macrophages) and lymphoid (B and T lymphocytes) cells from pluripotent stem cells. The etiology of these immune diseases, disorders, and/or conditions may be genetic, somatic, such as cancer and some autoimmune diseases, acquired (e.g., by chemotherapy or toxins), or infectious. Moreover, polynucleotides, polypeptides, antibodies, and/or agonists or antagonists of the present invention can be used as a marker or detector of a particular immune system disease or disorder.

[0496] In another embodiment, a polypeptide of the invention, or polynucleotides, antibodies, agonists, or antagonists corresponding to that polypeptide, may be used to treat diseases and disorders of the immune system and/or to inhibit or enhance an immune response generated by cells associated with the tissue(s) in which the polypeptide of the invention is expressed, including one, two, three, four, five, or more tissues disclosed in Table 1A, column 8 (Tissue Distribution Library Code).

[0497] Polynucleotides, polypeptides, antibodies, and/or agonists or antagonists of the present invention may be useful in treating, preventing, diagnosing, and/or prognosing immunodeficiencies, including both congenital and acquired immunodeficiencies. Examples of B cell immunodeficiencies in which immunoglobulin levels B cell function and/or B cell numbers are decreased include: X-linked agammaglobulinemia (Bruton's disease), X-linked infantile agammaglobulinemia, X-linked immunodeficiency with hyper IgM, non X-linked immunodeficiency with hyper IgM, X-linked lymphoproliferative syndrome (XLP), agammaglobulinemia including congenital and acquired agammaglobulinemia, adult onset agammaglobulinemia, late-onset agammaglobulinemia, dysgammaglobulinemia, hypogammaglobulinemia, unspecified hypogammaglobulinemia, recessive agammaglobulinemia (Swiss type), Selective IgM deficiency, selective IgA deficiency, selective IgG subclass deficiencies, IgG subclass deficiency (with or without IgA deficiency), Ig deficiency with increased IgM, IgG and IgA deficiency with increased IgM, antibody deficiency with normal or elevated Igs, Ig heavy chain deletions, kappa chain deficiency, B cell lymphoproliferative disorder (BLPD), common variable immunodeficiency (CVID), common variable immunodeficiency (CVI) (acquired), and transient hypogammaglobulinemia of infancy.

[0498] In specific embodiments, ataxia-telangiectasia or conditions associated with ataxia-telangiectasia are treated, prevented, diagnosed, and/or prognosing using the polypeptides or polynucleotides of the invention, and/or agonists or antagonists thereof.

[0499] Examples of congenital immunodeficiencies in which T cell and/or B cell function and/or number is decreased include, but are not limited to: DiGeorge anomaly, severe combined immunodeficiencies (SCID) (including, but not limited to, X-linked SCID, autosomal recessive SCID, adenosine deaminase deficiency, purine nucleoside phosphorylase (PNP) deficiency, Class II MHC deficiency (Bare lymphocyte syndrome), Wiskott-Aldrich syndrome, and ataxia telangiectasia), thymic hypoplasia, third and fourth pharyngeal pouch syndrome, 22q11.2 deletion, chronic mucocutaneous candidiasis, natural killer cell deficiency (NK), idiopathic CD4+ T-lymphocytopenia, immunodeficiency with predominant T cell defect (unspecified), and unspecified immunodeficiency of cell mediated immunity.

[0500] In specific embodiments, DiGeorge anomaly or conditions associated with DiGeorge anomaly are treated, prevented, diagnosed, and/or prognosed using polypeptides or polynucleotides of the invention, or antagonists or agonists thereof.

[0501] Other immunodeficiencies that may be treated, prevented, diagnosed, and/or prognosed using polypeptides or polynucleotides of the invention, and/or agonists or antagonists thereof, include, but are not limited to, chronic granulomatous disease, Chédiak-Higashi syndrome, myeloperoxidase deficiency, leukocyte glucose-6-phosphate dehydrogenase deficiency, X-linked lymphoproliferative syndrome (XLP), leukocyte adhesion deficiency, complement component deficiencies (including C1, C2, C3, C4, C5, C6, C7, C8 and/or C9 deficiencies), reticular dysgenesis, thymic alymphoplasia-aplasia, immunodeficiency with thymoma, severe congenital leukopenia, dysplasia with immunodeficiency, neonatal neutropenia, short limbed dwarfism, and Nezelof syndrome-combined immunodeficiency with Igs.

[0502] In a preferred embodiment, the immunodeficiencies and/or conditions associated with the immunodeficiencies recited above are treated, prevented, diagnosed and/or prognosed using polynucleotides, polypeptides, antibodies, and/or agonists or antagonists of the present invention.

[0503] In a preferred embodiment polynucleotides, polypeptides, antibodies, and/or agonists or antagonists of the present invention could be used as an agent to boost immunoresponsiveness among immunodeficient individuals. In specific embodiments, polynucleotides, polypeptides, antibodies, and/or agonists or antagonists of the present invention could be used as an agent to boost immunoresponsiveness among B cell and/or T cell immunodeficient individuals.

[0504] The polynucleotides, polypeptides, antibodies, and/or agonists or antagonists of the present invention may be useful in treating, preventing, diagnosing and/or prognosing autoimmune disorders. Many autoimmune disorders result from inappropriate recognition of self as foreign material by immune cells. This inappropriate recognition results in an immune response leading to the destruction of the host tissue. Therefore, the administration of polynucleotides and polypeptides of the invention that can inhibit an immune response, particularly the proliferation, differentiation, or chemotaxis of T-cells, may be an effective therapy in preventing autoimmune disorders.

[0505] Autoimmune diseases or disorders that may be treated, prevented, diagnosed and/or prognosed by polynucleotides, polypeptides, antibodies, and/or agonists or antagonists of the present invention include, but are not limited to, one or more of the following: systemic lupus erythematosus, rheumatoid arthritis, ankylosing spondylitis, multiple sclerosis, autoimmune thyroiditis, Hashimoto's thyroiditis, autoimmune hemolytic anemia, hemolytic anemia, thrombocytopenia, autoimmune thrombocytopenia purpura, autoimmune neonatal thrombocytopenia, idiopathic thrombocytopenia purpura, purpura (e.g., Henloch-Scoenlein purpura), autoimmunocytopenia, Goodpasture's syndrome, Pemphigus vulgaris, myasthenia gravis, Grave's disease (hyperthyroidism), and insulin-resistant diabetes mellitus.

[0506] Additional disorders that are likely to have an autoimmune component that may be treated, prevented, and/or diagnosed with the compositions of the invention include, but are not limited to, type II collagen-induced arthritis, antiphospholipid syndrome, dermatitis, allergic encephalomyelitis, myocarditis, relapsing polychondritis, rheumatic heart disease, neuritis, uveitis ophthalmia, polyendocrinopathies, Reiter's Disease, Stiff-Man Syndrome, autoimmune pulmonary inflammation, autism, Guillain-Barre Syndrome, insulin dependent diabetes mellitus, and autoimmune inflammatory eye disorders.

[0507] Additional disorders that are likely to have an autoimmune component that may be treated, prevented, diagnosed and/or prognosed with the compositions of the invention include, but are not limited to, scleroderma with anti-collagen antibodies (often characterized, e.g., by nucleolar and other nuclear antibodies), mixed connective tissue disease (often characterized, e.g., by antibodies to extractable nuclear antigens (e.g., ribonucleoprotein)), polymyositis (often characterized, e.g., by nonhistone ANA), pernicious anemia (often characterized, e.g., by antiparietal cell, microsomes, and intrinsic factor antibodies), idiopathic Addison's disease (often characterized, e.g., by humoral and cell-mediated adrenal cytotoxicity, infertility (often characterized, e.g., by antispermatozoal antibodies), glomerulonephritis (often characterized, e.g., by glomerular basement membrane antibodies or immune complexes), bullous pemphigoid (often characterized, e.g., by IgG and complement in basement membrane), Sjogren's syndrome (often characterized, e.g., by multiple tissue antibodies, and/or a specific nonhistone ANA (SS-B)), diabetes mellitus (often characterized, e.g., by cell-mediated and humoral islet cell antibodies), and adrenergic drug resistance (including adrenergic drug resistance with asthma or cystic fibrosis) (often characterized, e.g., by beta-adrenergic receptor antibodies).

[0508] Additional disorders that may have an autoimmune component that may be treated, prevented, diagnosed and/or prognosed with the compositions of the invention include, but are not limited to, chronic active hepatitis (often characterized, e.g., by smooth muscle antibodies), primary biliary cirrhosis (often characterized, e.g., by mitochondria antibodies), other endocrine gland failure (often characterized, e.g., by specific tissue antibodies in some cases), vitiligo (often characterized, e.g., by melanocyte antibodies), vasculitis (often characterized, e.g., by Ig and complement in vessel walls and/or low serum complement), post-MI (often characterized, e.g., by myocardial antibodies), cardiotomy syndrome (often characterized, e.g., by myocardial antibodies), urticaria (often characterized, e.g., by IgG and IgM antibodies to IgE), atopic dermatitis (often characterized, e.g., by IgG and IgM antibodies to IgE), asthma (often characterized, e.g., by IgG and IgM antibodies to IgE), and many other inflammatory, granulomatous, degenerative, and atrophic disorders.

[0509] In a preferred embodiment, the autoimmune diseases and disorders and/or conditions associated with the diseases and disorders recited above are treated, prevented, diagnosed and/or prognosed using for example, antagonists or agonists, polypeptides or polynucleotides, or antibodies of the present invention. In a specific preferred embodiment, rheumatoid arthritis is treated, prevented, and/or diagnosed using polynucleotides, polypeptides, antibodies, and/or agonists or antagonists of the present invention.

[0510] In another specific preferred embodiment, systemic lupus erythematosus is treated, prevented, and/or diagnosed using polynucleotides, polypeptides, antibodies, and/or agonists or antagonists of the present invention. In another specific preferred embodiment, idiopathic thrombocytopenia purpura is treated, prevented, and/or diagnosed using polynucleotides, polypeptides, antibodies, and/or agonists or antagonists of the present invention.

[0511] In another specific preferred embodiment IgA nephropathy is treated, prevented, and/or diagnosed using polynucleotides, polypeptides, antibodies, and/or agonists or antagonists of the present invention.

[0512] In a preferred embodiment, the autoimmune diseases and disorders and/or conditions associated with the diseases and disorders recited above are treated, prevented, diagnosed and/or prognosed using polynucleotides, polypeptides, antibodies, and/or agonists or antagonists of the present invention

[0513] In preferred embodiments, polypeptides, antibodies, polynucleotides and/or agonists or antagonists of the present invention are used as a immunosuppressive agent(s).

[0514] Polynucleotides, polypeptides, antibodies, and/or agonists or antagonists of the present invention may be useful in treating, preventing, prognosing, and/or diagnosing diseases, disorders, and/or conditions of hematopoietic cells. Polynucleotides, polypeptides, antibodies, and/or agonists or antagonists of the present invention could be used to increase differentiation and proliferation of hematopoietic cells, including the pluripotent stem cells, in an effort to treat or prevent those diseases, disorders, and/or conditions associated with a decrease in certain (or many) types hematopoietic cells, including but not limited to, leukopenia, neutropenia, anemia, and thrombocytopenia. Alternatively, Polynucleotides, polypeptides, antibodies, and/or agonists or antagonists of the present invention could be used to increase differentiation and proliferation of hematopoietic cells, including the pluripotent stem cells, in an effort to treat or prevent those diseases, disorders, and/or conditions associated with an increase in certain (or many) types of hematopoietic cells, including but not limited to, histiocytosis.

[0515] Allergic reactions and conditions, such as asthma (particularly allergic asthma) or other respiratory problems, may also be treated, prevented, diagnosed and/or prognosed using polypeptides, antibodies, or polynucleotides of the invention, and/or agonists or antagonists thereof. Moreover, these molecules can be used to treat, prevent, prognose, and/or diagnose anaphylaxis, hypersensitivity to an antigenic molecule, or blood group incompatibility.

[0516] Additionally, polypeptides or polynucleotides of the invention, and/or agonists or antagonists thereof, may be used to treat, prevent, diagnose and/or prognose IgE-mediated allergic reactions. Such allergic reactions include, but are not limited to, asthma, rhinitis, and eczema. In specific embodiments, polynucleotides, polypeptides, antibodies, and/or agonists or antagonists of the present invention may be used to modulate IgE concentrations in vitro or in vivo.

[0517] Moreover, polynucleotides, polypeptides, antibodies, and/or agonists or antagonists of the present invention have uses in the diagnosis, prognosis, prevention, and/or treatment of inflammatory conditions. For example, since polypeptides, antibodies, or polynucleotides of the invention, and/or agonists or antagonists of the invention may inhibit the activation, proliferation and/or differentiation of cells involved in an inflammatory response, these molecules can be used to prevent and/or treat chronic and acute inflammatory conditions. Such inflammatory conditions include, but are not limited to, for example, inflammation associated with infection (e.g., septic shock, sepsis, or systemic inflammatory response syndrome), ischemia-reperfusion injury, endotoxin lethality, complement-mediated hyperacute rejection, nephritis, cytokine or chemokine induced lung injury, inflammatory bowel disease, Crohn's disease, over production of cytokines (e.g., TNF or IL-1.), respiratory disorders (e.g., asthma and allergy); gastrointestinal disorders (e.g., inflammatory bowel disease); cancers (e.g., gastric, ovarian, lung, bladder, liver, and breast); CNS disorders (e.g., multiple sclerosis; ischemic brain injury and/or stroke, traumatic brain injury, neurodegenerative disorders (e.g., Parkinson's disease and Alzheimer's disease); AIDS-related dementia; and prion disease); cardiovascular disorders (e.g., atherosclerosis, myocarditis, cardiovascular disease, and cardiopulmonary bypass complications); as well as many additional diseases, conditions, and disorders that are characterized by inflammation (e.g., hepatitis, rheumatoid arthritis, gout, trauma, pancreatitis, sarcoidosis, dermatitis, renal ischemia-reperfusion injury, Grave's disease, systemic lupus erythematosus, diabetes mellitus, and allogenic transplant rejection).

[0518] Because inflammation is a fundamental defense mechanism, inflammatory disorders can effect virtually any tissue of the body. Accordingly, polynucleotides, polypeptides, and antibodies of the invention, as well as agonists or antagonists thereof, have uses in the treatment of tissue-specific inflammatory disorders, including, but not limited to, adrenalitis, alveolitis, angiocholecystitis, appendicitis, balanitis, blepharitis, bronchitis, bursitis, carditis, cellulitis, cervicitis, cholecystitis, chorditis, cochlitis, colitis, conjunctivitis, cystitis, dermatitis, diverticulitis, encephalitis, endocarditis, esophagitis, eustachitis, fibrositis, folliculitis, gastritis, gastroenteritis, gingivitis, glossitis, hepatosplenitis, keratitis, labyrinthitis, laryngitis, lymphangitis, mastitis, media otitis, meningitis, metritis, mucitis, myocarditis, myosititis, myringitis, nephritis, neuritis, orchitis, osteochondritis, otitis, pericarditis, peritendonitis, peritonitis, pharyngitis, phlebitis, poliomyelitis, prostatitis, pulpitis, retinitis, rhinitis, salpingitis, scleritis, sclerochoroiditis, scrotitis, sinusitis, spondylitis, steatitis, stomatitis, synovitis, syringitis, tendonitis, tonsillitis, urethritis, and vaginitis.

[0519] In specific embodiments, polypeptides, antibodies, or polynucleotides of the invention, and/or agonists or antagonists thereof, are useful to diagnose, prognose, prevent, and/or treat organ transplant rejections and graft-versus-host disease. Organ rejection occurs by host immune cell destruction of the transplanted tissue through an immune response. Similarly, an immune response is also involved in GVHD, but, in this case, the foreign transplanted immune cells destroy the host tissues. Polypeptides, antibodies, or polynucleotides of the invention, and/or agonists or antagonists thereof, that inhibit an immune response, particularly the activation, proliferation, differentiation, or chemotaxis of T-cells, may be an effective therapy in preventing organ rejection or GVHD. In specific embodiments, polypeptides, antibodies, or polynucleotides of the invention, and/or agonists or antagonists thereof, that inhibit an immune response, particularly the activation, proliferation, differentiation, or chemotaxis of T-cells, may be an effective therapy in preventing experimental allergic and hyperacute xenograft rejection.

[0520] In other embodiments, polypeptides, antibodies, or polynucleotides of the invention, and/or agonists or antagonists thereof, are useful to diagnose, prognose, prevent, and/or treat immune complex diseases, including, but not limited to, serum sickness, post streptococcal glomerulonephritis, polyarteritis nodosa, and immune complex-induced vasculitis.

[0521] Polypeptides, antibodies, polynucleotides and/or agonists or antagonists of the invention can be used to treat, detect, and/or prevent infectious agents. For example, by increasing the immune response, particularly increasing the proliferation activation and/or differentiation of B and/or T cells, infectious diseases may be treated, detected, and/or prevented. The immune response may be increased by either enhancing an existing immune response, or by initiating a new immune response. Alternatively, polynucleotides, polypeptides, antibodies, and/or agonists or antagonists of the present invention may also directly inhibit the infectious agent (refer to section of application listing infectious agents, etc), without necessarily eliciting an immune response.

[0522] In another embodiment, polypeptides, antibodies, polynucleotides and/or agonists or antagonists of the present invention are used as a vaccine adjuvant that enhances immune responsiveness to an antigen. In a specific embodiment, polypeptides, antibodies, polynucleotides and/or agonists or antagonists of the present invention are used as an adjuvant to enhance tumor-specific immune responses.

[0523] In another specific embodiment, polypeptides, antibodies, polynucleotides and/or agonists or antagonists of the present invention are used as an adjuvant to enhance anti-viral immune responses. Anti-viral immune responses that may be enhanced using the compositions of the invention as an adjuvant, include virus and virus associated diseases or symptoms described herein or otherwise known in the art. In specific embodiments, the compositions of the invention are used as an adjuvant to enhance an immune response to a virus, disease, or symptom selected from the group consisting of: AIDS, meningitis, Dengue, EBV, and hepatitis (e.g., hepatitis B). In another specific embodiment, the compositions of the invention are used as an adjuvant to enhance an immune response to a virus, disease, or symptom selected from the group consisting of: HIV/AIDS, respiratory syncytial virus, Dengue, rotavirus, Japanese B encephalitis, influenza A and B, parainfluenza, measles, cytomegalovirus, rabies, Junin, Chikungunya, Rift Valley Fever, herpes simplex, and yellow fever.

[0524] In another specific embodiment, polypeptides, antibodies, polynucleotides and/or agonists or antagonists of the present invention are used as an adjuvant to enhance anti-bacterial or anti-fungal immune responses. Anti-bacterial or anti-fungal immune responses that may be enhanced using the compositions of the invention as an adjuvant, include bacteria or fungus and bacteria or fungus associated diseases or symptoms described herein or otherwise known in the art. In specific embodiments, the compositions of the invention are used as an adjuvant to enhance an immune response to a bacteria or fungus, disease, or symptom selected from the group consisting of: tetanus, Diphtheria, botulism, and meningitis type B.

[0525] In another specific embodiment, the compositions of the invention are used as an adjuvant to enhance an immune response to a bacteria or fungus, disease, or symptom selected from the group consisting of: Vibrio cholerae, Mycobacterium leprae, Salmonella typhi, Salmonella paratyphi, Meisseria meningitidis, Streptococcus pneumoniae, Group B streptococcus, Shigella spp., Enterotoxigenic Escherichia coli, Enterohemorrhagic E. coli, and Borrelia burgdorferi.

[0526] In another specific embodiment, polypeptides, antibodies, polynucleotides and/or agonists or antagonists of the present invention are used as an adjuvant to enhance anti-parasitic immune responses. Anti-parasitic immune responses that may be enhanced using the compositions of the invention as an adjuvant, include parasite and parasite associated diseases or symptoms described herein or otherwise known in the art. In specific embodiments, the compositions of the invention are used as an adjuvant to enhance an immune response to a parasite. In another specific embodiment, the compositions of the invention are used as an adjuvant to enhance an immune response to Plasmodium (malaria) or Leishmania.

[0527] In another specific embodiment, polypeptides, antibodies, polynucleotides and/or agonists or antagonists of the present invention may also be employed to treat infectious diseases including silicosis, sarcoidosis, and idiopathic pulmonary fibrosis; for example, by preventing the recruitment and activation of mononuclear phagocytes.

[0528] In another specific embodiment, polypeptides, antibodies, polynucleotides and/or agonists or antagonists of the present invention are used as an antigen for the generation of antibodies to inhibit or enhance immune mediated responses against polypeptides of the invention.

[0529] In one embodiment, polypeptides, antibodies, polynucleotides and/or agonists or antagonists of the present invention are administered to an animal (e.g., mouse, rat, rabbit, hamster, guinea pig, pigs, micro-pig, chicken, camel, goat, horse, cow, sheep, dog, cat, non-human primate, and human, most preferably human) to boost the immune system to produce increased quantities of one or more antibodies (e.g., IgG, IgA, IgM, and IgE), to induce higher affinity antibody production and immunoglobulin class switching (e.g., IgG, IgA, IgM, and IgE), and/or to increase an immune response.

[0530] In another specific embodiment, polypeptides, antibodies, polynucleotides and/or agonists or antagonists of the present invention are used as a stimulator of B cell responsiveness to pathogens.

[0531] In another specific embodiment, polypeptides, antibodies, polynucleotides and/or agonists or antagonists of the present invention are used as an activator of T cells.

[0532] In another specific embodiment, polypeptides, antibodies, polynucleotides and/or agonists or antagonists of the present invention are used as an agent that elevates the immune status of an individual prior to their receipt of immunosuppressive therapies.

[0533] In another specific embodiment, polypeptides, antibodies, polynucleotides and/or agonists or antagonists of the present invention are used as an agent to induce higher affinity antibodies.

[0534] In another specific embodiment, polypeptides, antibodies, polynucleotides and/or agonists or antagonists of the present invention are used as an agent to increase serum immunoglobulin concentrations.

[0535] In another specific embodiment, polypeptides, antibodies, polynucleotides and/or agonists or antagonists of the present invention are used as an agent to accelerate recovery of immunocompromised individuals.

[0536] In another specific embodiment, polypeptides, antibodies, polynucleotides and/or agonists or antagonists of the present invention are used as an agent to boost immunoresponsiveness among aged populations and/or neonates.

[0537] In another specific embodiment, polypeptides, antibodies, polynucleotides and/or agonists or antagonists of the present invention are used as an immune system enhancer prior to, during, or after bone marrow transplant and/or other transplants (e.g., allogeneic or xenogeneic organ transplantation). With respect to transplantation, compositions of the invention may be administered prior to, concomitant with, and/or after transplantation. In a specific embodiment, compositions of the invention are administered after transplantation, prior to the beginning of recovery of T-cell populations. In another specific embodiment, compositions of the invention are first administered after transplantation after the beginning of recovery of T cell populations, but prior to full recovery of B cell populations.

[0538] In another specific embodiment, polypeptides, antibodies, polynucleotides and/or agonists or antagonists of the present invention are used as an agent to boost immunoresponsiveness among individuals having an acquired loss of B cell function. Conditions resulting in an acquired loss of B cell function that may be ameliorated or treated by administering the polypeptides, antibodies, polynucleotides and/or agonists or antagonists thereof, include, but are not limited to, HIV Infection, AIDS, bone marrow transplant, and B cell chronic lymphocytic leukemia (CLL).

[0539] In another specific embodiment, polypeptides, antibodies, polynucleotides and/or agonists or antagonists of the present invention are used as an agent to boost immunoresponsiveness among individuals having a temporary immune deficiency. Conditions resulting in a temporary immune deficiency that may be ameliorated or treated by administering the polypeptides, antibodies, polynucleotides and/or agonists or antagonists thereof, include, but are not limited to, recovery from viral infections (e.g., influenza), conditions associated with malnutrition, recovery from infectious mononucleosis, or conditions associated with stress, recovery from measles, recovery from blood transfusion, and recovery from surgery.

[0540] In another specific embodiment, polypeptides, antibodies, polynucleotides and/or agonists or antagonists of the present invention are used as a regulator of antigen presentation by monocytes, dendritic cells, and/or B-cells. In one embodiment, polynucleotides, polypeptides, antibodies, and/or agonists or antagonists of the present invention enhance antigen presentation or antagonizes antigen presentation in vitro or in vivo. Moreover, in related embodiments, said enhancement or antagonism of antigen presentation may be useful as an anti-tumor treatment or to modulate the immune system.

[0541] In another specific embodiment, polypeptides, antibodies, polynucleotides and/or agonists or antagonists of the present invention are used as an agent to direct an individual's immune system towards development of a humoral response (i.e. TH2) as opposed to a TH1 cellular response.

[0542] In another specific embodiment, polypeptides, antibodies, polynucleotides and/or agonists or antagonists of the present invention are used as a means to induce tumor proliferation and thus make it more susceptible to anti-neoplastic agents. For example, multiple myeloma is a slowly dividing disease and is thus refractory to virtually all anti-neoplastic regimens. If these cells were forced to proliferate more rapidly their susceptibility profile would likely change.

[0543] In another specific embodiment, polypeptides, antibodies, polynucleotides and/or agonists or antagonists of the present invention are used as a stimulator of B cell production in pathologies such as AIDS, chronic lymphocyte disorder and/or Common Variable Immunodificiency.

[0544] In another specific embodiment, polypeptides, antibodies, polynucleotides and/or agonists or antagonists of the present invention are used as a therapy for generation and/or regeneration of lymphoid tissues following surgery, trauma or genetic defect. In another specific embodiment, polypeptides, antibodies, polynucleotides and/or agonists or antagonists of the present invention are used in the pretreatment of bone marrow samples transplant.

[0545] In another specific embodiment, polypeptides, antibodies, polynucleotides and/or agonists or antagonists of the present invention are used as a gene-based therapy for genetically inherited disorders resulting in immuno-incompetence/immunodeficiency such as observed among SCID patients.

[0546] In another specific embodiment, polypeptides, antibodies, polynucleotides and/or agonists or antagonists of the present invention are used as a means of activating monocytes/macrophages to defend against parasitic diseases that effect monocytes such as Leishmania.

[0547] In another specific embodiment, polypeptides, antibodies, polynucleotides and/or agonists or antagonists of the present invention are used as a means of regulating secreted cytokines that are elicited by polypeptides of the invention.

[0548] In another embodiment, polypeptides, antibodies, polynucleotides and/or agonists or antagonists of the present invention are used in one or more of the applications described herein, as they may apply to veterinary medicine.

[0549] In another specific embodiment, polypeptides, antibodies, polynucleotides and/or agonists or antagonists of the present invention are used as a means of blocking various of immune responses to foreign agents or self. Examples of diseases or conditions in blocking of certain aspects of immune responses may be desired include autoimmune disorders such as lupus, and arthritis, as well as immunoresponsiveness to skin allergies, inflammation, bowel disease, injury and diseases/disorders associated with pathogens.

[0550] In another specific embodiment, polypeptides, antibodies, polynucleotides and/or agonists or antagonists of the present invention are used as a therapy for preventing the B cell proliferation and Ig secretion associated with autoimmune diseases such as idiopathic thrombocytopenic purpura, systemic lupus erythematosus and multiple sclerosis.

[0551] In another specific embodiment, polypeptides, antibodies, polynucleotides and/or agonists or antagonists of the present invention are used as a inhibitor of B and/or T cell migration in endothelial cells. This activity disrupts tissue architecture or cognate responses and is useful, for example in disrupting immune responses, and blocking sepsis.

[0552] In another specific embodiment, polypeptides, antibodies, polynucleotides and/or agonists or antagonists of the present invention are used as a therapy for chronic hypergammaglobulinemia evident in such diseases as monoclonal gammopathy of undetermined significance (MGUS), Waldenstrom's disease, related idiopathic monoclonal gammopathies, and plasmacytomas.

[0553] In another specific embodiment, polypeptides, antibodies, polynucleotides and/or agonists or antagonists of the present invention may be employed for instance to inhibit polypeptide chemotaxis and activation of macrophages and their precursors, and of neutrophils, basophils, B lymphocytes and some T-cell subsets, e.g., activated and CD8 cytotoxic T cells and natural killer cells, in certain autoimmune and chronic inflammatory and infective diseases. Examples of autoimmune diseases are described herein and include multiple sclerosis, and insulin-dependent diabetes.

[0554] The polypeptides, antibodies, polynucleotides and/or agonists or antagonists of the present invention may also be employed to treat idiopathic hyper-eosinophilic syndrome by, for example, preventing eosinophil production and migration.

[0555] In another specific embodiment, polypeptides, antibodies, polynucleotides and/or agonists or antagonists of the present invention are used to enhance or inhibit complement mediated cell lysis.

[0556] In another specific embodiment, polypeptides, antibodies, polynucleotides and/or agonists or antagonists of the present invention are used to enhance or inhibit antibody dependent cellular cytotoxicity.

[0557] In another specific embodiment, polypeptides, antibodies, polynucleotides and/or agonists or antagonists of the present invention may also be employed for treating atherosclerosis, for example, by preventing monocyte infiltration in the artery wall.

[0558] In another specific embodiment, polypeptides, antibodies, polynucleotides and/or agonists or antagonists of the present invention may be employed to treat adult respiratory distress syndrome (ARDS).

[0559] In another specific embodiment, polypeptides, antibodies, polynucleotides and/or agonists or antagonists of the present invention may be useful for stimulating wound and tissue repair, stimulating angiogenesis, and/or stimulating the repair of vascular or lymphatic diseases or disorders. Additionally, agonists and antagonists of the invention may be used to stimulate the regeneration of mucosal surfaces.

[0560] In a specific embodiment, polynucleotides or polypeptides, and/or agonists thereof are used to diagnose, prognose, treat, and/or prevent a disorder characterized by primary or acquired immunodeficiency, deficient serum immunoglobulin production, recurrent infections, and/or immune system dysfunction. Moreover, polynucleotides or polypeptides, and/or agonists thereof may be used to treat or prevent infections of the joints, bones, skin, and/or parotid glands, blood-borne infections (e.g., sepsis, meningitis, septic arthritis, and/or osteomyelitis), autoimmune diseases (e.g., those disclosed herein), inflammatory disorders, and malignancies, and/or any disease or disorder or condition associated with these infections, diseases, disorders and/or malignancies) including, but not limited to, CVID, other primary immune deficiencies, HIV disease, CLL, recurrent bronchitis, sinusitis, otitis media, conjunctivitis, pneumonia, hepatitis, meningitis, herpes zoster (e.g., severe herpes zoster), and/or pneumocystis carnii. Other diseases and disorders that may be prevented, diagnosed, prognosed, and/or treated with polynucleotides or polypeptides, and/or agonists of the present invention include, but are not limited to, HIV infection, HTLV-BLV infection, lymphopenia, phagocyte bactericidal dysfunction anemia, thrombocytopenia, and hemoglobinuria.

[0561] In another embodiment, polynucleotides, polypeptides, antibodies, and/or agonists or antagonists of the present invention are used to treat, and/or diagnose an individual having common variable immunodeficiency disease (“CVID”; also known as “acquired agammaglobulinemia” and “acquired hypogammaglobulinemia”) or a subset of this disease.

[0562] In a specific embodiment, polynucleotides, polypeptides, antibodies, and/or agonists or antagonists of the present invention may be used to diagnose, prognose, prevent, and/or treat cancers or neoplasms including immune cell or immune tissue-related cancers or neoplasms. Examples of cancers or neoplasms that may be prevented, diagnosed, or treated by polynucleotides, polypeptides, antibodies, and/or agonists or antagonists of the present invention include, but are not limited to, acute myelogenous leukemia, chronic myelogenous leukemia, Hodgkin's disease, non-Hodgkin's lymphoma, acute lymphocytic anemia (ALL) Chronic lymphocyte leukemia, plasmacytomas, multiple myeloma, Burkitt's lymphoma, EBV-transformed diseases, and/or diseases and disorders described in the section entitled “Hyperproliferative Disorders” elsewhere herein.

[0563] In another specific embodiment, polypeptides, antibodies, polynucleotides and/or agonists or antagonists of the present invention are used as a therapy for decreasing cellular proliferation of Large B-cell Lymphomas.

[0564] In another specific embodiment, polypeptides, antibodies, polynucleotides and/or agonists or antagonists of the present invention are used as a means of decreasing the involvement of B cells and Ig associated with Chronic Myelogenous Leukemia.

[0565] In specific embodiments, the compositions of the invention are used as an agent to boost immunoresponsiveness among B cell immunodeficient individuals, such as, for example, an individual who has undergone a partial or complete splenectomy.

[0566] Antagonists of the invention include, for example, binding and/or inhibitory antibodies, antisense nucleic acids, ribozymes or soluble forms of the polypeptides of the present invention (e.g., Fc fusion protein; see, e.g., Example 9). Agonists of the invention include, for example, binding or stimulatory antibodies, and soluble forms of the polypeptides (e.g., Fc fusion proteins; see, e.g., Example 9). polypeptides, antibodies, polynucleotides and/or agonists or antagonists of the present invention may be employed in a composition with a pharmaceutically acceptable carrier, e.g., as described herein.

[0567] In another embodiment, polypeptides, antibodies, polynucleotides and/or agonists or antagonists of the present invention are administered to an animal (including, but not limited to, those listed above, and also including transgenic animals) incapable of producing functional endogenous antibody molecules or having an otherwise compromised endogenous immune system, but which is capable of producing human immunoglobulin molecules by means of a reconstituted or partially reconstituted immune system from another animal (see, e.g., published PCT Application Nos. WO98/24893, WO/9634096, WO/9633735, and WO/9110741). Administration of polypeptides, antibodies, polynucleotides and/or agonists or antagonists of the present invention to such animals is useful for the generation of monoclonal antibodies against the polypeptides, antibodies, polynucleotides and/or agonists or antagonists of the present invention.

[0568] Blood-Related Disorders

[0569] The polynucleotides, polypeptides, antibodies, and/or agonists or antagonists of the present invention may be used to modulate hemostatic (the stopping of bleeding) or thrombolytic (clot dissolving) activity. For example, by increasing hemostatic or thrombolytic activity, polynucleotides or polypeptides, and/or agonists or antagonists of the present invention could be used to treat or prevent blood coagulation diseases, disorders, and/or conditions (e.g., afibrinogenemia, factor deficiencies, hemophilia), blood platelet diseases, disorders, and/or conditions (e.g., thrombocytopenia), or wounds resulting from trauma, surgery, or other causes. Alternatively, polynucleotides, polypeptides, antibodies, and/or agonists or antagonists of the present invention that can decrease hemostatic or thrombolytic activity could be used to inhibit or dissolve clotting. These molecules could be important in the treatment or prevention of heart attacks (infarction), strokes, or scarring.

[0570] In specific embodiments, the polynucleotides, polypeptides, antibodies, and/or agonists or antagonists of the present invention may be used to prevent, diagnose, prognose, and/or treat thrombosis, arterial thrombosis, venous thrombosis, thromboembolism, pulmonary embolism, atherosclerosis, myocardial infarction, transient ischemic attack, unstable angina. In specific embodiments, the polynucleotides, polypeptides, antibodies, and/or agonists or antagonists of the present invention may be used for the prevention of occulsion of saphenous grafts, for reducing the risk of periprocedural thrombosis as might accompany angioplasty procedures, for reducing the risk of stroke in patients with atrial fibrillation including nonrheumatic atrial fibrillation, for reducing the risk of embolism associated with mechanical heart valves and or mitral valves disease. Other uses for the polynucleotides, polypeptides, antibodies, and/or agonists or antagonists of the present invention, include, but are not limited to, the prevention of occlusions in extrcorporeal devices (e.g., intravascular canulas, vascular access shunts in hemodialysis patients, hemodialysis machines, and cardiopulmonary bypass machines).

[0571] In another embodiment, a polypeptide of the invention, or polynucleotides, antibodies, agonists, or antagonists corresponding to that polypeptide, may be used to prevent, diagnose, prognose, and/or treat diseases and disorders of the blood and/or blood forming organs associated with the tissue(s) in which the polypeptide of the invention is expressed, including one, two, three, four, five, or more tissues disclosed in Table 1A, column 8 (Tissue Distribution Library Code).

[0572] The polynucleotides, polypeptides, antibodies, and/or agonists or antagonists of the present invention may be used to modulate hematopoietic activity (the formation of blood cells). For example, the polynucleotides, polypeptides, antibodies, and/or agonists or antagonists of the present invention may be used to increase the quantity of all or subsets of blood cells, such as, for example, erythrocytes, lymphocytes (B or T cells), myeloid cells (e.g., basophils, eosinophils, neutrophils, mast cells, macrophages) and platelets. The ability to decrease the quantity of blood cells or subsets of blood cells may be useful in the prevention, detection, diagnosis and/or treatment of anemias and leukopenias described below. Alternatively, the polynucleotides, polypeptides, antibodies, and/or agonists or antagonists of the present invention may be used to decrease the quantity of all or subsets of blood cells, such as, for example, erythrocytes, lymphocytes (B or T cells), myeloid cells (e.g., basophils, eosinophils, neutrophils, mast cells, macrophages) and platelets. The ability to decrease the quantity of blood cells or subsets of blood cells may be useful in the prevention, detection, diagnosis and/or treatment of leukocytoses, such as, for example eosinophilia.

[0573] The polynucleotides, polypeptides, antibodies, and/or agonists or antagonists of the present invention may be used to prevent, treat, or diagnose blood dyscrasia.

[0574] Anemias are conditions in which the number of red blood cells or amount of hemoglobin (the protein that carries oxygen) in them is below normal. Anemia may be caused by excessive bleeding, decreased red blood cell production, or increased red blood cell destruction (hemolysis). The polynucleotides, polypeptides, antibodies, and/or agonists or antagonists of the present invention may be useful in treating, preventing, and/or diagnosing anemias. Anemias that may be treated prevented or diagnosed by the polynucleotides, polypeptides, antibodies, and/or agonists or antagonists of the present invention include iron deficiency anemia, hypochromic anemia, microcytic anemia, chlorosis, hereditary siderob;astic anemia, idiopathic acquired sideroblastic anemia, red cell aplasia, megaloblastic anemia (e.g., pernicious anemia, (vitamin B12 deficiency) and folic acid deficiency anemia), aplastic anemia, hemolytic anemias (e.g., autoimmune helolytic anemia, microangiopathic hemolytic anemia, and paroxysmal nocturnal hemoglobinuria). The polynucleotides, polypeptides, antibodies, and/or agonists or antagonists of the present invention may be useful in treating, preventing, and/or diagnosing anemias associated with diseases including but not limited to, anemias associated with systemic lupus erythematosus, cancers, lymphomas, chronic renal disease, and enlarged spleens. The polynucleotides, polypeptides, antibodies, and/or agonists or antagonists of the present invention may be useful in treating, preventing, and/or diagnosing anemias arising from drug treatments such as anemias associated with methyldopa, dapsone, and/or sulfadrugs. Additionally, the polynucleotides, polypeptides, antibodies, and/or agonists or antagonists of the present invention may be useful in treating, preventing, and/or diagnosing anemias associated with abnormal red blood cell architecture including but not limited to, hereditary spherocytosis, hereditary elliptocytosis, glucose-6-phosphate dehydrogenase deficiency, and sickle cell anemia.

[0575] The polynucleotides, polypeptides, antibodies, and/or agonists or antagonists of the present invention may be useful in treating, preventing, and/or diagnosing hemoglobin abnormalities, (e.g., those associated with sickle cell anemia, hemoglobin C disease, hemoglobin S-C disease, and hemoglobin E disease). Additionally, the polynucleotides, polypeptides, antibodies, and/or agonists or antagonists of the present invention may be useful in diagnosing, prognosing, preventing, and/or treating thalassemias, including, but not limited to major and minor forms of alpha-thalassemia and beta-thalassemia.

[0576] In another embodiment, the polynucleotides, polypeptides, antibodies, and/or agonists or antagonists of the present invention may be useful in diagnosing, prognosing, preventing, and/or treating bleeding disorders including, but not limited to, thrombocytopenia (e.g., idiopathic thrombocytopenic purpura, and thrombotic thrombocytopenic purpura), Von Willebrand's disease, hereditary platelet disorders (e.g., storage pool disease such as Chediak-Higashi and Hermansky-Pudlak syndromes, thromboxane A2 dysfunction, thromboasthenia, and Bernard-Soulier syndrome), hemolytic-uremic syndrome, hemophelias such as hemophelia A or Factor VII deficiency and Christmas disease or Factor IX deficiency, Hereditary Hemorhhagic Telangiectsia, also known as Rendu-Osler-Weber syndrome, allergic purpura (Henoch Schonlein purpura) and disseminated intravascular coagulation.

[0577] The effect of the polynucleotides, polypeptides, antibodies, and/or agonists or antagonists of the present invention on the clotting time of blood may be monitored using any of the clotting tests known in the art including, but not limited to, whole blood partial thromboplastin time (PTT), the activated partial thromboplastin time (aPTT), the activated clotting time (ACT), the recalcified activated clotting time, or the Lee-White Clotting time.

[0578] Several diseases and a variety of drugs can cause platelet dysfunction. Thus, in a specific embodiment, the polynucleotides, polypeptides, antibodies, and/or agonists or antagonists of the present invention may be useful in diagnosing, prognosing, preventing, and/or treating acquired platelet dysfunction such as platelet dysfunction accompanying kidney failure, leukemia, multiple myeloma, cirrhosis of the liver, and systemic lupus erythematosus as well as platelet dysfunction associated with drug treatments, including treatment with aspirin, ticlopidine, nonsteroidal anti-inflammatory drugs (used for arthritis, pain, and sprains), and penicillin in high doses.

[0579] In another embodiment, the polynucleotides, polypeptides, antibodies, and/or agonists or antagonists of the present invention may be useful in diagnosing, prognosing, preventing, and/or treating diseases and disorders characterized by or associated with increased or decreased numbers of white blood cells. Leukopenia occurs when the number of white blood cells decreases below normal. Leukopenias include, but are not limited to, neutropenia and lymphocytopenia. An increase in the number of white blood cells compared to normal is known as leukocytosis. The body generates increased numbers of white blood cells during infection. Thus, leukocytosis may simply be a normal physiological parameter that reflects infection. Alternatively, leukocytosis may be an indicator of injury or other disease such as cancer. Leokocytoses, include but are not limited to, eosinophilia, and accumulations of macrophages. In specific embodiments, the polynucleotides, polypeptides, antibodies, and/or agonists or antagonists of the present invention may be useful in diagnosing, prognosing, preventing, and/or treating leukopenia. In other specific embodiments, the polynucleotides, polypeptides, antibodies, and/or agonists or antagonists of the present invention may be useful in diagnosing, prognosing, preventing, and/or treating leukocytosis.

[0580] Leukopenia may be a generalized decreased in all types of white blood cells, or may be a specific depletion of particular types of white blood cells. Thus, in specific embodiments, the polynucleotides, polypeptides, antibodies, and/or agonists or antagonists of the present invention may be useful in diagnosing, prognosing, preventing, and/or treating decreases in neutrophil numbers, known as neutropenia. Neutropenias that may be diagnosed, prognosed, prevented, and/or treated by the polynucleotides, polypeptides, antibodies, and/or agonists or antagonists of the present invention include, but are not limited to, infantile genetic agranulocytosis, familial neutropenia, cyclic neutropenia, neutropenias resulting from or associated with dietary deficiencies (e.g., vitamin B12 deficiency or folic acid deficiency), neutropenias resulting from or associated with drug treatments (e.g., antibiotic regimens such as penicillin treatment, sulfonamide treatment, anticoagulant treatment, anticonvulsant drugs, anti-thyroid drugs, and cancer chemotherapy), and neutropenias resulting from increased neutrophil destruction that may occur in association with some bacterial or viral infections, allergic disorders, autoimmune diseases, conditions in which an individual has an enlarged spleen (e.g., Felty syndrome, malaria and sarcoidosis), and some drug treatment regimens.

[0581] The polynucleotides, polypeptides, antibodies, and/or agonists or antagonists of the present invention may be useful in diagnosing, prognosing, preventing, and/or treating lymphocytopenias (decreased numbers of B and/or T lymphocytes), including, but not limited lymphocytopenias resulting from or associated with stress, drug treatments (e.g., drug treatment with corticosteroids, cancer chemotherapies, and/or radiation therapies), AIDS infection and/or other diseases such as, for example, cancer, rheumatoid arthritis, systemic lupus erythematosus, chronic infections, some viral infections and/or hereditary disorders (e.g., DiGeorge syndrome, Wiskott-Aldrich Syndome, severe combined immunodeficiency, ataxia telangiectsia).

[0582] The polynucleotides, polypeptides, antibodies, and/or agonists or antagonists of the present invention may be useful in diagnosing, prognosing, preventing, and/or treating diseases and disorders associated with macrophage numbers and/or macrophage function including, but not limited to, Gaucher's disease, Niemann-Pick disease, Letterer-Siwe disease and Hand-Schuller-Christian disease.

[0583] In another embodiment, the polynucleotides, polypeptides, antibodies, and/or agonists or antagonists of the present invention may be useful in diagnosing, prognosing, preventing, and/or treating diseases and disorders associated with eosinophil numbers and/or eosinophil function including, but not limited to, idiopathic hypereosinophilic syndrome, eosinophilia-myalgia syndrome, and Hand-Schuller-Christian disease.

[0584] In yet another embodiment, the polynucleotides, polypeptides, antibodies, and/or agonists or antagonists of the present invention may be useful in diagnosing, prognosing, preventing, and/or treating leukemias and lymphomas including, but not limited to, acute lymphocytic (lymphpblastic) leukemia (ALL), acute myeloid (myelocytic, myelogenous, myeloblastic, or myelomonocytic) leukemia, chronic lymphocytic leukemia (e.g., B cell leukemias, T cell leukemias, Sezary syndrome, and Hairy cell leukenia), chronic myelocytic (myeloid, myelogenous, or granulocytic) leukemia, Hodgkin's lymphoma, non-hodgkin's lymphoma, Burkitt's lymphoma, and mycosis fungoides.

[0585] In other embodiments, the polynucleotides, polypeptides, antibodies, and/or agonists or antagonists of the present invention may be useful in diagnosing, prognosing, preventing, and/or treating diseases and disorders of plasma cells including, but not limited to, plasma cell dyscrasias, monoclonal gammaopathies, monoclonal gammopathies of undetermined significance, multiple myeloma, macroglobulinemia, Waldenstrom's macroglobulinemia, cryoglobulinemia, and Raynaud's phenomenon.

[0586] In other embodiments, the polynucleotides, polypeptides, antibodies, and/or agonists or antagonists of the present invention may be useful in treating, preventing, and/or diagnosing myeloproliferative disorders, including but not limited to, polycythemia vera, relative polycythemia, secondary polycythemia, myelofibrosis, acute myelofibrosis, agnogenic myelod metaplasia, thrombocythemia, (including both primary and seconday thrombocythemia) and chronic myelocytic leukemia.

[0587] In other embodiments, the polynucleotides, polypeptides, antibodies, and/or agonists or antagonists of the present invention may be useful as a treatment prior to surgery, to increase blood cell production.

[0588] In other embodiments, the polynucleotides, polypeptides, antibodies, and/or agonists or antagonists of the present invention may be useful as an agent to enhance the migration, phagocytosis, superoxide production, antibody dependent cellular cytotoxicity of neutrophils, eosionophils and macrophages.

[0589] In other embodiments, the polynucleotides, polypeptides, antibodies, and/or agonists or antagonists of the present invention may be useful as an agent to increase the number of stem cells in circulation prior to stem cells pheresis. In another specific embodiment, the polynucleotides, polypeptides, antibodies, and/or agonists or antagonists of the present invention may be useful as an agent to increase the number of stem cells in circulation prior to platelet pheresis.

[0590] In other embodiments, the polynucleotides, polypeptides, antibodies, and/or agonists or antagonists of the present invention may be useful as an agent to increase cytokine production.

[0591] In other embodiments, the polynucleotides, polypeptides, antibodies, and/or agonists or antagonists of the present invention may be useful in preventing, diagnosing, and/or treating primary hematopoietic disorders.

[0592] Hyperproliferative Disorders

[0593] In certain embodiments, polynucleotides or polypeptides, or agonists or antagonists of the present invention can be used to treat or detect hyperproliferative disorders, including neoplasms. Polynucleotides or polypeptides, or agonists or antagonists of the present invention may inhibit the proliferation of the disorder through direct or indirect interactions. Alternatively, Polynucleotides or polypeptides, or agonists or antagonists of the present invention may proliferate other cells which can inhibit the hyperproliferative disorder.

[0594] For example, by increasing an immune response, particularly increasing antigenic qualities of the hyperproliferative disorder or by proliferating, differentiating, or mobilizing T-cells, hyperproliferative disorders can be treated. This immune response may be increased by either enhancing an existing immune response, or by initiating a new immune response. Alternatively, decreasing an immune response may also be a method of treating hyperproliferative disorders, such as a chemotherapeutic agent.

[0595] Examples of hyperproliferative disorders that can be treated or detected by polynucleotides or polypeptides, or agonists or antagonists of the present invention include, but are not limited to neoplasms located in the: colon, abdomen, bone, breast, digestive system, liver, pancreas, peritoneum, endocrine glands (adrenal, parathyroid, pituitary, testicles, ovary, thymus, thyroid), eye, head and neck, nervous (central and peripheral), lymphatic system, pelvis, skin, soft tissue, spleen, thorax, and urogenital tract.

[0596] Similarly, other hyperproliferative disorders can also be treated or detected by polynucleotides or polypeptides, or agonists or antagonists of the present invention. Examples of such hyperproliferative disorders include, but are not limited to: Acute Childhood Lymphoblastic Leukemia, Acute Lymphoblastic Leukemia, Acute Lymphocytic Leukemia, Acute Myeloid Leukemia, Adrenocortical Carcinoma, Adult (Primary) Hepatocellular Cancer, Adult (Primary) Liver Cancer, Adult Acute Lymphocytic Leukemia, Adult Acute Myeloid Leukemia, Adult Hodgkin's Disease, Adult Hodgkin's Lymphoma, Adult Lymphocytic Leukemia, Adult Non-Hodgkin's Lymphoma, Adult Primary Liver Cancer, Adult Soft Tissue Sarcoma, AIDS-Related Lymphoma, AIDS-Related Malignancies, Anal Cancer, Astrocytoma, Bile Duct Cancer, Bladder Cancer, Bone Cancer, Brain Stem Glioma, Brain Tumors, Breast Cancer, Cancer of the Renal Pelvis and Ureter, Central Nervous System (Primary) Lymphoma, Central Nervous System Lymphoma, Cerebellar Astrocytoma, Cerebral Astrocytoma, Cervical Cancer, Childhood (Primary) Hepatocellular Cancer, Childhood (Primary) Liver Cancer, Childhood Acute Lymphoblastic Leukemia, Childhood Acute Myeloid Leukemia, Childhood Brain Stem Glioma, Childhood Cerebellar Astrocytoma, Childhood Cerebral Astrocytoma, Childhood Extracranial Germ Cell Tumors, Childhood Hodgkin's Disease, Childhood Hodgkin's Lymphoma, Childhood Hypothalamic and Visual Pathway Glioma, Childhood Lymphoblastic Leukemia, Childhood Medulloblastoma, Childhood Non-Hodgkin's Lymphoma, Childhood Pineal and Supratentorial Primitive Neuroectodermal Tumors, Childhood Primary Liver Cancer, Childhood Rhabdomyosarcoma, Childhood Soft Tissue Sarcoma, Childhood Visual Pathway and Hypothalamic Glioma, Chronic Lymphocytic Leukemia, Chronic Myelogenous Leukemia, Colon Cancer, Cutaneous T-Cell Lymphoma, Endocrine Pancreas Islet Cell Carcinoma, Endometrial Cancer, Ependymoma, Epithelial Cancer, Esophageal Cancer, Ewing's Sarcoma and Related Tumors, Exocrine Pancreatic Cancer, Extracranial Germ Cell Tumor, Extragonadal Germ Cell Tumor, Extrahepatic Bile Duct Cancer, Eye Cancer, Female Breast Cancer, Gaucher's Disease, Gallbladder Cancer, Gastric Cancer, Gastrointestinal Carcinoid Tumor, Gastrointestinal Tumors, Germ Cell Tumors, Gestational Trophoblastic Tumor, Hairy Cell Leukemia, Head and Neck Cancer, Hepatocellular Cancer, Hodgkin's Disease, Hodgkin's Lymphoma, Hypergammaglobulinemia, Hypopharyngeal Cancer, Intestinal Cancers, Intraocular Melanoma, Islet Cell Carcinoma, Islet Cell Pancreatic Cancer, Kaposi's Sarcoma, Kidney Cancer, Laryngeal Cancer, Lip and Oral Cavity Cancer, Liver Cancer, Lung Cancer, Lymphoproliferative Disorders, Macroglobulinemia, Male Breast Cancer, Malignant Mesothelioma, Malignant Thymoma, Medulloblastoma, Melanoma, Mesothelioma, Metastatic Occult Primary Squamous Neck Cancer, Metastatic Primary Squamous Neck Cancer, Metastatic Squamous Neck Cancer, Multiple Myeloma, Multiple Myeloma/Plasma Cell Neoplasm, Myelodysplastic Syndrome, Myelogenous Leukemia, Myeloid Leukemia, Myeloproliferative Disorders, Nasal Cavity and Paranasal Sinus Cancer, Nasopharyngeal Cancer, Neuroblastoma, Non-Hodgkin's Lymphoma During Pregnancy, Nonmelanoma Skin Cancer, Non-Small Cell Lung Cancer, Occult Primary Metastatic Squamous Neck Cancer, Oropharyngeal Cancer, Osteo-/Malignant Fibrous Sarcoma, Osteosarcoma/Malignant Fibrous Histiocytoma, Osteosarcoma/Malignant Fibrous Histiocytoma of Bone, Ovarian Epithelial Cancer, Ovarian Germ Cell Tumor, Ovarian Low Malignant Potential Tumor, Pancreatic Cancer, Paraproteinemias, Purpura, Parathyroid Cancer, Penile Cancer, Pheochromocytoma, Pituitary Tumor, Plasma Cell Neoplasm/Multiple Myeloma, Primary Central Nervous System Lymphoma, Primary Liver Cancer, Prostate Cancer, Rectal Cancer, Renal Cell Cancer, Renal Pelvis and Ureter Cancer, Retinoblastoma, Rhabdomyosarcoma, Salivary Gland Cancer, Sarcoidosis Sarcomas, Sezary Syndrome, Skin Cancer, Small Cell Lung Cancer, Small Intestine Cancer, Soft Tissue Sarcoma, Squamous Neck Cancer, Stomach Cancer, Supratentorial Primitive Neuroectodermal and Pineal Tumors, T-Cell Lymphoma, Testicular Cancer, Thymoma, Thyroid Cancer, Transitional Cell Cancer of the Renal Pelvis and Ureter, Transitional Renal Pelvis and Ureter Cancer, Trophoblastic Tumors, Ureter and Renal Pelvis Cell Cancer, Urethral Cancer, Uterine Cancer, Uterine Sarcoma, Vaginal Cancer, Visual Pathway and Hypothalamic Glioma, Vulvar Cancer, Waldenstrom's Macroglobulinemia, Wilms's Tumor, and any other hyperproliferative disease, besides neoplasia, located in an organ system listed above.

[0597] In another preferred embodiment, polynucleotides or polypeptides, or agonists or antagonists of the present invention are used to diagnose, prognose, prevent, and/or treat premalignant conditions and to prevent progression to a neoplastic or malignant state, including but not limited to those disorders described above. Such uses are indicated in conditions known or suspected of preceding progression to neoplasia or cancer, in particular, where non-neoplastic cell growth consisting of hyperplasia, metaplasia, or most particularly, dysplasia has occurred (for review of such abnormal growth conditions, see Robbins and Angell, 1976, Basic Pathology, 2d Ed., W. B. Saunders Co., Philadelphia, pp. 68-79.)

[0598] Hyperplasia is a form of controlled cell proliferation, involving an increase in cell number in a tissue or organ, without significant alteration in structure or function. Hyperplastic disorders which can be diagnosed, prognosed, prevented, and/or treated with compositions of the invention (including polynucleotides, polypeptides, agonists or antagonists) include, but are not limited to, angiofollicular mediastinal lymph node hyperplasia, angiolymphoid hyperplasia with eosinophilia, atypical melanocytic hyperplasia, basal cell hyperplasia, benign giant lymph node hyperplasia, cementum hyperplasia, congenital adrenal hyperplasia, congenital sebaceous hyperplasia, cystic hyperplasia, cystic hyperplasia of the breast, denture hyperplasia, ductal hyperplasia, endometrial hyperplasia, fibromuscular hyperplasia, focal epithelial hyperplasia, gingival hyperplasia, inflammatory fibrous hyperplasia, inflammatory papillary hyperplasia, intravascular papillary endothelial hyperplasia, nodular hyperplasia of prostate, nodular regenerative hyperplasia, pseudoepitheliomatous hyperplasia, senile sebaceous hyperplasia, and verrucous hyperplasia.

[0599] Metaplasia is a form of controlled cell growth in which one type of adult or fully differentiated cell substitutes for another type of adult cell. Metaplastic disorders which can be diagnosed, prognosed, prevented, and/or treated with compositions of the invention (including polynucleotides, polypeptides, agonists or antagonists) include, but are not limited to, agnogenic myeloid metaplasia, apocrine metaplasia, atypical metaplasia, autoparenchymatous metaplasia, connective tissue metaplasia, epithelial metaplasia, intestinal metaplasia, metaplastic anemia, metaplastic ossification, metaplastic polyps, myeloid metaplasia, primary myeloid metaplasia, secondary myeloid metaplasia, squamous metaplasia, squamous metaplasia of amnion, and symptomatic myeloid metaplasia.

[0600] Dysplasia is frequently a forerunner of cancer, and is found mainly in the epithelia; it is the most disorderly form of non-neoplastic cell growth, involving a loss in individual cell uniformity and in the architectural orientation of cells. Dysplastic cells often have abnormally large, deeply stained nuclei, and exhibit pleomorphism. Dysplasia characteristically occurs where there exists chronic irritation or inflammation. Dysplastic disorders which can be diagnosed, prognosed, prevented, and/or treated with compositions of the invention (including polynucleotides, polypeptides, agonists or antagonists) include, but are not limited to, anhidrotic ectodermal dysplasia, anterofacial dysplasia, asphyxiating thoracic dysplasia, atriodigital dysplasia, bronchopulmonary dysplasia, cerebral dysplasia, cervical dysplasia, chondroectodermal dysplasia, cleidocranial dysplasia, congenital ectodermal dysplasia, craniodiaphysial dysplasia, craniocarpotarsal dysplasia, craniometaphysial dysplasia, dentin dysplasia, diaphysial dysplasia, ectodermal dysplasia, enamel dysplasia, encephalo-ophthalmic dysplasia, dysplasia epiphysialis hemimelia, dysplasia epiphysialis multiplex, dysplasia epiphysialis punctata, epithelial dysplasia, faciodigitogenital dysplasia, familial fibrous dysplasia of jaws, familial white folded dysplasia, fibromuscular dysplasia, fibrous dysplasia of bone, florid osseous dysplasia, hereditary renal-retinal dysplasia, hidrotic ectodermal dysplasia, hypohidrotic ectodermal dysplasia, lymphopenic thymic dysplasia, mammary dysplasia, mandibulofacial dysplasia, metaphysial dysplasia, Mondini dysplasia, monostotic fibrous dysplasia, mucoepithelial dysplasia, multiple epiphysial dysplasia, oculoauriculovertebral dysplasia, oculodentodigital dysplasia, oculovertebral dysplasia, odontogenic dysplasia, ophthalmomandibulomehic dysplasia, periapical cemental dysplasia, polyostotic fibrous dysplasia, pseudoachondroplastic spondyloepiphysial dysplasia, retinal dysplasia, septo-optic dysplasia, spondyloepiphysial dysplasia, and ventriculoradial dysplasia.

[0601] Additional pre-neoplastic disorders which can be diagnosed, prognosed, prevented, and/or treated with compositions of the invention (including polynucleotides, polypeptides, agonists or antagonists) include, but are not limited to, benign dysproliferative disorders (e.g., benign tumors, fibrocystic conditions, tissue hypertrophy, intestinal polyps, colon polyps, and esophageal dysplasia), leukoplakia, keratoses, Bowen's disease, Farmer's Skin, solar cheilitis, and solar keratosis.

[0602] In another embodiment, a polypeptide of the invention, or polynucleotides, antibodies, agonists, or antagonists corresponding to that polypeptide, may be used to diagnose and/or prognose disorders associated with the tissue(s) in which the polypeptide of the invention is expressed, including one, two, three, four, five, or more tissues disclosed in Table 1A, column 8 (Tissue Distribution Library Code).

[0603] In another embodiment, polynucleotides, polypeptides, antibodies, and/or agonists or antagonists of the present invention conjugated to a toxin or a radioactive isotope, as described herein, may be used to treat cancers and neoplasms, including, but not limited to those described herein. In a further preferred embodiment, polynucleotides, polypeptides, antibodies, and/or agonists or antagonists of the present invention conjugated to a toxin or a radioactive isotope, as described herein, may be used to treat acute myelogenous leukemia.

[0604] Additionally, polynucleotides, polypeptides, and/or agonists or antagonists of the invention may affect apoptosis, and therefore, would be useful in treating a number of diseases associated with increased cell survival or the inhibition of apoptosis. For example, diseases associated with increased cell survival or the inhibition of apoptosis that could be diagnosed, prognosed, prevented, and/or treated by polynucleotides, polypeptides, and/or agonists or antagonists of the invention, include cancers (such as follicular lymphomas, carcinomas with p53 mutations, and hormone-dependent tumors, including, but not limited to colon cancer, cardiac tumors, pancreatic cancer, melanoma, retinoblastoma, glioblastoma, lung cancer, intestinal cancer, testicular cancer, stomach cancer, neuroblastoma, myxoma, myoma, lymphoma, endothelioma, osteoblastoma, osteoclastoma, osteosarcoma, chondrosarcoma, adenoma, breast cancer, prostate cancer, Kaposi's sarcoma and ovarian cancer); autoimmune disorders such as, multiple sclerosis, Sjogren's syndrome, Hashimoto's thyroiditis, biliary cirrhosis, Behcet's disease, Crohn's disease, polymyositis, systemic lupus erythematosus and immune-related glomerulonephritis and rheumatoid arthritis) and viral infections (such as herpes viruses, pox viruses and adenoviruses), inflammation, graft v. host disease, acute graft rejection, and chronic graft rejection.

[0605] In preferred embodiments, polynucleotides, polypeptides, and/or agonists or antagonists of the invention are used to inhibit growth, progression, and/or metastasis of cancers, in particular those listed above.

[0606] Additional diseases or conditions associated with increased cell survival that could be diagnosed, prognosed, prevented, and/or treated by polynucleotides, polypeptides, and/or agonists or antagonists of the invention, include, but are not limited to, progression, and/or metastases of malignancies and related disorders such as leukemia (including acute leukemias (e.g., acute lymphocytic leukemia, acute myelocytic leukemia (including myeloblastic, promyelocytic, myelomonocytic, monocytic, and erythroleukemia)) and chronic leukemias (e.g., chronic myelocytic (granulocytic) leukemia and chronic lymphocytic leukemia)), polycythemia vera, lymphomas (e.g., Hodgkin's disease and non-Hodgkin's disease), multiple myeloma, Waldenstrom's macroglobulinemia, heavy chain disease, and solid tumors including, but not limited to, sarcomas and carcinomas such as fibrosarcoma, myxosarcoma, liposarcoma, chondrosarcoma, osteogenic sarcoma, chordoma, angiosarcoma, endotheliosarcoma, lymphangiosarcoma, lymphangioendotheliosarcoma, synovioma, mesothelioma, Ewing's tumor, leiomyosarcoma, rhabdomyosarcoma, colon carcinoma, pancreatic cancer, breast cancer, ovarian cancer, prostate cancer, squamous cell carcinoma, basal cell carcinoma, adenocarcinoma, sweat gland carcinoma, sebaceous gland carcinoma, papillary carcinoma, papillary adenocarcinomas, cystadenocarcinoma, medullary carcinoma, bronchogenic carcinoma, renal cell carcinoma, hepatoma, bile duct carcinoma, choriocarcinoma, seminoma, embryonal carcinoma, Wilm's tumor, cervical cancer, testicular tumor, lung carcinoma, small cell lung carcinoma, bladder carcinoma, epithelial carcinoma, glioma, astrocytoma, medulloblastoma, craniopharyngioma, ependymoma, pinealoma, emangioblastoma, acoustic neuroma, oligodendroglioma, menangioma, melanoma, neuroblastoma, and retinoblastoma.

[0607] Diseases associated with increased apoptosis that could be diagnosed, prognosed, prevented, and/or treated by polynucleotides, polypeptides, and/or agonists or antagonists of the invention, include AIDS; neurodegenerative disorders (such as Alzheimer's disease, Parkinson's disease, amyotrophic lateral sclerosis, retinitis pigmentosa, cerebellar degeneration and brain tumor or prior associated disease); autoimmune disorders (such as, multiple sclerosis, Sjogren's syndrome, Hashimoto's thyroiditis, biliary cirrhosis, Behcet's disease, Crohn's disease, polymyositis, systemic lupus erythematosus and immune-related glomerulonephritis and rheumatoid arthritis) myelodysplastic syndromes (such as aplastic anemia), graft v. host disease, ischemic injury (such as that caused by myocardial infarction, stroke and reperfusion injury), liver injury (e.g., hepatitis related liver injury, ischemia/reperfusion injury, cholestosis (bile duct injury) and liver cancer); toxin-induced liver disease (such as that caused by alcohol), septic shock, cachexia and anorexia.

[0608] Hyperproliferative diseases and/or disorders that could be diagnosed, prognosed, prevented, and/or treated by polynucleotides, polypeptides, and/or agonists or antagonists of the invention, include, but are not limited to, neoplasms located in the liver, abdomen, bone, breast, digestive system, pancreas, peritoneum, endocrine glands (adrenal, parathyroid, pituitary, testicles, ovary, thymus, thyroid), eye, head and neck, nervous system (central and peripheral), lymphatic system, pelvis, skin, soft tissue, spleen, thorax, and urogenital tract.

[0609] Similarly, other hyperproliferative disorders can also be diagnosed, prognosed, prevented, and/or treated by polynucleotides, polypeptides, and/or agonists or antagonists of the invention. Examples of such hyperproliferative disorders include, but are not limited to: hypergammaglobulinemia, lymphoproliferative disorders, paraproteinemias, purpura, sarcoidosis, Sezary Syndrome, Waldenstron's macroglobulinemia, Gaucher's Disease, histiocytosis, and any other hyperproliferative disease, besides neoplasia, located in an organ system listed above.

[0610] Another preferred embodiment utilizes polynucleotides of the present invention to inhibit aberrant cellular division, by gene therapy using the present invention, and/or protein fusions or fragments thereof.

[0611] Thus, the present invention provides a method for treating cell proliferative disorders by inserting into an abnormally proliferating cell a polynucleotide of the present invention, wherein said polynucleotide represses said expression.

[0612] Another embodiment of the present invention provides a method of treating cell-proliferative disorders in individuals comprising administration of one or more active gene copies of the present invention to an abnormally proliferating cell or cells. In a preferred embodiment, polynucleotides of the present invention is a DNA construct comprising a recombinant expression vector effective in expressing a DNA sequence encoding said polynucleotides. In another preferred embodiment of the present invention, the DNA construct encoding the poynucleotides of the present invention is inserted into cells to be treated utilizing a retrovirus, or more preferably an adenoviral vector (See G J. Nabel, et. al., PNAS 1999 96: 324-326, which is hereby incorporated by reference). In a most preferred embodiment, the viral vector is defective and will not transform non-proliferating cells, only proliferating cells. Moreover, in a preferred embodiment, the polynucleotides of the present invention inserted into proliferating cells either alone, or in combination with or fused to other polynucleotides, can then be modulated via an external stimulus (i.e. magnetic, specific small molecule, chemical, or drug administration, etc.), which acts upon the promoter upstream of said polynucleotides to induce expression of the encoded protein product. As such the beneficial therapeutic affect of the present invention may be expressly modulated (i.e. to increase, decrease, or inhibit expression of the present invention) based upon said external stimulus.

[0613] Polynucleotides of the present invention may be useful in repressing expression of oncogenic genes or antigens. By “repressing expression of the oncogenic genes” is intended the suppression of the transcription of the gene, the degradation of the gene transcript (pre-message RNA), the inhibition of splicing, the destruction of the messenger RNA, the prevention of the post-translational modifications of the protein, the destruction of the protein, or the inhibition of the normal function of the protein.

[0614] For local administration to abnormally proliferating cells, polynucleotides of the present invention may be administered by any method known to those of skill in the art including, but not limited to transfection, electroporation, microinjection of cells, or in vehicles such as liposomes, lipofectin, or as naked polynucleotides, or any other method described throughout the specification. The polynucleotide of the present invention may be delivered by known gene delivery systems such as, but not limited to, retroviral vectors (Gilboa, J. Virology 44:845 (1982); Hocke, Nature 320:275 (1986); Wilson, et al., Proc. Natl. Acad. Sci. U.S.A. 85:3014), vaccinia virus system (Chakrabarty et al., Mol. Cell Biol. 5:3403 (1985) or other efficient DNA delivery systems (Yates et al., Nature 313:812 (1985)) known to those skilled in the art. These references are exemplary only and are hereby incorporated by reference. In order to specifically deliver or transfect cells which are abnormally proliferating and spare non-dividing cells, it is preferable to utilize a retrovirus, or adenoviral (as described in the art and elsewhere herein) delivery system known to those of skill in the art. Since host DNA replication is required for retroviral DNA to integrate and the retrovirus will be unable to self replicate due to the lack of the retrovirus genes needed for its life cycle. Utilizing such a retroviral delivery system for polynucleotides of the present invention will target said gene and constructs to abnormally proliferating cells and will spare the non-dividing normal cells.

[0615] The polynucleotides of the present invention may be delivered directly to cell proliferative disorder/disease sites in internal organs, body cavities and the like by use of imaging devices used to guide an injecting needle directly to the disease site. The polynucleotides of the present invention may also be administered to disease sites at the time of surgical intervention.

[0616] By “cell proliferative disease” is meant any human or animal disease or disorder, affecting any one or any combination of organs, cavities, or body parts, which is characterized by single or multiple local abnormal proliferations of cells, groups of cells, or tissues, whether benign or malignant.

[0617] Any amount of the polynucleotides of the present invention may be administered as long as it has a biologically inhibiting effect on the proliferation of the treated cells. Moreover, it is possible to administer more than one of the polynucleotide of the present invention simultaneously to the same site. By “biologically inhibiting” is meant partial or total growth inhibition as well as decreases in the rate of proliferation or growth of the cells. The biologically inhibitory dose may be determined by assessing the effects of the polynucleotides of the present invention on target malignant or abnormally proliferating cell growth in tissue culture, tumor growth in animals and cell cultures, or any other method known to one of ordinary skill in the art.

[0618] The present invention is further directed to antibody-based therapies which involve administering of anti-polypeptides and anti-polynucleotide antibodies to a mammalian, preferably human, patient for treating one or more of the described disorders. Methods for producing anti-polypeptides and anti-polynucleotide antibodies polyclonal and monoclonal antibodies are described in detail elsewhere herein. Such antibodies may be provided in pharmaceutically acceptable compositions as known in the art or as described herein.

[0619] A summary of the ways in which the antibodies of the present invention may be used therapeutically includes binding polynucleotides or polypeptides of the present invention locally or systemically in the body or by direct cytotoxicity of the antibody, e.g. as mediated by complement (CDC) or by effector cells (ADCC). Some of these approaches are described in more detail below. Armed with the teachings provided herein, one of ordinary skill in the art will know how to use the antibodies of the present invention for diagnostic, monitoring or therapeutic purposes without undue experimentation.

[0620] In particular, the antibodies, fragments and derivatives of the present invention are useful for treating a subject having or developing cell proliferative and/or differentiation disorders as described herein. Such treatment comprises administering a single or multiple doses of the antibody, or a fragment, derivative, or a conjugate thereof.

[0621] The antibodies of this invention may be advantageously utilized in combination with other monoclonal or chimeric antibodies, or with lymphokines or hematopoietic growth factors, for example., which serve to increase the number or activity of effector cells which interact with the antibodies.

[0622] It is preferred to use high affinity and/or potent in vivo inhibiting and/or neutralizing antibodies against polypeptides or polynucleotides of the present invention, fragments or regions thereof, for both immunoassays directed to and therapy of disorders related to polynucleotides or polypeptides, including fragements thereof, of the present invention. Such antibodies, fragments, or regions, will preferably have an affinity for polynucleotides or polypeptides, including fragments thereof. Preferred binding affinities include those with a dissociation constant or Kd less than 5×10⁻⁶M, 10⁻⁶M, 5×10⁻⁷M, 10⁻⁷M, 5×10⁻⁸M, 10⁻⁸M, 5×10⁻⁹M, 10⁻⁹M, 5×10⁻¹⁰M, 10⁻¹⁰ M, 5×10⁻¹¹ M, 10⁻¹¹ M, 5×10⁻¹²M, 10⁻¹²M, 5×10⁻¹³M, 10⁻¹³M, 5×10⁻¹⁴M, 10⁻¹⁴M, 5×10⁻¹⁵M, and 10⁻¹⁵M.

[0623] Moreover, polypeptides of the present invention are useful in inhibiting the angiogenesis of proliferative cells or tissues, either alone, as a protein fusion, or in combination with other polypeptides directly or indirectly, as described elsewhere herein. In a most preferred embodiment, said anti-angiogenesis effect may be achieved indirectly, for example, through the inhibition of hematopoietic, tumor-specific cells, such as tumor-associated macrophages (See Joseph I B, et al. J Natl Cancer Inst, 90(21):1648-53 (1998), which is hereby incorporated by reference). Antibodies directed to polypeptides or polynucleotides of the present invention may also result in inhibition of angiogenesis directly, or indirectly (See Witte L, et al., Cancer Metastasis Rev. 17(2):155-61 (1998), which is hereby incorporated by reference)).

[0624] Polypeptides, including protein fusions, of the present invention, or fragments thereof may be useful in inhibiting proliferative cells or tissues through the induction of apoptosis. Said polypeptides may act either directly, or indirectly to induce apoptosis of proliferative cells and tissues, for example in the activation of a death-domain receptor, such as tumor necrosis factor (TNF) receptor-1, CD95 (Fas/APO-1), TNF-receptor-related apoptosis-mediated protein (TRAMP) and TNF-related apoptosis-inducing ligand (TRAIL) receptor-1 and -2 (See Schulze-Osthoff K, et.al., Eur J Biochem 254(3):439-59 (1998), which is hereby incorporated by reference). Moreover, in another preferred embodiment of the present invention, said polypeptides may induce apoptosis through other mechanisms, such as in the activation of other proteins which will activate apoptosis, or through stimulating the expression of said proteins, either alone or in combination with small molecule drugs or adjuviants, such as apoptonin, galectins, thioredoxins, anti-inflammatory proteins (See for example, Mutat Res 400(1-2):447-55 (1998), Med Hypotheses.50(5):423-33 (1998) Biol Interact. Apr 24;111-112:23-34 (1998), J Mol Med.76(6):402-12 (1998), Int J Tissue React;20(1):3-15 (1998), which are all hereby incorporated by reference).

[0625] Polypeptides, including protein fusions to, or fragments thereof, of the present invention are useful in inhibiting the metastasis of proliferative cells or tissues. Inhibition may occur as a direct result of administering polypeptides, or antibodies directed to said polypeptides as described elsewere herein, or indirectly, such as activating the expression of proteins known to inhibit metastasis, for example alpha 4 integrins, (See, e.g., Curr Top Microbiol Immunol 1998;231:125-41, which is hereby incorporated by reference). Such thereapeutic affects of the present invention may be achieved either alone, or in combination with small molecule drugs or adjuvants.

[0626] In another embodiment, the invention provides a method of delivering compositions containing the polypeptides of the invention (e.g., compositions containing polypeptides or polypeptide antibodes associated with heterologous polypeptides, heterologous nucleic acids, toxins, or prodrugs) to targeted cells expressing the polypeptide of the present invention. Polypeptides or polypeptide antibodes of the invention may be associated with with heterologous polypeptides, heterologous nucleic acids, toxins, or prodrugs via hydrophobic, hydrophilic, ionic and/or covalent interactions.

[0627] Polypeptides, protein fusions to, or fragments thereof, of the present invention are useful in enhancing the immunogenicity and/or antigenicity of proliferating cells or tissues, either directly, such as would occur if the polypeptides of the present invention ‘vaccinated’ the immune response to respond to proliferative antigens and immunogens, or indirectly, such as in activating the expression of proteins known to enhance the immune response (e.g. chemokines), to said antigens and immunogens.

[0628] Renal Disorders

[0629] Polynucleotides, polypeptides, antibodies, and/or agonists or antagonists of the present invention, may be used to treat, prevent, diagnose, and/or propgose disorders of the renal system. Renal disorders which can be diagnosed, prognosed, prevented, and/or treated with compositions of the invention include, but are not limited to, kidney failure, nephritis, blood vessel disorders of kidney, metabolic and congenital kidney disorders, urinary disorders of the kidney, autoimmune disorders, sclerosis and necrosis, electrolyte imbalance, and kidney cancers.

[0630] Kidney diseases which can be diagnosed, prognosed, prevented, and/or treated with compositions of the invention include, but are not limited to, acute kidney failure, chronic kidney failure, atheroembolic renal failure, end-stage renal disease, inflammatory diseases of the kidney (e.g., acute glomerulonephritis, postinfectious glomerulonephritis, rapidly progressive glomerulonephritis, nephrotic syndrome, membranous glomerulonephritis, familial nephrotic syndrome, membranoproliferative glomerulonephritis I and II, mesangial proliferative glomerulonephritis, chronic glomerulonephritis, acute tubulointerstitial nephritis, chronic tubulointerstitial nephritis, acute post-streptococcal glomerulonephritis (PSGN), pyelonephritis, lupus nephritis, chronic nephritis, interstitial nephritis, and post-streptococcal glomerulonephritis), blood vessel disorders of the kidneys (e.g., kidney infarction, atheroembolic kidney disease, cortical necrosis, malignant nephrosclerosis, renal vein thrombosis, renal underperfusion, renal retinopathy, renal ischemia-reperfusion, renal artery embolism, and renal artery stenosis), and kidney disorders resulting form urinary tract disease (e.g., pyelonephritis, hydronephrosis, urolithiasis (renal lithiasis, nephrolithiasis), reflux nephropathy, urinary tract infections, urinary retention, and acute or chronic unilateral obstructive uropathy.)

[0631] In addition, compositions of the invention can be used to diagnose, prognose, prevent, and/or treat metabolic and congenital disorders of the kidney (e.g., uremia, renal amyloidosis, renal osteodystrophy, renal tubular acidosis, renal glycosuria, nephrogenic diabetes insipidus, cystinuria, Fanconi's syndrome, renal fibrocystic osteosis (renal rickets), Hartnup disease, Bartter's syndrome, Liddle's syndrome, polycystic kidney disease, medullary cystic disease, medullary sponge kidney, Alport's syndrome, nail-patella syndrome, congenital nephrotic syndrome, CRUSH syndrome, horseshoe kidney, diabetic nephropathy, nephrogenic diabetes insipidus, analgesic nephropathy, kidney stones, and membranous nephropathy), and autoimmune disorders of the kidney (e.g., systemic lupus erythematosus (SLE), Goodpasture syndrome, IgA nephropathy, and IgM mesangial proliferative glomerulonephritis).

[0632] Compositions of the invention can also be used to diagnose, prognose, prevent, and/or treat sclerotic or necrotic disorders of the kidney (e.g., glomerulosclerosis, diabetic nephropathy, focal segmental glomerulosclerosis (FSGS), necrotizing glomerulonephritis, and renal papillary necrosis), cancers of the kidney (e.g., nephroma, hypernephroma, nephroblastoma, renal cell cancer, transitional cell cancer, renal adenocarcinoma, squamous cell cancer, and Wilm's tumor), and electrolyte imbalances (e.g., nephrocalcinosis, pyuria, edema, hydronephritis, proteinuria, hyponatremia, hypernatremia, hypokalemia, hyperkalemia, hypocalcemia, hypercalcemia, hypophosphatemia, and hyperphosphatemia).

[0633] Polypeptides may be administered using any method known in the art, including, but not limited to, direct needle injection at the delivery site, intravenous injection, topical administration, catheter infusion, biolistic injectors, particle accelerators, gelfoam sponge depots, other commercially available depot materials, osmotic pumps, oral or suppositorial solid pharmaceutical formulations, decanting or topical applications during surgery, aerosol delivery. Such methods are known in the art. Polypeptides may be administered as part of a Therapeutic, described in more detail below. Methods of delivering polynucleotides are described in more detail herein.

[0634] Cardiovascular Disorders

[0635] Polynucleotides or polypeptides, or agonists or antagonists of the present invention, may be used to treat, prevent, diagnose, and/or prognose cardiovascular disorders, including, but not limited to, peripheral artery disease, such as limb ischemia.

[0636] Cardiovascular disorders include, but are not limited to, cardiovascular abnormalities, such as arterio-arterial fistula, arteriovenous fistula, cerebral arteriovenous malformations, congenital heart defects, pulmonary atresia, and Scimitar Syndrome. Congenital heart defects include, but are not limited to, aortic coarctation, cor triatriatum, coronary vessel anomalies, crisscross heart, dextrocardia, patent ductus arteriosus, Ebstein's anomaly, Eisenmenger complex, hypoplastic left heart syndrome, levocardia, tetralogy of fallot, transposition of great vessels, double outlet right ventricle, tricuspid atresia, persistent truncus arteriosus, and heart septal defects, such as aortopulmonary septal defect, endocardial cushion defects, Lutembacher's Syndrome, trilogy of Fallot, ventricular heart septal defects.

[0637] Cardiovascular disorders also include, but are not limited to, heart disease, such as arrhythmias, carcinoid heart disease, high cardiac output, low cardiac output, cardiac tamponade, endocarditis (including bacterial), heart aneurysm, cardiac arrest, congestive heart failure, congestive cardiomyopathy, paroxysmal dyspnea, cardiac edema, heart hypertrophy, congestive cardiomyopathy, left ventricular hypertrophy, right ventricular hypertrophy, post-infarction heart rupture, ventricular septal rupture, heart valve diseases, myocardial diseases, myocardial ischemia, pericardial effusion, pericarditis (including constrictive and tuberculous), pneumopericardium, postpericardiotomy syndrome, pulmonary heart disease, rheumatic heart disease, ventricular dysfunction, hyperemia, cardiovascular pregnancy complications, Scimitar Syndrome, cardiovascular syphilis, and cardiovascular tuberculosis.

[0638] Arrhythmias include, but are not limited to, sinus arrhythmia, atrial fibrillation, atrial flutter, bradycardia, extrasystole, Adams-Stokes Syndrome, bundle-branch block, sinoatrial block, long QT syndrome, parasystole, Lown-Ganong-Levine Syndrome, Mahaim-type pre-excitation syndrome, Wolff-Parkinson-White syndrome, sick sinus syndrome, tachycardias, and ventricular fibrillation. Tachycardias include paroxysmal tachycardia, supraventricular tachycardia, accelerated idioventricular rhythm, atrioventricular nodal reentry tachycardia, ectopic atrial tachycardia, ectopic junctional tachycardia, sinoatrial nodal reentry tachycardia, sinus tachycardia, Torsades de Pointes, and ventricular tachycardia.

[0639] Heart valve diseases include, but are not limited to, aortic valve insufficiency, aortic valve stenosis, hear murmurs, aortic valve prolapse, mitral valve prolapse, tricuspid valve prolapse, mitral valve insufficiency, mitral valve stenosis, pulmonary atresia, pulmonary valve insufficiency, pulmonary valve stenosis, tricuspid atresia, tricuspid valve insufficiency, and tricuspid valve stenosis.

[0640] Myocardial diseases include, but are not limited to, alcoholic cardiomyopathy, congestive cardiomyopathy, hypertrophic cardiomyopathy, aortic subvalvular stenosis, pulmonary subvalvular stenosis, restrictive cardiomyopathy, Chagas cardiomyopathy, endocardial fibroelastosis, endomyocardial fibrosis, Kearns Syndrome, myocardial reperfusion injury, and myocarditis.

[0641] Myocardial ischemias include, but are not limited to, coronary disease, such as angina pectoris, coronary aneurysm, coronary arteriosclerosis, coronary thrombosis, coronary vasospasm, myocardial infarction and myocardial stunning.

[0642] Cardiovascular diseases also include vascular diseases such as aneurysms, angiodysplasia, angiomatosis, bacillary angiomatosis, Hippel-Lindau Disease, Klippel-Trenaunay-Weber Syndrome, Sturge-Weber Syndrome, angioneurotic edema, aortic diseases, Takayasu's Arteritis, aortitis, Leriche's Syndrome, arterial occlusive diseases, arteritis, enarteritis, polyarteritis nodosa, cerebrovascular disorders, diabetic angiopathies, diabetic retinopathy, embolisms, thrombosis, erythromelalgia, hemorrhoids, hepatic veno-occlusive disease, hypertension, hypotension, ischemia, peripheral vascular diseases, phlebitis, pulmonary veno-occlusive disease, Raynaud's disease, CREST syndrome, retinal vein occlusion, Scimitar syndrome, superior vena cava syndrome, telangiectasia, atacia telangiectasia, hereditary hemorrhagic telangiectasia, varicocele, varicose veins, varicose ulcer, vasculitis, and venous insufficiency.

[0643] Aneurysms include, but are not limited to, dissecting aneurysms, false aneurysms, infected aneurysms, ruptured aneurysms, aortic aneurysms, cerebral aneurysms, coronary aneurysms, heart aneurysms, and iliac aneurysms.

[0644] Arterial occlusive diseases include, but are not limited to, arteriosclerosis, intermittent claudication, carotid stenosis, fibromuscular dysplasias, mesenteric vascular occlusion, Moyamoya disease, renal artery obstruction, retinal artery occlusion, and thromboangiitis obliterans.

[0645] Cerebrovascular disorders include, but are not limited to, carotid artery diseases, cerebral amyloid angiopathy, cerebral aneurysm, cerebral anoxia, cerebral arteriosclerosis, cerebral arteriovenous malformation, cerebral artery diseases, cerebral embolism and thrombosis, carotid artery thrombosis, sinus thrombosis, Wallenberg's syndrome, cerebral hemorrhage, epidural hematoma, subdural hematoma, subaraxhnoid hemorrhage, cerebral infarction, cerebral ischemia (including transient), subclavian steal syndrome, periventricular leukomalacia, vascular headache, cluster headache, migraine, and vertebrobasilar insufficiency.

[0646] Embolisms include, but are not limited to, air embolisms, amniotic fluid embolisms, cholesterol embolisms, blue toe syndrome, fat embolisms, pulmonary embolisms, and thromoboembolisms. Thrombosis include, but are not limited to, coronary thrombosis, hepatic vein thrombosis, retinal vein occlusion, carotid artery thrombosis, sinus thrombosis, Wallenberg's syndrome, and thrombophlebitis.

[0647] Ischemic disorders include, but are not limited to, cerebral ischemia, ischemic colitis, compartment syndromes, anterior compartment syndrome, myocardial ischemia, reperfusion injuries, and peripheral limb ischemia. Vasculitis includes, but is not limited to, aortitis, arteritis, Behcet's Syndrome, Churg-Strauss Syndrome, mucocutaneous lymph node syndrome, thromboangiitis obliterans, hypersensitivity vasculitis, Schoenlein-Henoch purpura, allergic cutaneous vasculitis, and Wegener's granulomatosis. Polypeptides may be administered using any method known in the art, including, but not limited to, direct needle injection at the delivery site, intravenous injection, topical administration, catheter infusion, biolistic injectors, particle accelerators, gelfoam sponge depots, other commercially available depot materials, osmotic pumps, oral or suppositorial solid pharmaceutical formulations, decanting or topical applications during surgery, aerosol delivery. Such methods are known in the art. Polypeptides may be administered as part of a Therapeutic, described in more detail below. Methods of delivering polynucleotides are described in more detail herein.

[0648] Respiratory Disorders

[0649] Polynucleotides or polypeptides, or agonists or antagonists of the present invention may be used to treat, prevent, diagnose, and/or prognose diseases and/or disorders of the respiratory system.

[0650] Diseases and disorders of the respiratory system include, but are not limited to, nasal vestibulitis, nonallergic rhinitis (e.g., acute rhinitis, chronic rhinitis, atrophic rhinitis, vasomotor rhinitis), nasal polyps, and sinusitis, juvenile angiofibromas, cancer of the nose and juvenile papillomas, vocal cord polyps, nodules (singer's nodules), contact ulcers, vocal cord paralysis, laryngoceles, pharyngitis (e.g., viral and bacterial), tonsillitis, tonsillar cellulitis, parapharyngeal abscess, laryngitis, laryngoceles, and throat cancers (e.g., cancer of the nasopharynx, tonsil cancer, larynx cancer), lung cancer (e.g., squamous cell carcinoma, small cell (oat cell) carcinoma, large cell carcinoma, and adenocarcinoma), allergic disorders (eosinophilic pneumonia, hypersensitivity pneumonitis (e.g., extrinsic allergic alveolitis, allergic interstitial pneumonitis, organic dust pneumoconiosis, allergic bronchopulmonary aspergillosis, asthma, Wegener's granulomatosis (granulomatous vasculitis), Goodpasture's syndrome)), pneumonia (e.g., bacterial pneumonia (e.g., Streptococcus pneumoniae (pneumoncoccal pneumonia), Staphylococcus aureus (staphylococcal pneumonia), Gram-negative bacterial pneumonia (caused by, e.g., Klebsiella and Pseudomas spp.), Mycoplasma pneumoniae pneumonia, Hemophilus influenzae pneumonia, Legionella pneumophila (Legionnaires' disease), and Chlamydia psittaci (Psittacosis)), and viral pneumonia (e.g., influenza, chickenpox (varicella).

[0651] Additional diseases and disorders of the respiratory system include, but are not limited to bronchiolitis, polio (poliomyelitis), croup, respiratory syncytial viral infection, mumps, erythema infectiosum (fifth disease), roseola infantum, progressive rubella panencephalitis, german measles, and subacute sclerosing panencephalitis), fungal pneumonia (e.g., Histoplasmosis, Coccidioidomycosis, Blastomycosis, fungal infections in people with severely suppressed immune systems (e.g., cryptococcosis, caused by Cryptococcus neoformans; aspergillosis, caused by Aspergillus spp.; candidiasis, caused by Candida; and mucormycosis)), Pneumocystis carinii (pneumocystis pneumonia), atypical pneumonias (e.g., Mycoplasma and Chlamydia spp.), opportunistic infection pneumonia, nosocomial pneumonia, chemical pneumonitis, and aspiration pneumonia, pleural disorders (e.g., pleurisy, pleural effusion, and pneumothorax (e.g., simple spontaneous pneumothorax, complicated spontaneous pneumothorax, tension pneumothorax)), obstructive airway diseases (e.g., asthma, chronic obstructive pulmonary disease (COPD), emphysema, chronic or acute bronchitis), occupational lung diseases (e.g., silicosis, black lung (coal workers' pneumoconiosis), asbestosis, berylliosis, occupational asthsma, byssinosis, and benign pneumoconioses), Infiltrative Lung Disease (e.g., pulmonary fibrosis (e.g., fibrosing alveolitis, usual interstitial pneumonia), idiopathic pulmonary fibrosis, desquamative interstitial pneumonia, lymphoid interstitial pneumonia, histiocytosis X (e.g., Letterer-Siwe disease, Hand-Schuller-Christian disease, eosinophilic granuloma), idiopathic pulmonary hemosiderosis, sarcoidosis and pulmonary alveolar proteinosis), Acute respiratory distress syndrome (also called, e.g., adult respiratory distress syndrome), edema, pulmonary embolism, bronchitis (e.g., viral, bacterial), bronchiectasis, atelectasis, lung abscess (caused by, e.g., Staphylococcus aureus or Legionella pneumophila), and cystic fibrosis.

[0652] Anti-Angiogenesis Activity

[0653] The naturally occurring balance between endogenous stimulators and inhibitors of angiogenesis is one in which inhibitory influences predominate. Rastinejad et al., Cell 56:345-355 (1989). In those rare instances in which neovascularization occurs under normal physiological conditions, such as wound healing, organ regeneration, embryonic development, and female reproductive processes, angiogenesis is stringently regulated and spatially and temporally delimited. Under conditions of pathological angiogenesis such as that characterizing solid tumor growth, these regulatory controls fail. Unregulated angiogenesis becomes pathologic and sustains progression of many neoplastic and non-neoplastic diseases. A number of serious diseases are dominated by abnormal neovascularization including solid tumor growth and metastases, arthritis, some types of eye disorders, and psoriasis. See, e.g., reviews by Moses et al., Biotech. 9:630-634 (1991); Folkman et al., N. Engl. J. Med., 333:1757-1763 (1995); Auerbach et al., J Microvasc. Res. 29:401-411 (1985); Folkman, Advances in Cancer Research, eds. Klein and Weinhouse, Academic Press, New York, pp. 175-203 (1985); Patz, Am. J. Opthalmol. 94:715-743 (1982); and Folkman et al., Science 221:719-725 (1983). In a number of pathological conditions, the process of angiogenesis contributes to the disease state. For example, significant data have accumulated which suggest that the growth of solid tumors is dependent on angiogenesis. Folkman and Klagsbrun, Science 235:442-447 (1987).

[0654] The present invention provides for treatment of diseases or disorders associated with neovascularization by administration of the polynucleotides and/or polypeptides of the invention, as well as agonists or antagonists of the present invention. Malignant and metastatic conditions which can be treated with the polynucleotides and polypeptides, or agonists or antagonists of the invention include, but are not limited to, malignancies, solid tumors, and cancers described herein and otherwise known in the art (for a review of such disorders, see Fishman et al., Medicine, 2d Ed., J. B. Lippincott Co., Philadelphia (1985)).Thus, the present invention provides a method of treating an angiogenesis-related disease and/or disorder, comprising administering to an individual in need thereof a therapeutically effective amount of a polynucleotide, polypeptide, antagonist and/or agonist of the invention. For example, polynucleotides, polypeptides, antagonists and/or agonists may be utilized in a variety of additional methods in order to therapeutically treat a cancer or tumor. Cancers which may be treated with polynucleotides, polypeptides, antagonists and/or agonists include, but are not limited to solid tumors, including prostate, lung, breast, ovarian, stomach, pancreas, larynx, esophagus, testes, liver, parotid, biliary tract, colon, rectum, cervix, uterus, endometrium, kidney, bladder, thyroid cancer; primary tumors and metastases; melanomas; glioblastoma; Kaposi's sarcoma; leiomyosarcoma; non- small cell lung cancer; colorectal cancer; advanced malignancies; and blood born tumors such as leukemias. For example, polynucleotides, polypeptides, antagonists and/or agonists may be delivered topically, in order to treat cancers such as skin cancer, head and neck tumors, breast tumors, and Kaposi's sarcoma.

[0655] Within yet other aspects, polynucleotides, polypeptides, antagonists and/or agonists may be utilized to treat superficial forms of bladder cancer by, for example, intravesical administration. Polynucleotides, polypeptides, antagonists and/or agonists may be delivered directly into the tumor, or near the tumor site, via injection or a catheter. Of course, as the artisan of ordinary skill will appreciate, the appropriate mode of administration will vary according to the cancer to be treated. Other modes of delivery are discussed herein.

[0656] Polynucleotides, polypeptides, antagonists and/or agonists may be useful in treating other disorders, besides cancers, which involve angiogenesis. These disorders include, but are not limited to: benign tumors, for example hemangiomas, acoustic neuromas, neurofibromas, trachomas, and pyogenic granulomas; artheroscleric plaques; ocular angiogenic diseases, for example, diabetic retinopathy, retinopathy of prematurity, macular degeneration, corneal graft rejection, neovascular glaucoma, retrolental fibroplasia, rubeosis, retinoblastoma, uvietis and Pterygia (abnormal blood vessel growth) of the eye; rheumatoid arthritis; psoriasis; delayed wound healing; endometriosis; vasculogenesis; granulations; hypertrophic scars (keloids); nonunion fractures; scleroderma; trachoma; vascular adhesions; myocardial angiogenesis; coronary collaterals; cerebral collaterals; arteriovenous malformations; ischemic limb angiogenesis; Osler-Webber Syndrome; plaque neovascularization; telangiectasia; hemophiliac joints; angiofibroma; fibromuscular dysplasia; wound granulation; Crohn's disease; and atherosclerosis.

[0657] For example, within one aspect of the present invention methods are provided for treating hypertrophic scars and keloids, comprising the step of administering a polynucleotide, polypeptide, antagonist and/or agonist of the invention to a hypertrophic scar or keloid.

[0658] Within one embodiment of the present invention polynucleotides, polypeptides, antagonists and/or agonists of the invention are directly injected into a hypertrophic scar or keloid, in order to prevent the progression of these lesions. This therapy is of particular value in the prophylactic treatment of conditions which are known to result in the development of hypertrophic scars and keloids (e.g., bums), and is preferably initiated after the proliferative phase has had time to progress (approximately 14 days after the initial injury), but before hypertrophic scar or keloid development. As noted above, the present invention also provides methods for treating neovascular diseases of the eye, including for example, corneal neovascularization, neovascular glaucoma, proliferative diabetic retinopathy, retrolental fibroplasia and macular degeneration.

[0659] Moreover, Ocular disorders associated with neovascularization which can be treated with the polynucleotides and polypeptides of the present invention (including agonists and/or antagonists) include, but are not limited to: neovascular glaucoma, diabetic retinopathy, retinoblastoma, retrolental fibroplasia, uveitis, retinopathy of prematurity macular degeneration, corneal graft neovascularization, as well as other eye inflammatory diseases, ocular tumors and diseases associated with choroidal or iris neovascularization. See, e.g., reviews by Waltman et al., Am. J Ophthal. 85:704-710 (1978) and Gartner et al., Surv. Ophthal. 22:291-312 (1978).

[0660] Thus, within one aspect of the present invention methods are provided for treating neovascular diseases of the eye such as corneal neovascularization (including corneal graft neovascularization), comprising the step of administering to a patient a therapeutically effective amount of a compound (as described above) to the cornea, such that the formation of blood vessels is inhibited. Briefly, the cornea is a tissue which normally lacks blood vessels. In certain pathological conditions however, capillaries may extend into the cornea from the pericorneal vascular plexus of the limbus. When the cornea becomes vascularized, it also becomes clouded, resulting in a decline in the patient's visual acuity. Visual loss may become complete if the cornea completely opacitates. A wide variety of disorders can result in corneal neovascularization, including for example, corneal infections (e.g., trachoma, herpes simplex keratitis, leishmaniasis and onchocerciasis), immunological processes (e.g., graft rejection and Stevens-Johnson's syndrome), alkali burns, trauma, inflammation (of any cause), toxic and nutritional deficiency states, and as a complication of wearing contact lenses.

[0661] Within particularly preferred embodiments of the invention, may be prepared for topical administration in saline (combined with any of the preservatives and antimicrobial agents commonly used in ocular preparations), and administered in eyedrop form. The solution or suspension may be prepared in its pure form and administered several times daily. Alternatively, anti-angiogenic compositions, prepared as described above, may also be administered directly to the cornea. Within preferred embodiments, the anti-angiogenic composition is prepared with a muco-adhesive polymer which binds to cornea. Within further embodiments, the anti-angiogenic factors or anti-angiogenic compositions may be utilized as an adjunct to conventional steroid therapy. Topical therapy may also be useful prophylactically in corneal lesions which are known to have a high probability of inducing an angiogenic response (such as chemical burns). In these instances the treatment, likely in combination with steroids, may be instituted immediately to help prevent subsequent complications.

[0662] Within other embodiments, the compounds described above may be injected directly into the corneal stroma by an ophthalmologist under microscopic guidance. The preferred site of injection may vary with the morphology of the individual lesion, but the goal of the administration would be to place the composition at the advancing front of the vasculature (i.e., interspersed between the blood vessels and the normal cornea). In most cases this would involve perilimbic corneal injection to “protect” the cornea from the advancing blood vessels. This method may also be utilized shortly after a corneal insult in order to prophylactically prevent corneal neovascularization. In this situation the material could be injected in the perilimbic cornea interspersed between the corneal lesion and its undesired potential limbic blood supply. Such methods may also be utilized in a similar fashion to prevent capillary invasion of transplanted corneas. In a sustained-release form injections might only be required 2-3 times per year. A steroid could also be added to the injection solution to reduce inflammation resulting from the injection itself.

[0663] Within another aspect of the present invention, methods are provided for treating neovascular glaucoma, comprising the step of administering to a patient a therapeutically effective amount of a polynucleotide, polypeptide, antagonist and/or agonist to the eye, such that the formation of blood vessels is inhibited. In one embodiment, the compound may be administered topically to the eye in order to treat early forms of neovascular glaucoma. Within other embodiments, the compound may be implanted by injection into the region of the anterior chamber angle. Within other embodiments, the compound may also be placed in any location such that the compound is continuously released into the aqueous humor. Within another aspect of the present invention, methods are provided for treating proliferative diabetic retinopathy, comprising the step of administering to a patient a therapeutically effective amount of a polynucleotide, polypeptide, antagonist and/or agonist to the eyes, such that the formation of blood vessels is inhibited.

[0664] Within particularly preferred embodiments of the invention, proliferative diabetic retinopathy may be treated by injection into the aqueous humor or the vitreous, in order to increase the local concentration of the polynucleotide, polypeptide, antagonist and/or agonist in the retina. Preferably, this treatment should be initiated prior to the acquisition of severe disease requiring photocoagulation.

[0665] Within another aspect of the present invention, methods are provided for treating retrolental fibroplasia, comprising the step of administering to a patient a therapeutically effective amount of a polynucleotide, polypeptide, antagonist and/or agonist to the eye, such that the formation of blood vessels is inhibited. The compound may be administered topically, via intravitreous injection and/or via intraocular implants.

[0666] Additionally, disorders which can be treated with the polynucleotides, polypeptides, agonists and/or agonists include, but are not limited to, hemangioma, arthritis, psoriasis, angiofibroma, atherosclerotic plaques, delayed wound healing, granulations, hemophilic joints, hypertrophic scars, nonunion fractures, Osler-Weber syndrome, pyogenic granuloma, scleroderma, trachoma, and vascular adhesions.

[0667] Moreover, disorders and/or states, which can be treated, prevented, diagnosed, and/or prognosed with the the polynucleotides, polypeptides, agonists and/or agonists of the invention include, but are not limited to, solid tumors, blood born tumors such as leukemias, tumor metastasis, Kaposi's sarcoma, benign tumors, for example hemangiomas, acoustic neuromas, neurofibromas, trachomas, and pyogenic granulomas, rheumatoid arthritis, psoriasis, ocular angiogenic diseases, for example, diabetic retinopathy, retinopathy of prematurity, macular degeneration, corneal graft rejection, neovascular glaucoma, retrolental fibroplasia, rubeosis, retinoblastoma, and uvietis, delayed wound healing, endometriosis, vascluogenesis, granulations, hypertrophic scars (keloids), nonunion fractures, scleroderma, trachoma, vascular adhesions, myocardial angiogenesis, coronary collaterals, cerebral collaterals, arteriovenous malformations, ischemic limb angiogenesis, Osler-Webber Syndrome, plaque neovascularization, telangiectasia, hemophiliac joints, angiofibroma fibromuscular dysplasia, wound granulation, Crohn's disease, atherosclerosis, birth control agent by preventing vascularization required for embryo implantation controlling menstruation, diseases that have angiogenesis as a pathologic consequence such as cat scratch disease (Rochele minalia quintosa), ulcers (Helicobacter pylori), Bartonellosis and bacillary angiomatosis.

[0668] In one aspect of the birth control method, an amount of the compound sufficient to block embryo implantation is administered before or after intercourse and fertilization have occurred, thus providing an effective method of birth control, possibly a “morning after” method. Polynucleotides, polypeptides, agonists and/or agonists may also be used in controlling menstruation or administered as either a peritoneal lavage fluid or for peritoneal implantation in the treatment of endometriosis.

[0669] Polynucleotides, polypeptides, agonists and/or agonists of the present invention may be incorporated into surgical sutures in order to prevent stitch granulomas.

[0670] Polynucleotides, polypeptides, agonists and/or agonists may be utilized in a wide variety of surgical procedures. For example, within one aspect of the present invention a compositions (in the form of, for example, a spray or film) may be utilized to coat or spray an area prior to removal of a tumor, in order to isolate normal surrounding tissues from malignant tissue, and/or to prevent the spread of disease to surrounding tissues. Within other aspects of the present invention, compositions (e.g., in the form of a spray) may be delivered via endoscopic procedures in order to coat tumors, or inhibit angiogenesis in a desired locale. Within yet other aspects of the present invention, surgical meshes which have been coated with anti-angiogenic compositions of the present invention may be utilized in any procedure wherein a surgical mesh might be utilized. For example, within one embodiment of the invention a surgical mesh laden with an anti-angiogenic composition may be utilized during abdominal cancer resection surgery (e.g., subsequent to colon resection) in order to provide support to the structure, and to release an amount of the anti-angiogenic factor.

[0671] Within further aspects of the present invention, methods are provided for treating tumor excision sites, comprising administering a polynucleotide, polypeptide, agonist and/or agonist to the resection margins of a tumor subsequent to excision, such that the local recurrence of cancer and the formation of new blood vessels at the site is inhibited. Within one embodiment of the invention, the anti-angiogenic compound is administered directly to the tumor excision site (e.g., applied by swabbing, brushing or otherwise coating the resection margins of the tumor with the anti-angiogenic compound). Alternatively, the anti-angiogenic compounds may be incorporated into known surgical pastes prior to administration. Within particularly preferred embodiments of the invention, the anti-angiogenic compounds are applied after hepatic resections for malignancy, and after neurosurgical operations.

[0672] Within one aspect of the present invention, polynucleotides, polypeptides, agonists and/or agonists may be administered to the resection margin of a wide variety of tumors, including for example, breast, colon, brain and hepatic tumors. For example, within one embodiment of the invention, anti-angiogenic compounds may be administered to the site of a neurological tumor subsequent to excision, such that the formation of new blood vessels at the site are inhibited.

[0673] The polynucleotides, polypeptides, agonists and/or agonists of the present invention may also be administered along with other anti-angiogenic factors. Representative examples of other anti-angiogenic factors include: Anti-Invasive Factor, retinoic acid and derivatives thereof, paclitaxel, Suramin, Tissue Inhibitor of Metalloproteinase-1, Tissue Inhibitor of Metalloproteinase-2, Plasminogen Activator Inhibitor-1, Plasminogen Activator Inhibitor-2, and various forms of the lighter “d group” transition metals.

[0674] Lighter “d group” transition metals include, for example, vanadium, molybdenum, tungsten, titanium, niobium, and tantalum species. Such transition metal species may form transition metal complexes. Suitable complexes of the above-mentioned transition metal species include oxo transition metal complexes.

[0675] Representative examples of vanadium complexes include oxo vanadium complexes such as vanadate and vanadyl complexes. Suitable vanadate complexes include metavanadate and orthovanadate complexes such as, for example, ammonium metavanadate, sodium metavanadate, and sodium orthovanadate. Suitable vanadyl complexes include, for example, vanadyl acetylacetonate and vanadyl sulfate including vanadyl sulfate hydrates such as vanadyl sulfate mono- and trihydrates.

[0676] Representative examples of tungsten and molybdenum complexes also include oxo complexes. Suitable oxo tungsten complexes include tungstate and tungsten oxide complexes. Suitable tungstate complexes include ammonium tungstate, calcium tungstate, sodium tungstate dihydrate, and tungstic acid. Suitable tungsten oxides include tungsten (IV) oxide and tungsten (VI) oxide. Suitable oxo molybdenum complexes include molybdate, molybdenum oxide, and molybdenyl complexes. Suitable molybdate complexes include ammonium molybdate and its hydrates, sodium molybdate and its hydrates, and potassium molybdate and its hydrates. Suitable molybdenum oxides include molybdenum (VI) oxide, molybdenum (VI) oxide, and molybdic acid. Suitable molybdenyl complexes include, for example, molybdenyl acetylacetonate. Other suitable tungsten and molybdenum complexes include hydroxo derivatives derived from, for example, glycerol, tartaric acid, and sugars.

[0677] A wide variety of other anti-angiogenic factors may also be utilized within the context of the present invention. Representative examples include platelet factor 4; protamine sulphate; sulphated chitin derivatives (prepared from queen crab shells), (Murata et al., Cancer Res. 51:22-26, 1991); Sulphated Polysaccharide Peptidoglycan Complex (SP-PG) (the function of this compound may be enhanced by the presence of steroids such as estrogen, and tamoxifen citrate); Staurosporine; modulators of matrix metabolism, including for example, proline analogs, cishydroxyproline, d,L-3,4-dehydroproline, Thiaproline, alpha,alpha-dipyridyl, aminopropionitrile fumarate; 4-propyl-5-(4-pyridinyl)-2(3H)-oxazolone; Methotrexate; Mitoxantrone; Heparin; Interferons; 2 Macroglobulin-serum; ChIMP-3 (Pavloff et al., J. Bio. Chem. 267:17321-17326, 1992); Chymostatin (Tomkinson et al., Biochem J. 286:475-480, 1992); Cyclodextrin Tetradecasulfate; Eponemycin; Camptothecin; Fumagillin (Ingber et al., Nature 348:555-557, 1990); Gold Sodium Thiomalate (“GST”; Matsubara and Ziff, J. Clin. Invest. 79:1440-1446, 1987); anticollagenase-serum; alpha2-antiplasmin (Holmes et al., J. Biol. Chem. 262(4):1659-1664, 1987); Bisantrene (National Cancer Institute); Lobenzarit disodium (N-(2)-carboxyphenyl-4-chloroanthronilic acid disodium or “CCA”; Takeuchi et al., Agents Actions 36:312-316, 1992); Thalidomide; Angostatic steroid; AGM-1470; carboxynaminolmidazote; and metalloproteinase inhibitors such as BB94.

[0678] Diseases at the Cellular Level

[0679] Diseases associated with increased cell survival or the inhibition of apoptosis that could be treated, prevented, diagnosed, and/or prognosed using polynucleotides or polypeptides, as well as antagonists or agonists of the present invention, include cancers (such as follicular lymphomas, carcinomas with p53 mutations, and hormone-dependent tumors, including, but not limited to colon cancer, cardiac tumors, pancreatic cancer, melanoma, retinoblastoma, glioblastoma, lung cancer, intestinal cancer, testicular cancer, stomach cancer, neuroblastoma, myxoma, myoma, lymphoma, endothelioma, osteoblastoma, osteoclastoma, osteosarcoma, chondrosarcoma, adenoma, breast cancer, prostate cancer, Kaposi's sarcoma and ovarian cancer); autoimmune disorders (such as, multiple sclerosis, Sjogren's syndrome, Hashimoto's thyroiditis, biliary cirrhosis, Behcet's disease, Crohn's disease, polymyositis, systemic lupus erythematosus and immune-related glomerulonephritis and rheumatoid arthritis) and viral infections (such as herpes viruses, pox viruses and adenoviruses), inflammation, graft v. host disease, acute graft rejection, and chronic graft rejection.

[0680] In preferred embodiments, polynucleotides, polypeptides, and/or antagonists of the invention are used to inhibit growth, progression, and/or metasis of cancers, in particular those listed above.

[0681] Additional diseases or conditions associated with increased cell survival that could be treated or detected by polynucleotides or polypeptides, or agonists or antagonists of the present invention include, but are not limited to, progression, and/or metastases of malignancies and related disorders such as leukemia (including acute leukemias (e.g., acute lymphocytic leukemia, acute myelocytic leukemia (including myeloblastic, promyelocytic, myelomonocytic, monocytic, and erythroleukemia)) and chronic leukemias (e.g., chronic myelocytic (granulocytic) leukemia and chronic lymphocytic leukemia)), polycythemia vera, lymphomas (e.g., Hodgkin's disease and non-Hodgkin's disease), multiple myeloma, Waldenstrom's macroglobulinemia, heavy chain disease, and solid tumors including, but not limited to, sarcomas and carcinomas such as fibrosarcoma, myxosarcoma, liposarcoma, chondrosarcoma, osteogenic sarcoma, chordoma, angiosarcoma, endotheliosarcoma, lymphangiosarcoma, lymphangioendotheliosarcoma, synovioma, mesothelioma, Ewing's tumor, leiomyosarcoma, rhabdomyosarcoma, colon carcinoma, pancreatic cancer, breast cancer, ovarian cancer, prostate cancer, squamous cell carcinoma, basal cell carcinoma, adenocarcinoma, sweat gland carcinoma, sebaceous gland carcinoma, papillary carcinoma, papillary adenocarcinomas, cystadenocarcinoma, medullary carcinoma, bronchogenic carcinoma, renal cell carcinoma, hepatoma, bile duct carcinoma, choriocarcinoma, seminoma, embryonal carcinoma, Wilm's tumor, cervical cancer, testicular tumor, lung carcinoma, small cell lung carcinoma, bladder carcinoma, epithelial carcinoma, glioma, astrocytoma, medulloblastoma, craniopharyngioma, ependymoma, pinealoma, hemangioblastoma, acoustic neuroma, oligodendroglioma, menangioma, melanoma, neuroblastoma, and retinoblastoma.

[0682] Diseases associated with increased apoptosis that could be treated, prevented, diagnosed, and/or prognesed using polynucleotides or polypeptides, as well as agonists or antagonists of the present invention, include, but are not limited to, AIDS; neurodegenerative disorders (such as Alzheimer's disease, Parkinson's disease, Amyotrophic lateral sclerosis, Retinitis pigmentosa, Cerebellar degeneration and brain tumor or prior associated disease); autoimmune disorders (such as, multiple sclerosis, Sjogren's syndrome, Hashimoto's thyroiditis, biliary cirrhosis, Behcet's disease, Crohn's disease, polymyositis, systemic lupus erythematosus and immune-related glomerulonephritis and rheumatoid arthritis) myelodysplastic syndromes (such as aplastic anemia), graft v. host disease, ischemic injury (such as that caused by myocardial infarction, stroke and reperfusion injury), liver injury (e.g., hepatitis related liver injury, ischemia/reperfusion injury, cholestosis (bile duct injury) and liver cancer); toxin-induced liver disease (such as that caused by alcohol), septic shock, cachexia and anorexia.

[0683] Wound Healing and Epithelial Cell Proliferation

[0684] In accordance with yet a further aspect of the present invention, there is provided a process for utilizing polynucleotides or polypeptides, as well as agonists or antagonists of the present invention, for therapeutic purposes, for example, to stimulate epithelial cell proliferation and basal keratinocytes for the purpose of wound healing, and to stimulate hair follicle production and healing of dermal wounds. Polynucleotides or polypeptides, as well as agonists or antagonists of the present invention, may be clinically useful in stimulating wound healing including surgical wounds, excisional wounds, deep wounds involving damage of the dermis and epidermis, eye tissue wounds, dental tissue wounds, oral cavity wounds, diabetic ulcers, dermal ulcers, cubitus ulcers, arterial ulcers, venous stasis ulcers, burns resulting from heat exposure or chemicals, and other abnormal wound healing conditions such as uremia, malnutrition, vitamin deficiencies and complications associated with systemic treatment with steroids, radiation therapy and antineoplastic drugs and antimetabolites. Polynucleotides or polypeptides, as well as agonists or antagonists of the present invention, could be used to promote dermal reestablishment subsequent to dermal loss.

[0685] Polynucleotides or polypeptides, as well as agonists or antagonists of the present invention, could be used to increase the adherence of skin grafts to a wound bed and to stimulate re-epithelialization from the wound bed. The following are types of grafts that polynucleotides or polypeptides, agonists or antagonists of the present invention, could be used to increase adherence to a wound bed: autografts, artificial skin, allografts, autodermic graft, autoepdermic grafts, avacular grafts, Blair-Brown grafts, bone graft, brephoplastic grafts, cutis graft, delayed graft, dermic graft, epidermic graft, fascia graft, full thickness graft, heterologous graft, xenograft, homologous graft, hyperplastic graft, lamellar graft, mesh graft, mucosal graft, Ollier-Thiersch graft, omenpal graft, patch graft, pedicle graft, penetrating graft, split skin graft, thick split graft. Polynucleotides or polypeptides, as well as agonists or antagonists of the present invention, can be used to promote skin strength and to improve the appearance of aged skin.

[0686] It is believed that polynucleotides or polypeptides, as well as agonists or antagonists of the present invention, will also produce changes in hepatocyte proliferation, and epithelial cell proliferation in the lung, breast, pancreas, stomach, small intestine, and large intestine. Polynucleotides or polypeptides, as well as agonists or antagonists of the present invention, could promote proliferation of epithelial cells such as sebocytes, hair follicles, hepatocytes, type II pneumocytes, mucin-producing goblet cells, and other epithelial cells and their progenitors contained within the skin, lung, liver, and gastrointestinal tract. Polynucleotides or polypeptides, agonists or antagonists of the present invention, may promote proliferation of endothelial cells, keratinocytes, and basal keratinocytes.

[0687] Polynucleotides or polypeptides, as well as agonists or antagonists of the present invention, could also be used to reduce the side effects of gut toxicity that result from radiation, chemotherapy treatments or viral infections. Polynucleotides or polypeptides, as well as agonists or antagonists of the present invention, may have a cytoprotective effect on the small intestine mucosa. Polynucleotides or polypeptides, as well as agonists or antagonists of the present invention, may also stimulate healing of mucositis (mouth ulcers) that result from chemotherapy and viral infections.

[0688] Polynucleotides or polypeptides, as well as agonists or antagonists of the present invention, could further be used in full regeneration of skin in full and partial thickness skin defects, including burns, (i.e., repopulation of hair follicles, sweat glands, and sebaceous glands), treatment of other skin defects such as psoriasis. Polynucleotides or polypeptides, as well as agonists or antagonists of the present invention, could be used to treat epidermolysis bullosa, a defect in adherence of the epidermis to the underlying dermis which results in frequent, open and painful blisters by accelerating reepithelialization of these lesions. Polynucleotides or polypeptides, as well as agonists or antagonists of the present invention, could also be used to treat gastric and doudenal ulcers and help heal by scar formation of the mucosal lining and regeneration of glandular mucosa and duodenal mucosal lining more rapidly. Inflammatory bowel diseases, such as Crohn's disease and ulcerative colitis, are diseases which result in destruction of the mucosal surface of the small or large intestine, respectively. Thus, polynucleotides or polypeptides, as well as agonists or antagonists of the present invention, could be used to promote the resurfacing of the mucosal surface to aid more rapid healing and to prevent progression of inflammatory bowel disease. Treatment with polynucleotides or polypeptides, agonists or antagonists of the present invention, is expected to have a significant effect on the production of mucus throughout the gastrointestinal tract and could be used to protect the intestinal mucosa from injurious substances that are ingested or following surgery. Polynucleotides or polypeptides, as well as agonists or antagonists of the present invention, could be used to treat diseases associate with the under expression.

[0689] Moreover, polynucleotides or polypeptides, as well as agonists or antagonists of the present invention, could be used to prevent and heal damage to the lungs due to various pathological states. Polynucleotides or polypeptides, as well as agonists or antagonists of the present invention, which could stimulate proliferation and differentiation and promote the repair of alveoli and brochiolar epithelium to prevent or treat acute or chronic lung damage. For example, emphysema, which results in the progressive loss of aveoli, and inhalation injuries, i.e., resulting from smoke inhalation and burns, that cause necrosis of the bronchiolar epithelium and alveoli could be effectively treated using polynucleotides or polypeptides, agonists or antagonists of the present invention. Also, polynucleotides or polypeptides, as well as agonists or antagonists of the present invention, could be used to stimulate the proliferation of and differentiation of type II pneumocytes, which may help treat or prevent disease such as hyaline membrane diseases, such as infant respiratory distress syndrome and bronchopulmonary displasia, in premature infants.

[0690] Polynucleotides or polypeptides, as well as agonists or antagonists of the present invention, could stimulate the proliferation and differentiation of hepatocytes and, thus, could be used to alleviate or treat liver diseases and pathologies such as fulminant liver failure caused by cirrhosis, liver damage caused by viral hepatitis and toxic substances (i.e., acetaminophen, carbon tetraholoride and other hepatotoxins known in the art).

[0691] In addition, polynucleotides or polypeptides, as well as agonists or antagonists of the present invention, could be used treat or prevent the onset of diabetes mellitus. In patients with newly diagnosed Types I and II diabetes, where some islet cell function remains, polynucleotides or polypeptides, as well as agonists or antagonists of the present invention, could be used to maintain the islet function so as to alleviate, delay or prevent permanent manifestation of the disease. Also, polynucleotides or polypeptides, as well as agonists or antagonists of the present invention, could be used as an auxiliary in islet cell transplantation to improve or promote islet cell function.

[0692] Neural Activity and Neurological Diseases

[0693] The polynucleotides, polypeptides and agonists or antagonists of the invention may be used for the diagnosis and/or treatment of diseases, disorders, damage or injury of the brain and/or nervous system. Nervous system disorders that can be treated with the compositions of the invention (e.g., polypeptides, polynucleotides, and/or agonists or antagonists), include, but are not limited to, nervous system injuries, and diseases or disorders which result in either a disconnection of axons, a diminution or degeneration of neurons, or demyelination. Nervous system lesions which may be treated in a patient (including human and non-human mammalian patients) according to the methods of the invention, include but are not limited to, the following lesions of either the central (including spinal cord, brain) or peripheral nervous systems: (1) ischemic lesions, in which a lack of oxygen in a portion of the nervous system results in neuronal injury or death, including cerebral infarction or ischemia, or spinal cord infarction or ischemia; (2) traumatic lesions, including lesions caused by physical injury or associated with surgery, for example, lesions which sever a portion of the nervous system, or compression injuries; (3) malignant lesions, in which a portion of the nervous system is destroyed or injured by malignant tissue which is either a nervous system associated malignancy or a malignancy derived from non-nervous system tissue; (4) infectious lesions, in which a portion of the nervous system is destroyed or injured as a result of infection, for example, by an abscess or associated with infection by human immunodeficiency virus, herpes zoster, or herpes simplex virus or with Lyme disease, tuberculosis, or syphilis; (5) degenerative lesions, in which a portion of the nervous system is destroyed or injured as a result of a degenerative process including but not limited to, degeneration associated with Parkinson's disease, Alzheimer's disease, Huntington's chorea, or amyotrophic lateral sclerosis (ALS); (6) lesions associated with nutritional diseases or disorders, in which a portion of the nervous system is destroyed or injured by a nutritional disorder or disorder of metabolism including, but not limited to, vitamin B12 deficiency, folic acid deficiency, Wernicke disease, tobacco-alcohol amblyopia, Marchiafava-Bignami disease (primary degeneration of the corpus callosum), and alcoholic cerebellar degeneration; (7) neurological lesions associated with systemic diseases including, but not limited to, diabetes (diabetic neuropathy, Bell's palsy), systemic lupus erythematosus, carcinoma, or sarcoidosis; (8) lesions caused by toxic substances including alcohol, lead, or particular neurotoxins; and (9) demyelinated lesions in which a portion of the nervous system is destroyed or injured by a demyelinating disease including, but not limited to, multiple sclerosis, human immunodeficiency virus-associated myelopathy, transverse myelopathy or various etiologies, progressive multifocal leukoencephalopathy, and central pontine myelinolysis.

[0694] In one embodiment, the polypeptides, polynucleotides, or agonists or antagonists of the invention are used to protect neural cells from the damaging effects of hypoxia. In a further preferred embodiment, the polypeptides, polynucleotides, or agonists or antagonists of the invention are used to protect neural cells from the damaging effects of cerebral hypoxia. According to this embodiment, the compositions of the invention are used to treat or prevent neural cell injury associated with cerebral hypoxia. In one non-exclusive aspect of this embodiment, the polypeptides, polynucleotides, or agonists or antagonists of the invention, are used to treat or prevent neural cell injury associated with cerebral ischemia. In another non-exclusive aspect of this embodiment, the polypeptides, polynucleotides, or agonists or antagonists of the invention are used to treat or prevent neural cell injury associated with cerebral infarction.

[0695] In another preferred embodiment, the polypeptides, polynucleotides, or agonists or antagonists of the invention are used to treat or prevent neural cell injury associated with a stroke. In a specific embodiment, the polypeptides, polynucleotides, or agonists or antagonists of the invention are used to treat or prevent cerebral neural cell injury associated with a stroke.

[0696] In another preferred embodiment, the polypeptides, polynucleotides, or agonists or antagonists of the invention are used to treat or prevent neural cell injury associated with a heart attack. In a specific embodiment, the polypeptides, polynucleotides, or agonists or antagonists of the invention are used to treat or prevent cerebral neural cell injury associated with a heart attack.

[0697] The compositions of the invention which are useful for treating or preventing a nervous system disorder may be selected by testing for biological activity in promoting the survival or differentiation of neurons. For example, and not by way of limitation, compositions of the invention which elicit any of the following effects may be useful according to the invention: (1) increased survival time of neurons in culture either in the presence or absence of hypoxia or hypoxic conditions; (2) increased sprouting of neurons in culture or in vivo; (3) increased production of a neuron-associated molecule in culture or in vivo, e.g., choline acetyltransferase or acetylcholinesterase with respect to motor neurons; or (4) decreased symptoms of neuron dysfunction in vivo. Such effects may be measured by any method known in the art. In preferred, non-limiting embodiments, increased survival of neurons may routinely be measured using a method set forth herein or otherwise known in the art, such as, for example, in Zhang et al., Proc Natl Acad Sci USA 97:3637-42 (2000) or in Arakawa et al., J. Neurosci., 10:3507-15 (1990); increased sprouting of neurons may be detected by methods known in the art, such as, for example, the methods set forth in Pestronk et al., Exp. Neurol., 70:65-82 (1980), or Brown et al., Ann. Rev. Neurosci., 4:17-42 (1981); increased production of neuron-associated molecules may be measured by bioassay, enzymatic assay, antibody binding, Northern blot assay, etc., using techniques known in the art and depending on the molecule to be measured; and motor neuron dysfunction may be measured by assessing the physical manifestation of motor neuron disorder, e.g., weakness, motor neuron conduction velocity, or functional disability.

[0698] In specific embodiments, motor neuron disorders that may be treated according to the invention include, but are not limited to, disorders such as infarction, infection, exposure to toxin, trauma, surgical damage, degenerative disease or malignancy that may affect motor neurons as well as other components of the nervous system, as well as disorders that selectively affect neurons such as amyotrophic lateral sclerosis, and including, but not limited to, progressive spinal muscular atrophy, progressive bulbar palsy, primary lateral sclerosis, infantile and juvenile muscular atrophy, progressive bulbar paralysis of childhood (Fazio-Londe syndrome), poliomyelitis and the post polio syndrome, and Hereditary Motorsensory Neuropathy (Charcot-Marie-Tooth Disease).

[0699] Further, polypeptides or polynucleotides of the invention may play a role in neuronal survival; synapse formation; conductance; neural differentiation, etc. Thus, compositions of the invention (including polynucleotides, polypeptides, and agonists or antagonists) may be used to diagnose and/or treat or prevent diseases or disorders associated with these roles, including, but not limited to, learning and/or cognition disorders. The compositions of the invention may also be useful in the treatment or prevention of neurodegenerative disease states and/or behavioural disorders. Such neurodegenerative disease states and/or behavioral disorders include, but are not limited to, Alzheimer's Disease, Parkinson's Disease, Huntington's Disease, Tourette Syndrome, schizophrenia, mania, dementia, paranoia, obsessive compulsive disorder, panic disorder, learning disabilities, ALS, psychoses, autism, and altered behaviors, including disorders in feeding, sleep patterns, balance, and perception. In addition, compositions of the invention may also play a role in the treatment, prevention and/or detection of developmental disorders associated with the developing embryo, or sexually-linked disorders.

[0700] Additionally, polypeptides, polynucleotides and/or agonists or antagonists of the invention, may be useful in protecting neural cells from diseases, damage, disorders, or injury, associated with cerebrovascular disorders including, but not limited to, carotid artery diseases (e.g., carotid artery thrombosis, carotid stenosis, or Moyamoya Disease), cerebral amyloid angiopathy, cerebral aneurysm, cerebral anoxia, cerebral arteriosclerosis, cerebral arteriovenous malformations, cerebral artery diseases, cerebral embolism and thrombosis (e.g., carotid artery thrombosis, sinus thrombosis, or Wallenberg's Syndrome), cerebral hemorrhage (e.g., epidural or subdural hematoma, or subarachnoid hemorrhage), cerebral infarction, cerebral ischemia (e.g., transient cerebral ischemia, Subclavian Steal Syndrome, or vertebrobasilar insufficiency), vascular dementia (e.g., multi-infarct), leukomalacia, periventricular, and vascular headache (e.g., cluster headache or migraines).

[0701] In accordance with yet a further aspect of the present invention, there is provided a process for utilizing polynucleotides or polypeptides, as well as agonists or antagonists of the present invention, for therapeutic purposes, for example, to stimulate neurological cell proliferation and/or differentiation. Therefore, polynucleotides, polypeptides, agonists and/or antagonists of the invention may be used to treat and/or detect neurologic diseases. Moreover, polynucleotides or polypeptides, or agonists or antagonists of the invention, can be used as a marker or detector of a particular nervous system disease or disorder.

[0702] Examples of neurologic diseases which can be treated or detected with polynucleotides, polypeptides, agonists, and/or antagonists of the present invention include brain diseases, such as metabolic brain diseases which includes phenylketonuria such as maternal phenylketonuria, pyruvate carboxylase deficiency, pyruvate dehydrogenase complex deficiency, Wernicke's Encephalopathy, brain edema, brain neoplasms such as cerebellar neoplasms which include infratentorial neoplasms, cerebral ventricle neoplasms such as choroid plexus neoplasms, hypothalamic neoplasms, supratentorial neoplasms, canavan disease, cerebellar diseases such as cerebellar ataxia which include spinocerebellar degeneration such as ataxia telangiectasia, cerebellar dyssynergia, Friederich's Ataxia, Machado-Joseph Disease, olivopontocerebellar atrophy, cerebellar neoplasms such as infratentorial neoplasms, diffuse cerebral sclerosis such as encephalitis periaxialis, globoid cell leukodystrophy, metachromatic leukodystrophy and subacute sclerosing panencephalitis.

[0703] Additional neurologic diseases which can be treated or detected with polynucleotides, polypeptides, agonists, and/or antagonists of the present invention include cerebrovascular disorders (such as carotid artery diseases which include carotid artery thrombosis, carotid stenosis and Moyamoya Disease), cerebral amyloid angiopathy, cerebral aneurysm, cerebral anoxia, cerebral arteriosclerosis, cerebral arteriovenous malformations, cerebral artery diseases, cerebral embolism and thrombosis such as carotid artery thrombosis, sinus thrombosis and Wallenberg's Syndrome, cerebral hemorrhage such as epidural hematoma, subdural hematoma and subarachnoid hemorrhage, cerebral infarction, cerebral ischemia such as transient cerebral ischemia, Subclavian Steal Syndrome and vertebrobasilar insufficiency, vascular dementia such as multi-infarct dementia, periventricular leukomalacia, vascular headache such as cluster headache and migraine.

[0704] Additional neurologic diseases which can be treated or detected with polynucleotides, polypeptides, agonists, and/or antagonists of the present invention include dementia such as AIDS Dementia Complex, presenile dementia such as Alzheimer's Disease and Creutzfeldt-Jakob Syndrome, senile dementia such as Alzheimer's Disease and progressive supranuclear palsy, vascular dementia such as multi-infarct dementia, encephalitis which include encephalitis periaxialis, viral encephalitis such as epidemic encephalitis, Japanese Encephalitis, St. Louis Encephalitis, tick-borne encephalitis and West Nile Fever, acute disseminated encephalomyelitis, meningoencephatitis such as uveomeningoencephalitic syndrome, Postencephalitic Parkinson Disease and subacute sclerosing panencephalitis, encephalomalacia such as periventricular leukomalacia, epilepsy such as generalized epilepsy which includes infantile spasms, absence epilepsy, myoclonic epilepsy which includes MERRF Syndrome, tonic-clonic epilepsy, partial epilepsy such as complex partial epilepsy, frontal lobe epilepsy and temporal lobe epilepsy, post-traumatic epilepsy, status epilepticus such as Epilepsia Partialis Continua, and Hallervorden-Spatz Syndrome.

[0705] Additional neurologic diseases which can be treated or detected with polynucleotides, polypeptides, agonists, and/or antagonists of the present invention include hydrocephalus such as Dandy-Walker Syndrome and normal pressure hydrocephalus, hypothalamic diseases such as hypothalamic neoplasms, cerebral malaria, narcolepsy which includes cataplexy, bulbar poliomyelitis, cerebri pseudotumor, Rett Syndrome, Reye's Syndrome, thalamic diseases, cerebral toxoplasmosis, intracranial tuberculoma and Zellweger Syndrome, central nervous system infections such as AIDS Dementia Complex, Brain Abscess, subdural empyema, encephalomyelitis such as Equine Encephalomyelitis, Venezuelan Equine Encephalomyelitis, Necrotizing Hemorrhagic Encephalomyelitis, Visna, and cerebral malaria.

[0706] Additional neurologic diseases which can be treated or detected with polynucleotides, polypeptides, agonists, and/or antagonists of the present invention include meningitis such as arachnoiditis, aseptic meningtitis such as viral meningtitis which includes lymphocytic choriomeningitis, Bacterial meningtitis which includes Haemophilus Meningtitis, Listeria Meningtitis, Meningococcal Meningtitis such as Waterhouse-Friderichsen Syndrome, Pneumococcal Meningtitis and meningeal tuberculosis, fungal meningitis such as Cryptococcal Meningtitis, subdural effusion, meningoencephalitis such as uvemeningoencephalitic syndrome, myelitis such as transverse myelitis, neurosyphilis such as tabes dorsalis, poliomyelitis which includes bulbar poliomyelitis and postpoliomyelitis syndrome, prion diseases (such as Creutzfeldt-Jakob Syndrome, Bovine Spongiform Encephatopathy, Gerstmann-Straussler Syndrome, Kuru, Scrapie), and cerebral toxoplasmosis.

[0707] Additional neurologic diseases which can be treated or detected with polynucleotides, polypeptides, agonists, and/or antagonists of the present invention include central nervous system neoplasms such as brain neoplasms that include cerebellar neoplasms such as infratentorial neoplasms, cerebral ventricle neoplasms such as choroid plexus neoplasms, hypothalamic neoplasms and supratentorial neoplasms, meningeal neoplasms, spinal cord neoplasms which include epidural neoplasms, demyclinating diseases such as Canavan Diseases, diffuse cerebral sceloris which includes adrenoleukodystrophy, encephalitis periaxialis, globoid cell leukodystrophy, diffuse cerebral sclerosis such as metachromatic leukodystrophy, allergic encephalomyelitis, necrotizing hemorrhagic encephalomyelitis, progressive multifocal leukoencephalopathy, multiple sclerosis, central pontine myelinolysis, transverse myelitis, neuromyelitis optica, Scrapie, Swayback, Chronic Fatigue Syndrome, Visna, High Pressure Nervous Syndrome, Meningism, spinal cord diseases such as amyotonia congenita, amyotrophic lateral sclerosis, spinal muscular atrophy such as Werdnig-Hoffmann Disease, spinal cord compression, spinal cord neoplasms such as epidural neoplasms, syringomyelia, Tabes Dorsalis, Stiff-Man Syndrome, mental retardation such as Angelman Syndrome, Cri-du-Chat Syndrome, De Lange's Syndrome, Down Syndrome, Gangliosidoses such as gangliosidoses G(M1), Sandhoff Disease, Tay-Sachs Disease, Hartnup Disease, homocystinuria, Laurence-Moon- Biedl Syndrome, Lesch-Nyhan Syndrome, Maple Syrup Urine Disease, mucolipidosis such as fucosidosis, neuronal ceroid-lipofuscinosis, oculocerebrorenal syndrome, phenylketonuria such as maternal phenylketonuria, Prader-Willi Syndrome, Rett Syndrome, Rubinstein-Taybi Syndrome, Tuberous Sclerosis, WAGR Syndrome, nervous system abnormalities such as holoprosencephaly, neural tube defects such as anencephaly which includes hydrangencephaly, Arnold-Chaini Deformity, encephalocele, meningocele, meningomyelocele, spinal dysraphism such as spina bifida cystica and spina bifida occulta.

[0708] Additional neurologic diseases which can be treated or detected with polynucleotides, polypeptides, agonists, and/or antagonists of the present invention include hereditary motor and sensory neuropathies which include Charcot-Marie Disease, Hereditary optic atrophy, Refsum's Disease, hereditary spastic paraplegia, Werdnig-Hoffmann Disease, Hereditary Sensory and Autonomic Neuropathies such as Congenital Analgesia and Familial Dysautonomia, Neurologic manifestations (such as agnosia that include Gerstmann's Syndrome, Amnesia such as retrograde amnesia, apraxia, neurogenic bladder, cataplexy, communicative disorders such as hearing disorders that includes deafness, partial hearing loss, loudness recruitment and tinnitus, language disorders such as aphasia which include agraphia, anomia, broca aphasia, and Wemicke Aphasia, Dyslexia such as Acquired Dyslexia, language development disorders, speech disorders such as aphasia which includes anomia, broca aphasia and Wernicke Aphasia, articulation disorders, communicative disorders such as speech disorders which include dysarthria, echolalia, mutism and stuttering, voice disorders such as aphonia and hoarseness, decerebrate state, delirium, fasciculation, hallucinations, meningism, movement disorders such as angelman syndrome, ataxia, athetosis, chorea, dystonia, hypokinesia, muscle hypotonia, myoclonus, tic, torticollis and tremor, muscle hypertonia such as muscle rigidity such as stiff-man syndrome, muscle spasticity, paralysis such as facial paralysis which includes Herpes Zoster Oticus, Gastroparesis, Hemiplegia, ophthalmoplegia such as diplopia, Duane's Syndrome, Horner's Syndrome, Chronic progressive external ophthalmoplegia such as Kearns Syndrome, Bulbar Paralysis, Tropical Spastic Paraparesis, Paraplegia such as Brown-Sequard Syndrome, quadriplegia, respiratory paralysis and vocal cord paralysis, paresis, phantom limb, taste disorders such as ageusia and dysgeusia, vision disorders such as amblyopia, blindness, color vision defects, diplopia, hemianopsia, scotoma and subnormal vision, sleep disorders such as hypersomnia which includes Kleine-Levin Syndrome, insomnia, and somnambulism, spasm such as trismus, unconsciousness such as coma, persistent vegetative state and syncope and vertigo, neuromuscular diseases such as amyotonia congenita, amyotrophic lateral sclerosis, Lambert-Eaton Myasthenic Syndrome, motor neuron disease, muscular atrophy such as spinal muscular atrophy, Charcot-Marie Disease and Werdnig-Hoffmann Disease, Postpoliomyelitis Syndrome, Muscular Dystrophy, Myasthenia Gravis, Myotonia Atrophica, Myotonia Confenita, Nemaline Myopathy, Familial Periodic Paralysis, Multiplex Paramyloclonus, Tropical Spastic Paraparesis and Stiff-Man Syndrome, peripheral nervous system diseases such as acrodynia, amyloid neuropathies, autonomic nervous system diseases such as Adie's Syndrome, Barre-Lieou Syndrome, Familial Dysautonomia, Horner's Syndrome, Reflex Sympathetic Dystrophy and Shy-Drager Syndrome, Cranial Nerve Diseases such as Acoustic Nerve Diseases such as Acoustic Neuroma which includes Neurofibromatosis 2, Facial Nerve Diseases such as Facial Neuralgia,Melkersson-Rosenthal Syndrome, ocular motility disorders which includes amblyopia, nystagmus, oculomotor nerve paralysis, ophthalmoplegia such as Duane's Syndrome, Horner's Syndrome, Chronic Progressive External Ophthalmoplegia which includes Kearns Syndrome, Strabismus such as Esotropia and Exotropia, Oculomotor Nerve Paralysis, Optic Nerve Diseases such as Optic Atrophy which includes Hereditary Optic Atrophy, Optic Disk Drusen, Optic Neuritis such as Neuromyelitis Optica, Papilledema, Trigeminal Neuralgia, Vocal Cord Paralysis, Demyelinating Diseases such as Neuromyelitis Optica and Swayback, and Diabetic neuropathies such as diabetic foot.

[0709] Additional neurologic diseases which can be treated or detected with polynucleotides, polypeptides, agonists, and/or antagonists of the present invention include nerve compression syndromes such as carpal tunnel syndrome, tarsal tunnel syndrome, thoracic outlet syndrome such as cervical rib syndrome, ulnar nerve compression syndrome, neuralgia such as causalgia, cervico-brachial neuralgia, facial neuralgia and trigeminal neuralgia, neuritis such as experimental allergic neuritis, optic neuritis, polyneuritis, polyradiculoneuritis and radiculities such as polyradiculitis, hereditary motor and sensory neuropathies such as Charcot-Marie Disease, Hereditary Optic Atrophy, Refsum's Disease, Hereditary Spastic Paraplegia and Werdnig-Hoffmann Disease, Hereditary Sensory and Autonomic Neuropathies which include Congenital Analgesia and Familial Dysautonomia, POEMS Syndrome, Sciatica, Gustatory Sweating and Tetany).

[0710] Endocrine Disorders

[0711] Polynucleotides or polypeptides, or agonists or antagonists of the present invention, may be used to treat, prevent, diagnose, and/or prognose disorders and/or diseases related to hormone imbalance, and/or disorders or diseases of the endocrine system.

[0712] Hormones secreted by the glands of the endocrine system control physical growth, sexual function, metabolism, and other functions. Disorders may be classified in two ways: disturbances in the production of hormones, and the inability of tissues to respond to hormones. The etiology of these hormone imbalance or endocrine system diseases, disorders or conditions may be genetic, somatic, such as cancer and some autoimmune diseases, acquired (e.g., by chemotherapy, injury or toxins), or infectious. Moreover, polynucleotides, polypeptides, antibodies, and/or agonists or antagonists of the present invention can be used as a marker or detector of a particular disease or disorder related to the endocrine system and/or hormone imbalance.

[0713] Endocrine system and/or hormone imbalance and/or diseases encompass disorders of uterine motility including, but not limited to: complications with pregnancy and labor (e.g., pre-term labor, post-term pregnancy, spontaneous abortion, and slow or stopped labor); and disorders and/or diseases of the menstrual cycle (e.g., dysmenorrhea and endometriosis).

[0714] Endocrine system and/or hormone imbalance disorders and/or diseases include disorders and/or diseases of the pancreas, such as, for example, diabetes mellitus, diabetes insipidus, congenital pancreatic agenesis, pheochromocytoma—islet cell tumor syndrome; disorders and/or diseases of the adrenal glands such as, for example, Addison's Disease, corticosteroid deficiency, virilizing disease, hirsutism, Cushing's Syndrome, hyperaldosteronism, pheochromocytoma; disorders and/or diseases of the pituitary gland, such as, for example, hyperpituitarism, hypopituitarism, pituitary dwarfism, pituitary adenoma, panhypopituitarism, acromegaly, gigantism; disorders and/or diseases of the thyroid, including but not limited to, hyperthyroidism, hypothyroidism, Plummer's disease, Graves' disease (toxic diffuse goiter), toxic nodular goiter, thyroiditis (Hashimoto's thyroiditis, subacute granulomatous thyroiditis, and silent lymphocytic thyroiditis), Pendred's syndrome, myxedema, cretinism, thyrotoxicosis, thyroid hormone coupling defect, thymic aplasia, Hurthle cell tumours of the thyroid, thyroid cancer, thyroid carcinoma, Medullary thyroid carcinoma; disorders and/or diseases of the parathyroid, such as, for example, hyperparathyroidism, hypoparathyroidism; disorders and/or diseases of the hypothalamus.

[0715] In addition, endocrine system and/or hormone imbalance disorders and/or diseases may also include disorders and/or diseases of the testes or ovaries, including cancer. Other disorders and/or diseases of the testes or ovaries further include, for example, ovarian cancer, polycystic ovary syndrome, Klinefelter's syndrome, vanishing testes syndrome (bilateral anorchia), congenital absence of Leydig's cells, cryptorchidism, Noonan's syndrome, myotonic dystrophy, capillary haemangioma of the testis (benign), neoplasias of the testis and neo-testis.

[0716] Moreover, endocrine system and/or hormone imbalance disorders and/or diseases may also include disorders and/or diseases such as, for example, polyglandular deficiency syndromes, pheochromocytoma, neuroblastoma, multiple Endocrine neoplasia, and disorders and/or cancers of endocrine tissues.

[0717] In another embodiment, a polypeptide of the invention, or polynucleotides, antibodies, agonists, or antagonists corresponding to that polypeptide, may be used to diagnose, prognose, prevent, and/or treat endocrine diseases and/or disorders associated with the tissue(s) in which the polypeptide of the invention is expressed, including one, two, three, four, five, or more tissues disclosed in Table 1A, column 8 (Tissue Distribution Library Code).

[0718] Reproductive System Disorders

[0719] The polynucleotides or polypeptides, or agonists or antagonists of the invention may be used for the diagnosis, treatment, or prevention of diseases and/or disorders of the reproductive system. Reproductive system disorders that can be treated by the compositions of the invention, include, but are not limited to, reproductive system injuries, infections, neoplastic disorders, congenital defects, and diseases or disorders which result in infertility, complications with pregnancy, labor, or parturition, and postpartum difficulties.

[0720] Reproductive system disorders and/or diseases include diseases and/or disorders of the testes, including testicular atrophy, testicular feminization, cryptorchism (unilateral and bilateral), anorchia, ectopic testis, epididymitis and orchitis (typically resulting from infections such as, for example, gonorrhea, mumps, tuberculosis, and syphilis), testicular torsion, vasitis nodosa, germ cell tumors (e.g., seminomas, embryonal cell carcinomas, teratocarcinomas, choriocarcinomas, yolk sac tumors, and teratomas), stromal tumors (e.g., Leydig cell tumors), hydrocele, hematocele, varicocele, spermatocele, inguinal hernia, and disorders of sperm production (e.g., immotile cilia syndrome, aspermia, asthenozoospermia, azoospermia, oligospermia, and teratozoospermia).

[0721] Reproductive system disorders also include disorders of the prostate gland, such as acute non-bacterial prostatitis, chronic non-bacterial prostatitis, acute bacterial prostatitis, chronic bacterial prostatitis, prostatodystonia, prostatosis, granulomatous prostatitis, malacoplakia, benign prostatic hypertrophy or hyperplasia, and prostate neoplastic disorders, including adenocarcinomas, transitional cell carcinomas, ductal carcinomas, and squamous cell carcinomas.

[0722] Additionally, the compositions of the invention may be useful in the diagnosis, treatment, and/or prevention of disorders or diseases of the penis and urethra, including inflammatory disorders, such as balanoposthitis, balanitis xerotica obliterans, phimosis, paraphimosis, syphilis, herpes simplex virus, gonorrhea, non-gonococcal urethritis, chlamydia, mycoplasma, trichomonas, HIV, AIDS, Reiter's syndrome, condyloma acuminatum, condyloma latum, and pearly penile papules; urethral abnormalities, such as hypospadias, epispadias, and phimosis; premalignant lesions, including Erythroplasia of Queyrat, Bowen's disease, Bowenoid paplosis, giant condyloma of Buscke-Lowenstein, and varrucous carcinoma; penile cancers, including squamous cell carcinomas, carcinoma in situ, verrucous carcinoma, and disseminated penile carcinoma; urethral neoplastic disorders, including penile urethral carcinoma, bulbomembranous urethral carcinoma, and prostatic urethral carcinoma; and erectile disorders, such as priapism, Peyronie's disease, erectile dysfunction, and impotence.

[0723] Moreover, diseases and/or disorders of the vas deferens include vasculititis and CBAVD (congenital bilateral absence of the vas deferens); additionally, the polynucleotides, polypeptides, and agonists or antagonists of the present invention may be used in the diagnosis, treatment, and/or prevention of diseases and/or disorders of the seminal vesicles, including hydatid disease, congenital chloride diarrhea, and polycystic kidney disease.

[0724] Other disorders and/or diseases of the male reproductive system include, for example, Klinefelter's syndrome, Young's syndrome, premature ejaculation, diabetes mellitus, cystic fibrosis, Kartagener's syndrome, high fever, multiple sclerosis, and gynecomastia.

[0725] Further, the polynucleotides, polypeptides, and agonists or antagonists of the present invention may be used in the diagnosis, treatment, and/or prevention of diseases and/or disorders of the vagina and vulva, including bacterial vaginosis, candida vaginitis, herpes simplex virus, chancroid, granuloma inguinale, lymphogranuloma venereum, scabies, human papillomavirus, vaginal trauma, vulvar trauma, adenosis, chlamydia vaginitis, gonorrhea, trichomonas vaginitis, condyloma acuminatum, syphilis, molluscum contagiosum, atrophic vaginitis, Paget's disease, lichen sclerosus, lichen planus, vulvodynia, toxic shock syndrome, vaginismus, vulvovaginitis, vulvar vestibulitis, and neoplastic disorders, such as squamous cell hyperplasia, clear cell carcinoma, basal cell carcinoma, melanomas, cancer of Bartholin's gland, and vulvar intraepithelial neoplasia.

[0726] Disorders and/or diseases of the uterus include dysmenorrhea, retroverted uterus, endometriosis, fibroids, adenomyosis, anovulatory bleeding, amenorrhea, Cushing's syndrome, hydatidiform moles, Asherman's syndrome, premature menopause, precocious puberty, uterine polyps, dysfunctional uterine bleeding (e.g., due to aberrant hormonal signals), and neoplastic disorders, such as adenocarcinomas, keiomyosarcomas, and sarcomas. Additionally, the polypeptides, polynucleotides, or agonists or antagonists of the invention may be useful as a marker or detector of, as well as in the diagnosis, treatment, and/or prevention of congenital uterine abnormalities, such as bicornuate uterus, septate uterus, simple unicornuate uterus, unicornuate uterus with a noncavitary rudimentary horn, unicornuate uterus with a non-communicating cavitary rudimentary horn, unicornuate uterus with a communicating cavitary horn, arcuate uterus, uterine didelfus, and T-shaped uterus.

[0727] Ovarian diseases and/or disorders include anovulation, polycystic ovary syndrome (Stein-Leventhal syndrome), ovarian cysts, ovarian hypofunction, ovarian insensitivity to gonadotropins, ovarian overproduction of androgens, right ovarian vein syndrome, amenorrhea, hirutism, and ovarian cancer (including, but not limited to, primary and secondary cancerous growth, Sertoli-Leydig tumors, endometriod carcinoma of the ovary, ovarian papillary serous adenocarcinoma, ovarian mucinous adenocarcinoma, and Ovarian Krukenberg tumors).

[0728] Cervical diseases and/or disorders include cervicitis, chronic cervicitis, mucopurulent cervicitis, cervical dysplasia, cervical polyps, Nabothian cysts, cervical erosion, cervical incompetence, and cervical neoplasms (including, for example, cervical carcinoma, squamous metaplasia, squamous cell carcinoma, adenosquamous cell neoplasia, and columnar cell neoplasia).

[0729] Additionally, diseases and/or disorders of the reproductive system include disorders and/or diseases of pregnancy, including miscarriage and stillbirth, such as early abortion, late abortion, spontaneous abortion, induced abortion, therapeutic abortion, threatened abortion, missed abortion, incomplete abortion, complete abortion, habitual abortion, missed abortion, and septic abortion; ectopic pregnancy, anemia, Rh incompatibility, vaginal bleeding during pregnancy, gestational diabetes, intrauterine growth retardation, polyhydramnios, HELLP syndrome, abruptio placentae, placenta previa, hyperemesis, preeclampsia, eclampsia, herpes gestationis, and urticaria of pregnancy. Additionally, the polynucleotides, polypeptides, and agonists or antagonists of the present invention may be used in the diagnosis, treatment, and/or prevention of diseases that can complicate pregnancy, including heart disease, heart failure, rheumatic heart disease, congenital heart disease, mitral valve prolapse, high blood pressure, anemia, kidney disease, infectious disease (e.g., rubella, cytomegalovirus, toxoplasmosis, infectious hepatitis, chlamydia, HIV, AIDS, and genital herpes), diabetes mellitus, Graves' disease, thyroiditis, hypothyroidism, Hashimoto's thyroiditis, chronic active hepatitis, cirrhosis of the liver, primary biliary cirrhosis, asthma, systemic lupus eryematosis, rheumatoid arthritis, myasthenia gravis, idiopathic thrombocytopenic purpura, appendicitis, ovarian cysts, gallbladder disorders,and obstruction of the intestine.

[0730] Complications associated with labor and parturition include premature rupture of the membranes, pre-term labor, post-term pregnancy, postmaturity, labor that progresses too slowly, fetal distress (e.g., abnormal heart rate (fetal or maternal), breathing problems, and abnormal fetal position), shoulder dystocia, prolapsed umbilical cord, amniotic fluid embolism, and aberrant uterine bleeding.

[0731] Further, diseases and/or disorders of the post delivery period, including endometritis, myometritis, parametritis, peritonitis, pelvic thrombophlebitis, pulmonary embolism, endotoxemia, pyelonephritis, saphenous thrombophlebitis, mastitis, cystitis, postpartum hemorrhage, and inverted uterus.

[0732] Other disorders and/or diseases of the female reproductive system that may be diagnosed, treated, and/or prevented by the polynucleotides, polypeptides, and agonists or antagonists of the present invention include, for example, Turner's syndrome, pseudohermaphroditism, premenstrual syndrome, pelvic inflammatory disease, pelvic congestion (vascular engorgement), frigidity, anorgasmia, dyspareunia, ruptured fallopian tube, and Mittelschmerz.

[0733] Infectious Disease

[0734] Polynucleotides or polypeptides, as well as agonists or antagonists of the present invention can be used to treat or detect infectious agents. For example, by increasing the immune response, particularly increasing the proliferation and differentiation of B and/or T cells, infectious diseases may be treated. The immune response may be increased by either enhancing an existing immune response, or by initiating a new immune response. Alternatively, polynucleotides or polypeptides, as well as agonists or antagonists of the present invention may also directly inhibit the infectious agent, without necessarily eliciting an immune response.

[0735] Viruses are one example of an infectious agent that can cause disease or symptoms that can be treated or detected by a polynucleotide or polypeptide and/or agonist or antagonist of the present invention. Examples of viruses, include, but are not limited to Examples of viruses, include, but are not limited to the following DNA and RNA viruses and viral families: Arbovirus, Adenoviridae, Arenaviridae, Arterivirus, Bimaviridae, Bunyaviridae, Caliciviridae, Circoviridae, Coronaviridae, Dengue, EBV, HIV, Flaviviridae, Hepadnaviridae (Hepatitis), Herpesviridae (such as, Cytomegalovirus, Herpes Simplex, Herpes Zoster), Mononegavirus (e.g., Paramyxoviridae, Morbillivirus, Rhabdoviridae), Orthomyxoviridae (e.g., Influenza A, Influenza B, and parainfluenza), Papiloma virus, Papovaviridae, Parvoviridae, Picomaviridae, Poxviridae (such as Smallpox or Vaccinia), Reoviridae (e.g., Rotavirus), Retroviridae (HTLV-I, HTLV-JI, Lentivirus), and Togaviridae (e.g., Rubivirus). Viruses falling within these families can cause a variety of diseases or symptoms, including, but not limited to: arthritis, bronchiollitis, respiratory syncytial virus, encephalitis, eye infections (e.g., conjunctivitis, keratitis), chronic fatigue syndrome, hepatitis (A, B, C, E, Chronic Active, Delta), Japanese B encephalitis, Junin, Chikungunya, Rift Valley fever, yellow fever, meningitis, opportunistic infections (e.g., AIDS), pneumonia, Burkitt's Lymphoma, chickenpox, hemorrhagic fever, Measles, Mumps, Parainfluenza, Rabies, the common cold, Polio, leukemia, Rubella, sexually transmitted diseases, skin diseases (e.g., Kaposi's , warts), and viremia. polynucleotides or polypeptides, or agonists or antagonists of the invention, can be used to treat or detect any of these symptoms or diseases. In specific embodiments, polynucleotides, polypeptides, or agonists or antagonists of the invention are used to treat: meningitis, Dengue, EBV, and/or hepatitis (e.g., hepatitis B). In an additional specific embodiment polynucleotides, polypeptides, or agonists or antagonists of the invention are used to treat patients nonresponsive to one or more other commercially available hepatitis vaccines. In a further specific embodiment polynucleotides, polypeptides, or agonists or antagonists of the invention are used to treat AIDS.

[0736] Similarly, bacterial and fungal agents that can cause disease or symptoms and that can be treated or detected by a polynucleotide or polypeptide and/or agonist or antagonist of the present invention include, but not limited to, the following Gram-Negative and Gram-positive bacteria, bacterial families, and fungi: Actinomyces (e.g., Norcardia), Acinetobacter, Cryptococcus neoformans, Aspergillus, Bacillaceae (e.g., Bacillus anthrasis), Bacteroides (e.g., Bacteroides fragilis), Blastomycosis, Bordetella, Borrelia (e.g., Borrelia burgdorferi), Brucella, Candidia, Campylobacter, Chlamydia, Clostridium (e.g., Clostridium botulinum, Clostridium dificile, Clostridium perfringens, Clostridium tetani), Coccidioides, Corynebacterium (e.g., Corynebacterium diptheriae), Cryptococcus, Dermatocycoses, E. coli (e.g., Enterotoxigenic E. coli and Enterohemorrhagic E. coli), Enterobacter (e.g. Enterobacter aerogenes), Enterobacteriaceae (Klebsiella, Salmonella (e.g., Salmonella typhi, Salmonella enteritidis, Salmonella typhi), Serratia, Yersinia, Shigella), Erysipelothrix, Haemophilus (e.g., Haemophilus influenza type B), Helicobacter, Legionella (e.g., Legionella pneumophila), Leptospira, Listeria (e.g., Listeria monocytogenes), Mycoplasma, Mycobacterium (e.g., Mycobacterium leprae and Mycobacterium tuberculosis), Vibrio (e.g., Vibrio cholerae), Neisseriaceae (e.g., Neisseria gonorrhea, Neisseria meningitidis), Pasteurellacea, Proteus, Pseudomonas (e.g., Pseudomonas aeruginosa), Rickettsiaceae, Spirochetes (e.g., Treponema spp., Leptospira spp., Borrelia spp.), Shigella spp., Staphylococcus (e.g., Staphylococcus aureus), Meningiococcus, Pneumococcus and Streptococcus (e.g., Streptococcus pneumoniae and Groups A, B, and C Streptococci), and Ureaplasmas. These bacterial, parasitic, and fingal families can cause diseases or symptoms, including, but not limited to: antibiotic-resistant infections, bacteremia, endocarditis, septicemia, eye infections (e.g., conjunctivitis), uveitis, tuberculosis, gingivitis, bacterial diarrhea, opportunistic infections (e.g., AIDS related infections), paronychia, prosthesis-related infections, dental caries, Reiter's Disease, respiratory tract infections, such as Whooping Cough or Empyema, sepsis, Lyme Disease, Cat-Scratch Disease, dysentery, paratyphoid fever, food poisoning, Legionella disease, chronic and acute inflammation, erythema, yeast infections, typhoid, pneumonia, gonorrhea, meningitis (e.g., mengitis types A and B), chlamydia, syphillis, diphtheria, leprosy, brucellosis, peptic ulcers, anthrax, spontaneous abortions, birth defects, pneumonia, lung infections, ear infections, deafness, blindness, lethargy, malaise, vomiting, chronic diarrhea, Crohn's disease, colitis, vaginosis, sterility, pelvic inflammatory diseases, candidiasis, paratuberculosis, tuberculosis, lupus, botulism, gangrene, tetanus, impetigo, Rheumatic Fever, Scarlet Fever, sexually transmitted diseases, skin diseases (e.g., cellulitis, dermatocycoses), toxemia, urinary tract infections, wound infections, noscomial infections. Polynucleotides or polypeptides, agonists or antagonists of the invention, can be used to treat or detect any of these symptoms or diseases. In specific embodiments, polynucleotides, polypeptides, agonists or antagonists of the invention are used to treat: tetanus, diptheria, botulism, and/or meningitis type B.

[0737] Moreover, parasitic agents causing disease or symptoms that can be treated, prevented, and/or diagnosed by a polynucleotide or polypeptide and/or agonist or antagonist of the present invention include, but not limited to, the following families or class: Amebiasis, Babesiosis, Coccidiosis, Cryptosporidiosis, Dientamoebiasis, Dourine, Ectoparasitic, Giardias, Helminthiasis, Leishmaniasis, Schistisoma, Theileriasis, Toxoplasmosis, Trypanosomiasis, and Trichomonas and Sporozoans (e.g., Plasmodium virax, Plasmodium falciparium, Plasmodium malariae and Plasmodium ovale). These parasites can cause a variety of diseases or symptoms, including, but not limited to: Scabies, Trombiculiasis, eye infections, intestinal disease (e.g., dysentery, giardiasis), liver disease, lung disease, opportunistic infections (e.g., AIDS related), malaria, pregnancy complications, and toxoplasmosis. polynucleotides or polypeptides, or agonists or antagonists of the invention, can be used to treat, prevent, and/or diagnose any of these symptoms or diseases. In specific embodiments, polynucleotides, polypeptides, or agonists or antagonists of the invention are used to treat, prevent, and/or diagnose malaria.

[0738] Polynucleotides or polypeptides, as well as agonists or antagonists of the present invention of the present invention could either be by administering an effective amount of a polypeptide to the patient, or by removing cells from the patient, supplying the cells with a polynucleotide of the present invention, and returning the engineered cells to the patient (ex vivo therapy). Moreover, the polypeptide or polynucleotide of the present invention can be used as an antigen in a vaccine to raise an immune response against infectious disease.

[0739] Regeneration

[0740] Polynucleotides or polypeptides, as well as agonists or antagonists of the present invention can be used to differentiate, proliferate, and attract cells, leading to the regeneration of tissues. (See, Science 276:59-87 (1997)). The regeneration of tissues could be used to repair, replace, or protect tissue damaged by congenital defects, trauma (wounds, burns, incisions, or ulcers), age, disease (e.g. osteoporosis, osteocarthritis, periodontal disease, liver failure), surgery, including cosmetic plastic surgery, fibrosis, reperfusion injury, or systemic cytokine damage.

[0741] Tissues that could be regenerated using the present invention include organs (e.g., pancreas, liver, intestine, kidney, skin, endothelium), muscle (smooth, skeletal or cardiac), vasculature (including vascular and lymphatics), nervous, hematopoietic, and skeletal (bone, cartilage, tendon, and ligament) tissue. Preferably, regeneration occurs without or decreased scarring. Regeneration also may include angiogenesis.

[0742] Moreover, polynucleotides or polypeptides, as well as agonists or antagonists of the present invention, may increase regeneration of tissues difficult to heal. For example, increased tendon/ligament regeneration would quicken recovery time after damage. Polynucleotides or polypeptides, as well as agonists or antagonists of the present invention could also be used prophylactically in an effort to avoid damage. Specific diseases that could be treated include of tendinitis, carpal tunnel syndrome, and other tendon or ligament defects. A further example of tissue regeneration of non-healing wounds includes pressure ulcers, ulcers associated with vascular insufficiency, surgical, and traumatic wounds.

[0743] Similarly, nerve and brain tissue could also be regenerated by using polynucleotides or polypeptides, as well as agonists or antagonists of the present invention, to proliferate and differentiate nerve cells. Diseases that could be treated using this method include central and peripheral nervous system diseases, neuropathies, or mechanical and traumatic disorders (e.g., spinal cord disorders, head trauma, cerebrovascular disease, and stoke). Specifically, diseases associated with peripheral nerve injuries, peripheral neuropathy (e.g., resulting from chemotherapy or other medical therapies), localized neuropathies, and central nervous system diseases (e.g., Alzheimer's disease, Parkinson's disease, Huntington's disease, amyotrophic lateral sclerosis, and Shy-Drager syndrome), could all be treated using the polynucleotides or polypeptides, as well as agonists or antagonists of the present invention.

[0744] Gastrointestinal Disorders

[0745] Polynucleotides or polypeptides, or agonists or antagonists of the present invention, may be used to treat, prevent, diagnose, and/or prognose gastrointestinal disorders, including inflammatory diseases and/or conditions, infections, cancers (e.g., intestinal neoplasms (carcinoid tumor of the small intestine, non-Hodgkin's lymphoma of the small intestine, small bowl lymphoma)), and ulcers, such as peptic ulcers.

[0746] Gastrointestinal disorders include dysphagia, odynophagia, inflammation of the esophagus, peptic esophagitis, gastric reflux, submucosal fibrosis and stricturing, Mallory-Weiss lesions, leiomyomas, lipomas, epidermal cancers, adeoncarcinomas, gastric retention disorders, gastroenteritis, gastric atrophy, gastric/stomach cancers, polyps of the stomach, autoimmune disorders such as pernicious anemia, pyloric stenosis, gastritis (bacterial, viral, eosinophilic, stress-induced, chronic erosive, atrophic, plasma cell, and Ménétrier's ), and peritoneal diseases (e.g., chyloperioneum, hemoperitoneum, mesenteric cyst, mesenteric lymphadenitis, mesenteric vascular occlusion, panniculitis, neoplasms, peritonitis, pneumoperitoneum, bubphrenic abscess,).

[0747] Gastrointestinal disorders also include disorders associated with the small intestine, such as malabsorption syndromes, distension, irritable bowel syndrome, sugar intolerance, celiac disease, duodenal ulcers, duodenitis, tropical sprue, Whipple's disease, intestinal lymphangiectasia, Crohn's disease, appendicitis, obstructions of the ileum, Meckel's diverticulum, multiple diverticula, failure of complete rotation of the small and large intestine, lymphoma, and bacterial and parasitic diseases (such as Traveler's diarrhea, typhoid and paratyphoid, cholera, infection by Roundworms (Ascariasis lumbricoides), Hookworms (Ancylostoma duodenale), Threadworms (Enterobius vermicularis), Tapeworms (Taenia saginata, Echinococcus granulosus, Diphyllobothrium spp., and T. solium).

[0748] Liver diseases and/or disorders include intrahepatic cholestasis (alagille syndrome, biliary liver cirrhosis), fatty liver (alcoholic fatty liver, reye syndrome), hepatic vein thrombosis, hepatolentricular degeneration, hepatomegaly, hepatopulmonary syndrome, hepatorenal syndrome, portal hypertension (esophageal and gastric varices), liver abscess (amebic liver abscess), liver cirrhosis (alcoholic, biliary and experimental), alcoholic liver diseases (fatty liver, hepatitis, cirrhosis), parasitic (hepatic echinococcosis, fascioliasis, amebic liver abscess), jaundice (hemolytic, hepatocellular, and cholestatic), cholestasis, portal hypertension, liver enlargement, ascites, hepatitis (alcoholic hepatitis, animal hepatitis, chronic hepatitis (autoimmune, hepatitis B, hepatitis C, hepatitis D, drug induced), toxic hepatitis, viral human hepatitis (hepatitis A, hepatitis B, hepatitis C, hepatitis D, hepatitis E), Wilson's disease, granulomatous hepatitis, secondary biliary cirrhosis, hepatic encephalopathy, portal hypertension, varices, hepatic encephalopathy, primary biliary cirrhosis, primary sclerosing cholangitis, hepatocellular adenoma, hemangiomas, bile stones, liver failure (hepatic encephalopathy, acute liver failure), and liver neoplasms (angiomyolipoma, calcified liver metastases, cystic liver metastases, epithelial tumors, fibrolamellar hepatocarcinoma, focal nodular hyperplasia, hepatic adenoma, hepatobiliary cystadenoma, hepatoblastoma, hepatocellular carcinoma, hepatoma, liver cancer, liver hemangioendothelioma, mesenchymal hamartoma, mesenchymal tumors of liver, nodular regenerative hyperplasia, benign liver tumors (Hepatic cysts [Simple cysts, Polycystic liver disease, Hepatobiliary cystadenoma, Choledochal cyst], Mesenchymal tumors [Mesenchymal hamartoma, Infantile hemangioendothelioma, Hemangioma, Peliosis hepatis, Lipomas, Inflammatory pseudotumor, Miscellaneous], Epithelial tumors [Bile duct epithelium (Bile duct hamartoma, Bile duct adenoma), Hepatocyte (Adenoma, Focal nodular hyperplasia, Nodular regenerative hyperplasia)], malignant liver tumors [hepatocellular, hepatoblastoma, hepatocellular carcinoma, cholangiocellular, cholangiocarcinoma, cystadenocarcinoma, tumors of blood vessels, angiosarcoma, Karposi's sarcoma, hemangioendothelioma, other tumors, embryonal sarcoma, fibrosarcoma, leiomyosarcoma, rhabdomyosarcoma, carcinosarcoma, teratoma, carcinoid, squamous carcinoma, primary lymphoma]), peliosis hepatis, erythrohepatic porphyria, hepatic porphyria (acute intermittent porphyria, porphyria cutanea tarda), Zellweger syndrome).

[0749] Pancreatic diseases and/or disorders include acute pancreatitis, chronic pancreatitis (acute necrotizing pancreatitis, alcoholic pancreatitis), neoplasms (adenocarcinoma of the pancreas, cystadenocarcinoma, insulinoma, gastrinoma, and glucagonoma, cystic neoplasms, islet-cell tumors, pancreoblastoma), and other pancreatic diseases (e.g., cystic fibrosis, cyst (pancreatic pseudocyst, pancreatic fistula, insufficiency)).

[0750] Gallbladder diseases include gallstones (cholelithiasis and choledocholithiasis), postcholecystectomy syndrome, diverticulosis of the gallbladder, acute cholecystitis, chronic cholecystitis, bile duct tumors, and mucocele.

[0751] Diseases and/or disorders of the large intestine include antibiotic-associated colitis, diverticulitis, ulcerative colitis, acquired megacolon, abscesses, fungal and bacterial infections, anorectal disorders (e.g., fissures, hemorrhoids), colonic diseases (colitis, colonic neoplasms [colon cancer, adenomatous colon polyps (e.g., villous adenoma), colon carcinoma, colorectal cancer], colonic diverticulitis, colonic diverticulosis, megacolon [Hirschsprung disease, toxic megacolon]; sigmoid diseases [proctocolitis, sigmoin neoplasms]), constipation, Crohn's disease, diarrhea (infantile diarrhea, dysentery), duodenal diseases (duodenal neoplasms, duodenal obstruction, duodenal ulcer, duodenitis), enteritis (enterocolitis), HIV enteropathy, ileal diseases (ileal neoplasms, ileitis), immunoproliferative small intestinal disease, inflammatory bowel disease (ulcerative colitis, Crohn's disease), intestinal atresia, parasitic diseases (anisakiasis, balantidiasis, blastocystis infections, cryptosporidiosis, dientamoebiasis, amebic dysentery, giardiasis), intestinal fistula (rectal fistula), intestinal neoplasms (cecal neoplasms, colonic neoplasms, duodenal neoplasms, ileal neoplasms, intestinal polyps, jejunal neoplasms, rectal neoplasms), intestinal obstruction (afferent loop syndrome, duodenal obstruction, impacted feces, intestinal pseudo-obstruction [cecal volvulus], intussusception), intestinal perforation, intestinal polyps (colonic polyps, gardner syndrome, peutz-jeghers syndrome), jejunal diseases (ejunal neoplasms), malabsorption syndromes (blind loop syndrome, celiac disease, lactose intolerance, short bowl syndrome, tropical sprue, whipple's disease), mesenteric vascular occlusion, pneumatosis cystoides intestinalis, protein-losing enteropathies (intestinal lymphagiectasis), rectal diseases (anus diseases, fecal incontinence, hemorrhoids, proctitis, rectal fistula, rectal prolapse, rectocele), peptic ulcer (duodenal ulcer, peptic esophagitis, hemorrhage, perforation, stomach ulcer, Zollinger-Ellison syndrome), postgastrectomy syndromes (dumping syndrome), stomach diseases (e.g., achlorhydria, duodenogastric reflux (bile reflux), gastric antral vascular ectasia, gastric fistula, gastric outlet obstruction, gastritis (atrophic or hypertrophic), gastroparesis, stomach dilatation, stomach diverticulum, stomach neoplasms (gastric cancer, gastric polyps, gastric adenocarcinoma, hyperplastic gastric polyp), stomach rupture, stomach ulcer, stomach volvulus), tuberculosis, visceroptosis, vomiting (e.g., hematemesis, hyperemesis gravidarum, postoperative nausea and vomiting) and hemorrhagic colitis.

[0752] Further diseases and/or disorders of the gastrointestinal system include biliary tract diseases, such as, gastroschisis, fistula (e.g., biliary fistula, esophageal fistula, gastric fistula, intestinal fistula, pancreatic fistula), neoplasms (e.g., biliary tract neoplasms, esophageal neoplasms, such as adenocarcinoma of the esophagus, esophageal squamous cell carcinoma, gastrointestinal neoplasms, pancreatic neoplasms, such as adenocarcinoma of the pancreas, mucinous cystic neoplasm of the pancreas, pancreatic cystic neoplasms, pancreatoblastoma, and peritoneal neoplasms), esophageal disease (e.g., bullous diseases, candidiasis, glycogenic acanthosis, ulceration, barrett esophagus varices, atresia, cyst, diverticulum (e.g., Zenker's diverticulum), fistula (e.g., tracheoesophageal fistula), motility disorders (e.g., CREST syndrome, deglutition disorders, achalasia, spasm, gastroesophageal reflux), neoplasms, perforation (e.g., Boerhaave syndrome, Mallory-Weiss syndrome), stenosis, esophagitis, diaphragmatic hernia (e.g., hiatal hernia); gastrointestinal diseases, such as, gastroenteritis (e.g., cholera morbus, norwalk virus infection), hemorrhage (e.g., hematemesis, melena, peptic ulcer hemorrhage), stomach neoplasms (gastric cancer, gastric polyps, gastric adenocarcinoma, stomach cancer)), hernia (e.g., congenital diaphragmatic hernia, femoral hernia, inguinal hernia, obturator hernia, umbilical hernia, ventral hernia), and intestinal diseases (e.g., cecal diseases (appendicitis, cecal neoplasms)).

[0753] Chemotaxis

[0754] Polynucleotides or polypeptides, as well as agonists or antagonists of the present invention may have chemotaxis activity. A chemotaxic molecule attracts or mobilizes cells (e.g., monocytes, fibroblasts, neutrophils, T-cells, mast cells, eosinophils, epithelial and/or endothelial cells) to a particular site in the body, such as inflammation, infection, or site of hyperproliferation. The mobilized cells can then fight off and/or heal the particular trauma or abnormality.

[0755] Polynucleotides or polypeptides, as well as agonists or antagonists of the present invention may increase chemotaxic activity of particular cells. These chemotactic molecules can then be used to treat inflammation, infection, hyperproliferative disorders, or any immune system disorder by increasing the number of cells targeted to a particular location in the body. For example, chemotaxic molecules can be used to treat wounds and other trauma to tissues by attracting immune cells to the injured location. Chemotactic molecules of the present invention can also attract fibroblasts, which can be used to treat wounds.

[0756] It is also contemplated that polynucleotides or polypeptides, as well as agonists or antagonists of the present invention may inhibit chemotactic activity. These molecules could also be used to treat disorders. Thus, polynucleotides or polypeptides, as well as agonists or antagonists of the present invention could be used as an inhibitor of chemotaxis.

[0757] Binding Activity

[0758] A polypeptide of the present invention may be used to screen for molecules that bind to the polypeptide or for molecules to which the polypeptide binds. The binding of the polypeptide and the molecule may activate (agonist), increase, inhibit (antagonist), or decrease activity of the polypeptide or the molecule bound. Examples of such molecules include antibodies, oligonucleotides, proteins (e.g., receptors),or small molecules.

[0759] Preferably, the molecule is closely related to the natural ligand of the polypeptide, e.g., a fragment of the ligand, or a natural substrate, a ligand, a structural or functional mimetic. (See, Coligan et al., Current Protocols in Immunology 1(2):Chapter 5 (1991)). Similarly, the molecule can be closely related to the natural receptor to which the polypeptide binds, or at least, a fragment of the receptor capable of being bound by the polypeptide (e.g., active site). In either case, the molecule can be rationally designed using known techniques.

[0760] Preferably, the screening for these molecules involves producing appropriate cells which express the polypeptide. Preferred cells include cells from mammals, yeast, Drosophila, or E. coli. Cells expressing the polypeptide (or cell membrane containing the expressed polypeptide) are then preferably contacted with a test compound potentially containing the molecule to observe binding, stimulation, or inhibition of activity of either the polypeptide or the molecule.

[0761] The assay may simply test binding of a candidate compound to the polypeptide, wherein binding is detected by a label, or in an assay involving competition with a labeled competitor. Further, the assay may test whether the candidate compound results in a signal generated by binding to the polypeptide.

[0762] Alternatively, the assay can be carried out using cell-free preparations, polypeptide/molecule affixed to a solid support, chemical libraries, or natural product mixtures. The assay may also simply comprise the steps of mixing a candidate compound with a solution containing a polypeptide, measuring polypeptide/molecule activity or binding, and comparing the polypeptide/molecule activity or binding to a standard.

[0763] Preferably, an ELISA assay can measure polypeptide level or activity in a sample (e.g., biological sample) using a monoclonal or polyclonal antibody. The antibody can measure polypeptide level or activity by either binding, directly or indirectly, to the polypeptide or by competing with the polypeptide for a substrate.

[0764] Additionally, the receptor to which the polypeptide of the present invention binds can be identified by numerous methods known to those of skill in the art, for example, ligand panning and FACS sorting (Coligan, et al., Current Protocols in Immun., 1(2), Chapter 5, (1991)). For example, expression cloning is employed wherein polyadenylated RNA is prepared from a cell responsive to the polypeptides, for example, NIH3T3 cells which are known to contain multiple receptors for the FGF family proteins, and SC-3 cells, and a cDNA library created from this RNA is divided into pools and used to transfect COS cells or other cells that are not responsive to the polypeptides. Transfected cells which are grown on glass slides are exposed to the polypeptide of the present invention, after they have been labeled. The polypeptides can be labeled by a variety of means including iodination or inclusion of a recognition site for a site-specific protein kinase.

[0765] Following fixation and incubation, the slides are subjected to auto-radiographic analysis. Positive pools are identified and sub-pools are prepared and re-transfected using an iterative sub-pooling and re-screening process, eventually yielding a single clones that encodes the putative receptor.

[0766] As an alternative approach for receptor identification, the labeled polypeptides can be photoaffinity linked with cell membrane or extract preparations that express the receptor molecule. Cross-linked material is resolved by PAGE analysis and exposed to X-ray film. The labeled complex containing the receptors of the polypeptides can be excised, resolved into peptide fragments, and subjected to protein microsequencing. The amino acid sequence obtained from microsequencing would be used to design a set of degenerate oligonucleotide probes to screen a cDNA library to identify the genes encoding the putative receptors.

[0767] Moreover, the techniques of gene-shuffling, motif-shuffling, exon-shuffling, and/or codon-shuffling (collectively referred to as “DNA shuffling”) may be employed to modulate the activities of the polypeptide of the present invention thereby effectively generating agonists and antagonists of the polypeptide of the present invention. See generally, U.S. Pat. Nos. 5,605,793, 5,811,238, 5,830,721, 5,834,252, and 5,837,458, and Patten, P. A., et al., Curr. Opinion Biotechnol. 8:724-33 (1997); Harayama, S. Trends Biotechnol. 16(2):76-82 (1998); Hansson, L. O., et al., J. MoL Biol. 287:265-76 (1999); and Lorenzo, M. M. and Blasco, R. Biotechniques 24(2):308-13 (1998); each of these patents and publications are hereby incorporated by reference). In one embodiment, alteration of polynucleotides and corresponding polypeptides may be achieved by DNA shuffling. DNA shuffling involves the assembly of two or more DNA segments into a desired molecule by homologous, or site-specific, recombination. In another embodiment, polynucleotides and corresponding polypeptides may be altered by being subjected to random mutagenesis by error-prone PCR, random nucleotide insertion or other methods prior to recombination. In another embodiment, one or more components, motifs, sections, parts, domains, fragments, etc., of the polypeptide of the present invention may be recombined with one or more components, motifs, sections, parts, domains, fragments, etc. of one or more heterologous molecules. In preferred embodiments, the heterologous molecules are family members. In further preferred embodiments, the heterologous molecule is a growth factor such as, for example, platelet-derived growth factor (PDGF), insulin-like growth factor (IGF-I), transforming growth factor (TGF)-alpha, epidermal growth factor (EGF), fibroblast growth factor (FGF), TGF-beta, bone morphogenetic protein (BMP)-2, BMP-4, BMP-5, BMP-6, BMP-7, activins A and B, decapentaplegic(dpp), 60A, OP-2, dorsalin, growth differentiation factors (GDFs), nodal, MIS, inhibin-alpha, TGF-beta1, TGF-beta2, TGF-beta3, TGF-beta5, and glial-derived neurotrophic factor (GDNF).

[0768] Other preferred fragments are biologically active fragments of the polypeptide of the present invention. Biologically active fragments are those exhibiting activity similar, but not necessarily identical, to an activity of the polypeptide of the present invention. The biological activity of the fragments may include an improved desired activity, or a decreased undesirable activity.

[0769] Additionally, this invention provides a method of screening compounds to identify those which modulate the action of the polypeptide of the present invention. An example of such an assay comprises combining a mammalian fibroblast cell, a the polypeptide of the present invention, the compound to be screened and ³[H] thymidine under cell culture conditions where the fibroblast cell would normally proliferate. A control assay may be performed in the absence of the compound to be screened and compared to the amount of fibroblast proliferation in the presence of the compound to determine if the compound stimulates proliferation by determining the uptake of ³[H] thymidine in each case. The amount of fibroblast cell proliferation is measured by liquid scintillation chromatography which measures the incorporation of ³[H] thymidine. Both agonist and antagonist compounds may be identified by this procedure.

[0770] In another method, a mammalian cell or membrane preparation expressing a receptor for a polypeptide of the present invention is incubated with a labeled polypeptide of the present invention in the presence of the compound. The ability of the compound to enhance or block this interaction could then be measured. Alternatively, the response of a known second messenger system following interaction of a compound to be screened and the receptor is measured and the ability of the compound to bind to the receptor and elicit a second messenger response is measured to determine if the compound is a potential agonist or antagonist. Such second messenger systems include but are not limited to, cAMP guanylate cyclase, ion channels or phosphoinositide hydrolysis.

[0771] All of these above assays can be used as diagnostic or prognostic markers. The molecules discovered using these assays can be used to treat disease or to bring about a particular result in a patient (e.g., blood vessel growth) by activating or inhibiting the polypeptide/molecule. Moreover, the assays can discover agents which may inhibit or enhance the production of the polypeptides of the invention from suitably manipulated cells or tissues.

[0772] Therefore, the invention includes a method of identifying compounds which bind to a polypeptide of the invention comprising the steps of: (a) incubating a candidate binding compound with a polypeptide of the present invention; and (b) determining if binding has occurred. Moreover, the invention includes a method of identifying agonists/antagonists comprising the steps of: (a) incubating a candidate compound with a polypeptide of the present invention, (b) assaying a biological activity, and (b) determining if a biological activity of the polypeptide has been altered.

[0773] Targeted Delivery

[0774] In another embodiment, the invention provides a method of delivering compositions to targeted cells expressing a receptor for a polypeptide of the invention, or cells expressing a cell bound form of a polypeptide of the invention.

[0775] As discussed herein, polypeptides or antibodies of the invention may be associated with heterologous polypeptides, heterologous nucleic acids, toxins, or prodrugs via hydrophobic, hydrophilic, ionic and/or covalent interactions. In one embodiment, the invention provides a method for the specific delivery of compositions of the invention to cells by administering polypeptides of the invention (including antibodies) that are associated with heterologous polypeptides or nucleic acids. In one example, the invention provides a method for delivering a therapeutic protein into the targeted cell. In another example, the invention provides a method for delivering a single stranded nucleic acid (e.g., antisense or ribozymes) or double stranded nucleic acid (e.g., DNA that can integrate into the cell's genome or replicate episomally and that can be transcribed) into the targeted cell.

[0776] In another embodiment, the invention provides a method for the specific destruction of cells (e.g., the destruction of tumor cells) by administering polypeptides of the invention (e.g., polypeptides of the invention or antibodies of the invention) in association with toxins or cytotoxic prodrugs.

[0777] By “toxin” is meant compounds that bind and activate endogenous cytotoxic effector systems, radioisotopes, holotoxins, modified toxins, catalytic subunits of toxins, or any molecules or enzymes not normally present in or on the surface of a cell that under defined conditions cause the cell's death. Toxins that may be used according to the methods of the invention include, but are not limited to, radioisotopes known in the art, compounds such as, for example, antibodies (or complement fixing containing portions thereof) that bind an inherent or induced endogenous cytotoxic effector system, thymidine kinase, endonuclease, RNAse, alpha toxin, ricin, abrin, Pseudomonas exotoxin A, diphtheria toxin, saporin, momordin, gelonin, pokeweed antiviral protein, alpha-sarcin and cholera toxin. By “cytotoxic prodrug” is meant a non-toxic compound that is converted by an enzyme, normally present in the cell, into a cytotoxic compound. Cytotoxic prodrugs that may be used according to the methods of the invention include, but are not limited to, glutamyl derivatives of benzoic acid mustard alkylating agent, phosphate derivatives of etoposide or mitomycin C, cytosine arabinoside, daunorubisin, and phenoxyacetamide derivatives of doxorubicin.

[0778] Drug Screening

[0779] Further contemplated is the use of the polypeptides of the present invention, or the polynucleotides encoding these polypeptides, to screen for molecules which modify the activities of the polypeptides of the present invention. Such a method would include contacting the polypeptide of the present invention with a selected compound(s) suspected of having antagonist or agonist activity, and assaying the activity of these polypeptides following binding.

[0780] This invention is particularly useful for screening therapeutic compounds by using the polypeptides of the present invention, or binding fragments thereof, in any of a variety of drug screening techniques. The polypeptide or fragment employed in such a test may be affixed to a solid support, expressed on a cell surface, free in solution, or located intracellularly. One method of drug screening utilizes eukaryotic or prokaryotic host cells which are stably transformed with recombinant nucleic acids expressing the polypeptide or fragment. Drugs are screened against such transformed cells in competitive binding assays. One may measure, for example, the formulation of complexes between the agent being tested and a polypeptide of the present invention.

[0781] Thus, the present invention provides methods of screening for drugs or any other agents which affect activities mediated by the polypeptides of the present invention. These methods comprise contacting such an agent with a polypeptide of the present invention or a fragment thereof and assaying for the presence of a complex between the agent and the polypeptide or a fragment thereof, by methods well known in the art. In such a competitive binding assay, the agents to screen are typically labeled. Following incubation, free agent is separated from that present in bound form, and the amount of free or uncomplexed label is a measure of the ability of a particular agent to bind to the polypeptides of the present invention.

[0782] Another technique for drug screening provides high throughput screening for compounds having suitable binding affinity to the polypeptides of the present invention, and is described in great detail in European Patent Application 84/03564, published on Sep. 13, 1984, which is incorporated herein by reference herein. Briefly stated, large numbers of different small peptide test compounds are synthesized on a solid substrate, such as plastic pins or some other surface. The peptide test compounds are reacted with polypeptides of the present invention and washed. Bound polypeptides are then detected by methods well known in the art. Purified polypeptides are coated directly onto plates for use in the aforementioned drug screening techniques. In addition, non-neutralizing antibodies may be used to capture the peptide and immobilize it on the solid support.

[0783] This invention also contemplates the use of competitive drug screening assays in which neutralizing antibodies capable of binding polypeptides of the present invention specifically compete with a test compound for binding to the polypeptides or fragments thereof. In this manner, the antibodies are used to detect the presence of any peptide which shares one or more antigenic epitopes with a polypeptide of the invention.

[0784] Antisense and Ribozyme (Antagonists)

[0785] In specific embodiments, antagonists according to the present invention are nucleic acids corresponding to the sequences contained in SEQ ID NO:X, or the complementary strand thereof, and/or to cDNA sequences contained in cDNA Clone ID NO:Z identified for example, in Table 1A. In one embodiment, antisense sequence is generated internally, by the organism, in another embodiment, the antisense sequence is separately administered (see, for example, O'Connor, J., Neurochem. 56:560 (1991). Oligodeoxynucleotides as Antisense Inhibitors of Gene Expression, CRC Press, Boca Raton, Fla. (1988). Antisense technology can be used to control gene expression through antisense DNA or RNA, or through triple-helix formation. Antisense techniques are discussed for example, in Okano, J., Neurochem. 56:560 (1991); Oligodeoxynucleotides as Antisense Inhibitors of Gene Expression, CRC Press, Boca Raton, Fla. (1988). Triple helix formation is discussed in, for instance, Lee et al., Nucleic Acids Research 6:3073 (1979); Cooney et al., Science 241:456 (1988); and Dervan et al., Science 251:1300 (1991). The methods are based on binding of a polynucleotide to a complementary DNA or RNA.

[0786] For example, the use of c-myc and c-myb antisense RNA constructs to inhibit the growth of the non-lymphocytic leukemia cell line HL-60 and other cell lines was previously described. (Wickstrom et al. (1988); Anfossi et al. (1989)). These experiments were performed in vitro by incubating cells with the oligoribonucleotide. A similar procedure for in vivo use is described in WO 91/15580. Briefly, a pair of oligonucleotides for a given antisense RNA is produced as follows: A sequence complimentary to the first 15 bases of the open reading frame is flanked by an EcoRl site on the 5 end and a HindIII site on the 3 end. Next, the pair of oligonucleotides is heated at 90° C. for one minute and then annealed in 2×ligation buffer (20 mM TRIS HCl pH 7.5, 10 mM MgCl2, 10 MM dithiothreitol (DTT) and 0.2 mM ATP) and then ligated to the EcoRI/Hind III site of the retroviral vector PMV7 (WO 91/15580).

[0787] For example, the 5′ coding portion of a polynucleotide that encodes the polypeptide of the present invention may be used to design an antisense RNA oligonucleotide of from about 10 to 40 base pairs in length. A DNA oligonucleotide is designed to be complementary to a region of the gene involved in transcription thereby preventing transcription and the production of the receptor. The antisense RNA oligonucleotide hybridizes to the mRNA in vivo and blocks translation of the mRNA molecule into receptor polypeptide.

[0788] In one embodiment, the antisense nucleic acid of the invention is produced intracellularly by transcription from an exogenous sequence. For example, a vector or a portion thereof, is transcribed, producing an antisense nucleic acid (RNA) of the invention. Such a vector would contain a sequence encoding the antisense nucleic acid. Such a vector can remain episomal or become chromosomally integrated, as long as it can be transcribed to produce the desired antisense RNA. Such vectors can be constructed by recombinant DNA technology methods standard in the art. Vectors can be plasmid, viral, or others known in the art, used for replication and expression in vertebrate cells. Expression of the sequence encoding the polypeptide of the present invention or fragments thereof, can be by any promoter known in the art to act in vertebrate, preferably human cells. Such promoters can be inducible or constitutive. Such promoters include, but are not limited to, the SV40 early promoter region (Bemoist and Chambon, Nature 29:304-310 (1981), the promoter contained in the 3′ long terminal repeat of Rous sarcoma virus (Yamamoto et al., Cell 22:787-797 (1980), the herpes thymidine promoter (Wagner et al., Proc. Natl. Acad. Sci. U.S.A. 78:1441 -1445 (1981), the regulatory sequences of the metallothionein gene (Brinster, et al., Nature 296:39-42 (1982)), etc.

[0789] The antisense nucleic acids of the invention comprise a sequence complementary to at least a portion of an RNA transcript of a gene of the present invention. However, absolute complementarity, although preferred, is not required. A sequence “complementary to at least a portion of an RNA,” referred to herein, means a sequence having sufficient complementarity to be able to hybridize with the RNA, forming a stable duplex; in the case of double stranded antisense nucleic acids, a single strand of the duplex DNA may thus be tested, or triplex formation may be assayed. The ability to hybridize will depend on both the degree of complementarity and the length of the antisense nucleic acid. Generally, the larger the hybridizing nucleic acid, the more base mismatches with a RNA it may contain and still form a stable duplex (or triplex as the case may be). One skilled in the art can ascertain a tolerable degree of mismatch by use of standard procedures to determine the melting point of the hybridized complex.

[0790] Oligonucleotides that are complementary to the 5′ end of the message, e.g., the 5′ untranslated sequence up to and including the AUG initiation codon, should work most efficiently at inhibiting translation. However, sequences complementary to the 3′ untranslated sequences of mRNAs have been shown to be effective at inhibiting translation of mRNAs as well. See generally, Wagner, R., 1994, Nature 372:333-335. Thus, oligonucleotides complementary to either the 5′- or 3′-non-translated, non-coding regions of polynucleotide sequences described herein could be used in an antisense approach to inhibit translation of endogenous mRNA. Oligonucleotides complementary to the 5′ untranslated region of the mRNA should include the complement of the AUG start codon. Antisense oligonucleotides complementary to mRNA coding regions are less efficient inhibitors of translation but could be used in accordance with the invention. Whether designed to hybridize to the 5′-, 3′- or coding region of mRNA of the present invention, antisense nucleic acids should be at least six nucleotides in length, and are preferably oligonucleotides ranging from 6 to about 50 nucleotides in length. In specific aspects the oligonucleotide is at least 10 nucleotides, at least 17 nucleotides, at least 25 nucleotides or at least 50 nucleotides.

[0791] The polynucleotides of the invention can be DNA or RNA or chimeric mixtures or derivatives or modified versions thereof, single-stranded or double-stranded. The oligonucleotide can be modified at the base moiety, sugar moiety, or phosphate backbone, for example, to improve stability of the molecule, hybridization, etc. The oligonucleotide may include other appended groups such as peptides (e.g., for targeting host cell receptors in vivo), or agents facilitating transport across the cell membrane (see, e.g., Letsinger et al., 1989, Proc. Natl. Acad. Sci. U.S.A. 86:6553-6556; Lemaitre et al., 1987, Proc. Natl. Acad. Sci. 84:648-652; PCT Publication No. WO88/09810, published Dec. 15, 1988) or the blood-brain barrier (see, e.g., PCT Publication No. WO89/10134, published Apr. 25, 1988), hybridization-triggered cleavage agents. (See, e.g., Krol et al., 1988, BioTechniques 6:958-976) or intercalating agents. (See, e.g., Zon, 1988, Pharm. Res. 5:539-549). To this end, the oligonucleotide may be conjugated to another molecule, e.g., a peptide, hybridization triggered cross-linking agent, transport agent, hybridization-triggered cleavage agent, etc.

[0792] The antisense oligonucleotide may comprise at least one modified base moiety which is selected from the group including, but not limited to, 5-fluorouracil, 5-bromouracil, 5-chlorouracil, 5-iodouracil, hypoxanthine, xantine, 4-acetylcytosine, 5-(carboxyhydroxylmethyl) uracil, 5-carboxymethylaminomethyl-2-thiouridine, 5-carboxymethylaminomethyluracil, dihydrouracil, beta-D-galactosylqueosine, inosine, N6-isopentenyladenine, 1 -methylguanine, 1-methylinosine, 2,2-dimethylguanine, 2-methyladenine, 2-methylguanine, 3-methylcytosine, 5-methylcytosine, N6-adenine, 7-methylguanine, 5-methylaminomethyluracil, 5-methoxyaminomethyl-2-thiouracil, beta-D-mannosylqueosine, 5′-methoxycarboxymethyluracil, 5-methoxyuracil, 2-methylthio-N6-isopentenyladenine, uracil-5-oxyacetic acid (v), wybutoxosine, pseudouracil, queosine, 2-thiocytosine, 5-methyl-2-thiouracil, 2-thiouracil, 4-thiouracil, 5-methyluracil, uracil-5-oxyacetic acid methylester, uracil-5-oxyacetic acid (v), 5-methyl-2-thiouracil, 3-(3-amino-3-N-2-carboxypropyl) uracil, (acp3)w, and 2,6-diaminopurine.

[0793] The antisense oligonucleotide may also comprise at least one modified sugar moiety selected from the group including, but not limited to, arabinose, 2-fluoroarabinose, xylulose, and hexose.

[0794] In yet another embodiment, the antisense oligonucleotide comprises at least one modified phosphate backbone selected from the group including, but not limited to, a phosphorothioate, a phosphorodithioate, a phosphoramidothioate, a phosphoramidate, a phosphordiamidate, a methylphosphonate, an alkyl phosphotriester, and a formacetal or analog thereof.

[0795] In yet another embodiment, the antisense oligonucleotide is an a-anomeric oligonucleotide. An a-anomeric oligonucleotide forms specific double-stranded hybrids with complementary RNA in which, contrary to the usual b-units, the strands run parallel to each other (Gautier et al., 1987, Nucl. Acids Res. 15:6625-6641). The oligonucleotide is a 2′-0-methylribonucleotide (Inoue et al., 1987, Nucl. Acids Res. 15:6131-6148), or a chimeric RNA-DNA analogue (Inoue et al., 1987, FEBS Lett. 215:327-330).

[0796] Polynucleotides of the invention may be synthesized by standard methods known in the art, e.g. by use of an automated DNA synthesizer (such as are commercially available from Biosearch, Applied Biosystems, etc.). As examples, phosphorothioate oligonucleotides may be synthesized by the method of Stein et al. (1988, Nucl. Acids Res. 16:3209), methylphosphonate oligonucleotides can be prepared by use of controlled pore glass polymer supports (Sarin et al., 1988, Proc. Natl. Acad. Sci. U.S.A. 85:7448-7451), etc.

[0797] While antisense nucleotides complementary to the coding region sequence could be used, those complementary to the transcribed untranslated region are most preferred.

[0798] Potential antagonists according to the invention also include catalytic RNA, or a ribozyme (See, e.g., PCT International Publication WO 90/11364, published Oct. 4, 1990; Sarver et al, Science 247:1222-1225 (1990). While ribozymes that cleave mRNA at site specific recognition sequences can be used to destroy mRNAs, the use of hammerhead ribozymes is preferred. Hammerhead ribozymes cleave mRNAs at locations dictated by flanking regions that form complementary base pairs with the target mRNA. The sole requirement is that the target mRNA have the following sequence of two bases: 5′-UG-3′. The construction and production of hammerhead ribozymes is well known in the art and is described more fully in Haseloff and Gerlach, Nature 334:585-591 (1988). There are numerous potential hammerhead ribozyme cleavage sites within the nucleotide sequence of SEQ ID NO:X. Preferably, the ribozyme is engineered so that the cleavage recognition site is located near the 5′ end of the mRNA; i.e., to increase efficiency and minimize the intracellular accumulation of non-functional mRNA transcripts.

[0799] As in the antisense approach, the ribozymes of the invention can be composed of modified oligonucleotides (e.g., for improved stability, targeting, etc.) and should be delivered to cells which express in vivo. DNA constructs encoding the ribozyme may be introduced into the cell in the same manner as described above for the introduction of antisense encoding DNA. A preferred method of delivery involves using a DNA construct “encoding” the ribozyme under the control of a strong constitutive promoter, such as, for example, pol III or pol II promoter, so that transfected cells will produce sufficient quantities of the ribozyme to destroy endogenous messages and inhibit translation. Since ribozymes unlike antisense molecules, are catalytic, a lower intracellular concentration is required for efficiency.

[0800] Antagonist/agonist compounds may be employed to inhibit the cell growth and proliferation effects of the polypeptides of the present invention on neoplastic cells and tissues, i.e. stimulation of angiogenesis of tumors, and, therefore, retard or prevent abnormal cellular growth and proliferation, for example, in tumor formation or growth.

[0801] The antagonist/agonist may also be employed to prevent hyper-vascular diseases, and prevent the proliferation of epithelial lens cells after extracapsular cataract surgery. Prevention of the mitogenic activity of the polypeptides of the present invention may also be desirous in cases such as restenosis after balloon angioplasty.

[0802] The antagonist/agonist may also be employed to prevent the growth of scar tissue during wound healing.

[0803] The antagonist/agonist may also be employed to treat the diseases described herein.

[0804] Thus, the invention provides a method of treating disorders or diseases, including but not limited to the disorders or diseases listed throughout this application, associated with overexpression of a polynucleotide of the present invention by administering to a patient (a) an antisense molecule directed to the polynucleotide of the present invention, and/or (b) a ribozyme directed to the polynucleotide of the present invention.

[0805] Binding Peptides and Other Molecules

[0806] The invention also encompasses screening methods for identifying polypeptides and nonpolypeptides that bind polypeptides of the invention, and the binding molecules identified thereby. These binding molecules are useful, for example, as agonists and antagonists of the polypeptides of the invention. Such agonists and antagonists can be used, in accordance with the invention, in the therapeutic embodiments described in detail, below.

[0807] This method comprises the steps of:

[0808] a. contacting polypeptides of the invention with a plurality of molecules; and

[0809] b. identifying a molecule that binds the polypeptides of the invention.

[0810] The step of contacting the polypeptides of the invention with the plurality of molecules may be effected in a number of ways. For example, one may contemplate immobilizing the polypeptides on a solid support and bringing a solution of the plurality of molecules in contact with the immobilized polypeptides. Such a procedure would be akin to an affinity chromatographic process, with the affinity matrix being comprised of the immobilized polypeptides of the invention. The molecules having a selective affinity for the polypeptides can then be purified by affinity selection. The nature of the solid support, process for attachment of the polypeptides to the solid support, solvent, and conditions of the affinity isolation or selection are largely conventional and well known to those of ordinary skill in the art.

[0811] Alternatively, one may also separate a plurality of polypeptides into substantially separate fractions comprising a subset of or individual polypeptides. For instance, one can separate the plurality of polypeptides by gel electrophoresis, column chromatography, or like method known to those of ordinary skill for the separation of polypeptides. The individual polypeptides can also be produced by a-transformed host cell in such a way as to be expressed on or about its outer surface (e.g., a recombinant phage). Individual isolates can then be “probed” by the polypeptides of the invention, optionally in the presence of an inducer should one be required for expression, to determine if any selective affinity interaction takes place between the polypeptides and the individual clone. Prior to contacting the polypeptides with each fraction comprising individual polypeptides, the polypeptides could first be transferred to a solid support for additional convenience. Such a solid support may simply be a piece of filter membrane, such as one made of nitrocellulose or nylon. In this manner, positive clones could be identified from a collection of transformed host cells of an expression library, which harbor a DNA construct encoding a polypeptide having a selective affinity for polypeptides of the invention. Furthermore, the amino acid sequence of the polypeptide having a selective affinity for the polypeptides of the invention can be determined directly by conventional means or the coding sequence of the DNA encoding the polypeptide can frequently be determined more conveniently. The primary sequence can then be deduced from the corresponding DNA sequence. If the amino acid sequence is to be determined from the polypeptide itself, one may use microsequencing techniques. The sequencing technique may include mass spectroscopy.

[0812] In certain situations, it may be desirable to wash away any unbound polypeptides from a mixture of the polypeptides of the invention and the plurality of polypeptides prior to attempting to determine or to detect the presence of a selective affinity interaction. Such a wash step may be particularly desirable when the polypeptides of the invention or the plurality of polypeptides are bound to a solid support.

[0813] The plurality of molecules provided according to this method may be provided by way of diversity libraries, such as random or combinatorial peptide or nonpeptide libraries which can be screened for molecules that specifically bind polypeptides of the invention. Many libraries are known in the art that can be used, e.g., chemically synthesized libraries, recombinant (e.g., phage display libraries), and in vitro translation-based libraries. Examples of chemically synthesized libraries are described in Fodor et al., 1991, Science 251:767-773; Houghten et al., 1991, Nature 354:84-86; Lam et al., 1991, Nature 354:82-84; Medynski, 1994, Bio/Technology 12:709-710;Gallop et al., 1994, J. Medicinal Chemistry 37(9):1233-1251; Ohlmeyer et al., 1993, Proc. Natl. Acad. Sci. USA 90:10922-10926; Erb et al., 1994, Proc. Natl. Acad. Sci. USA 91:11422-11426; Houghten et al., 1992, Biotechniques 13:412; Jayawickreme et al., 1994, Proc. Natl. Acad. Sci. USA 91:1614-1618; Salmon et al., 1993, Proc. Natl. Acad. Sci. USA 90:11708-11712; PCT Publication No. WO 93/20242; and Brenner and Lemer, 1992, Proc. Natl. Acad. Sci. USA 89:5381-5383.

[0814] Examples of phage display libraries are described in Scott and Smith, 1990, Science 249:386-390; Devlin et al., 1990, Science, 249:404-406; Christian, R. B., et al., 1992, J. Mol. Biol. 227:711-718); Lenstra, 1992, J. Immunol. Meth. 152:149-157; Kay et al., 1993, Gene 128:59-65; and PCT Publication No. WO 94/18318 dated Aug. 18, 1994.

[0815] In vitro translation-based libraries include but are not limited to those described in PCT Publication No. WO 91/05058 dated Apr. 18, 1991; and Mattheakis et al., 1994, Proc. Natl. Acad. Sci. USA 91:9022-9026.

[0816] By way of examples of nonpeptide libraries, a benzodiazepine library (see e.g., Bunin et al., 1994, Proc. Natl. Acad. Sci. USA 91:4708-4712) can be adapted for use. Peptoid libraries (Simon et al., 1992, Proc. Natl. Acad. Sci. USA 89:9367-9371) can also be used. Another example of a library that can be used, in which the amide functionalities in peptides have been permethylated to generate a chemically transformed combinatorial library, is described by Ostresh et al. (1994, Proc. Natl. Acad. Sci. USA 91:11138-11142).

[0817] The variety of non-peptide libraries that are useful in the present invention is great. For example, Ecker and Crooke, 1995, Bio/Technology 13:351-360 list benzodiazepines, hydantoins, piperazinediones, biphenyls, sugar analogs, beta-mercaptoketones, arylacetic acids, acylpiperidines, benzopyrans, cubanes, xanthines, aminimides, and oxazolones as among the chemical species that form the basis of various libraries.

[0818] Non-peptide libraries can be classified broadly into two types: decorated monomers and oligomers. Decorated monomer libraries employ a relatively simple scaffold structure upon which a variety functional groups is added. Often the scaffold will be a molecule with a known useful pharmacological activity. For example, the scaffold might be the benzodiazepine structure.

[0819] Non-peptide oligomer libraries utilize a large number of monomers that are assembled together in ways that create new shapes that depend on the order of the monomers. Among the monomer units that have been used are carbamates, pyrrolinones, and morpholinos. Peptoids, peptide-like oligomers in which the side chain is attached to the alpha amino group rather than the alpha carbon, form the basis of another version of non-peptide oligomer libraries. The first non-peptide oligomer libraries utilized a single type of monomer and thus contained a repeating backbone. Recent libraries have utilized more than one monomer, giving the libraries added flexibility.

[0820] Screening the libraries can be accomplished by any of a variety of commonly known methods. See, e.g., the following references, which disclose screening of peptide libraries: Parmley and Smith, 1989, Adv. Exp. Med. Biol. 251:215-218; Scott and Smith, 1990, Science 249:386-390; Fowlkes et al., 1992; BioTechniques 13:422-427; Oldenburg et al., 1992, Proc. Natl. Acad. Sci. USA 89:5393-5397; Yu et al., 1994, Cell 76:933-945; Staudt et al., 1988, Science 241:577-580; Bock et al., 1992, Nature 355:564-566; Tuerk et al., 1992, Proc. Natl. Acad. Sci. USA 89:6988-6992; Ellington et al., 1992, Nature 355:850-852; U.S. Pat. Nos. 5,096,815, 5,223,409, and 5,198,346, all to Ladner et al.; Rebar and Pabo, 1993, Science 263:671-673; and CT Publication No. WO 94/18318.

[0821] In a specific embodiment, screening to identify a molecule that binds polypeptides of the invention can be carried out by contacting the library members with polypeptides of the invention immobilized on a solid phase and harvesting. those library members that bind to the polypeptides of the invention. Examples of such screening methods, termed “panning” techniques are described by way of example in Parmley and Smith, 1988, Gene 73:305-318; Fowlkes et al., 1992, BioTechniques 13:422-427; PCT Publication No. WO 94/18318; and in references cited herein.

[0822] In another embodiment, the two-hybrid system for selecting interacting proteins in yeast (Fields and Song, 1989, Nature 340:245-246; Chien et al., 1991, Proc. Natl. Acad. Sci. USA 88:9578-9582) can be used to identify molecules that specifically bind to polypeptides of the invention.

[0823] Where the binding molecule is a polypeptide, the polypeptide can be conveniently selected from any peptide library, including random peptide libraries, combinatorial peptide libraries, or biased peptide libraries. The term “biased” is used herein to mean that the method of generating the library is manipulated so as to restrict one or more parameters that govern the diversity of the resulting collection of molecules, in this case peptides.

[0824] Thus, a truly random peptide library would generate a collection of peptides in which the probability of finding a particular amino acid at a given position of the peptide is the same for all 20 amino acids. A bias can be introduced into the library, however, by specifying, for example, that a lysine occur every fifth amino acid or that positions 4, 8, and 9 of a decapeptide library be fixed to include only arginine. Clearly, many types of biases can be contemplated, and the present invention is not restricted to any particular bias. Furthermore, the present invention contemplates specific types of peptide libraries, such as phage displayed peptide libraries and those that utilize a DNA construct comprising a lambda phage vector with a DNA insert.

[0825] As mentioned above, in the case of a binding molecule that is a polypeptide, the polypeptide may have about 6 to less than about 60 amino acid residues, preferably about 6 to about 10 amino acid residues, and most preferably, about 6 to about 22 amino acids. In another embodiment, a binding polypeptide has in the range of 15-100 amino acids, or 20-50 amino acids.

[0826] The selected binding polypeptide can be obtained by chemical synthesis or recombinant expression.

[0827] Other Activities

[0828] A polypeptide, polynucleotide, agonist, or antagonist of the present invention, as a result of the ability to stimulate vascular endothelial cell growth, may be employed in treatment for stimulating re-vascularization of ischemic tissues due to various disease conditions such as thrombosis, arteriosclerosis, and other cardiovascular conditions. The polypeptide, polynucleotide, agonist, or antagonist of the present invention may also be employed to stimulate angiogenesis and limb regeneration, as discussed above.

[0829] A polypeptide, polynucleotide, agonist, or antagonist of the present invention may also be employed for treating wounds due to injuries, bums, post-operative tissue repair, and ulcers since they are mitogenic to various cells of different origins, such as fibroblast cells and skeletal muscle cells, and therefore, facilitate the repair or replacement of damaged or diseased tissue.

[0830] A polypeptide, polynucleotide, agonist, or antagonist of the present invention may also be employed stimulate neuronal growth and to treat and prevent neuronal damage which occurs in certain neuronal disorders or neuro-degenerative conditions such as Alzheimer's disease, Parkinson's disease, and AIDS-related complex. A polypeptide, polynucleotide, agonist, or antagonist of the present invention may have the ability to stimulate chondrocyte growth, therefore, they may be employed to enhance bone and periodontal regeneration and aid in tissue transplants or bone grafts.

[0831] A polypeptide, polynucleotide, agonist, or antagonist of the present invention may be also be employed to prevent skin aging due to sunburn by stimulating keratinocyte growth.

[0832] A polypeptide, polynucleotide, agonist, or antagonist of the present invention may also be employed for preventing hair loss, since FGF family members activate hair-forming cells and promotes melanocyte growth. Along the same lines, a polypeptide, polynucleotide, agonist, or antagonist of the present invention may be employed to stimulate growth and differentiation of hematopoietic cells and bone marrow cells when used in combination with other cytokines.

[0833] A polypeptide, polynucleotide, agonist, or antagonist of the present invention may also be employed to maintain organs before transplantation or for supporting cell culture of primary tissues. A polypeptide, polynucleotide, agonist, or antagonist of the present invention may also be employed for inducing tissue of mesodermal origin to differentiate in early embryos.

[0834] A polypeptide, polynucleotide, agonist, or antagonist of the present invention may also increase or decrease the differentiation or proliferation of embryonic stem cells, besides, as discussed above, hematopoietic lineage.

[0835] A polypeptide, polynucleotide, agonist, or antagonist of the present invention may also be used to modulate mammalian characteristics, such as body height, weight, hair color, eye color, skin, percentage of adipose tissue, pigmentation, size, and shape (e.g., cosmetic surgery). Similarly, a polypeptide, polynucleotide, agonist, or antagonist of the present invention may be used to modulate mammalian metabolism affecting catabolism, anabolism, processing, utilization, and storage of energy.

[0836] A polypeptide, polynucleotide, agonist, or antagonist of the present invention may be used to change a mammal's mental state or physical state by influencing biorhythms, caricadic rhythms, depression (including depressive disorders), tendency for violence, tolerance for pain, reproductive capabilities (preferably by Activin or Inhibin-like activity), hormonal or endocrine levels, appetite, libido, memory, stress, or other cognitive qualities.

[0837] A polypeptide, polynucleotide, agonist, or antagonist of the present invention may also be used as a food additive or preservative, such as to increase or decrease storage capabilities, fat content, lipid, protein, carbohydrate, vitamins, minerals, cofactors or other nutritional components.

[0838] The above-recited applications have uses in a wide variety of hosts. Such hosts include, but are not limited to, human, murine, rabbit, goat, guinea pig, camel, horse, mouse, rat, hamster, pig, micro-pig, chicken, goat, cow, sheep, dog, cat, non-human primate, and human. In specific embodiments, the host is a mouse, rabbit, goat, guinea pig, chicken, rat, hamster, pig, sheep, dog or cat. In preferred embodiments, the host is a mammal. In most preferred embodiments, the host is a human.

[0839] Other Preferred Embodiments

[0840] Other preferred embodiments of the claimed invention include an isolated nucleic acid molecule comprising a nucleotide sequence which is at least 95% identical to a sequence of at least about 50 contiguous nucleotides in the nucleotide sequence of SEQ ID NO:X or the complementary strand thereto, the nucleotide sequence as defined in column 5 of Table 1A or columns 8 and 9 of Table 2 or the complementary strand thereto, and/or cDNA contained in Clone ID NO:Z.

[0841] Also preferred is a nucleic acid molecule wherein said sequence of contiguous nucleotides is included in the nucleotide sequence of the portion of SEQ ID NO:X as defined in column 5, “ORF (From-To)”, in Table 1A.

[0842] Also preferred is a nucleic acid molecule wherein said sequence of contiguous nucleotides is included in the nucleotide sequence of the portion of SEQ ID NO:X as defined in columns 8 and 9, “NT From” and “NT To” respectively, in Table 2.

[0843] Also preferred is an isolated nucleic acid molecule comprising a nucleotide sequence which is at least 95% identical to a sequence of at least about 150 contiguous nucleotides in the nucleotide sequence of SEQ ID NO:X or the complementary strand thereto, the nucleotide sequence as defined in column 5 of Table 1A or columns 8 and 9 of Table 2 or the complementary strand thereto, and/or cDNA contained in Clone ID NO:Z.

[0844] Further preferred is an isolated nucleic acid molecule comprising a nucleotide sequence which is at least 95% identical to a sequence of at least about 500 contiguous nucleotides in the nucleotide sequence of SEQ ID NO:X or the complementary strand thereto, the nucleotide sequence as defined in column 5 of Table 1A or columns 8 and 9 of Table 2 or the complementary strand thereto, and/or cDNA contained in Clone ID NO:Z.

[0845] A further preferred embodiment is a nucleic acid molecule comprising a nucleotide sequence which is at least 95% identical to the nucleotide sequence of the portion of SEQ ID NO:X defined in column 5, “ORF (From-To)”, in Table 1A.

[0846] A further preferred embodiment is a nucleic acid molecule comprising a nucleotide sequence which is at least 95% identical to the nucleotide sequence of the portion of SEQ ID NO:X defined in columns 8 and 9, “NT From” and “NT To”, respectively, in Table 2.

[0847] A further preferred embodiment is an isolated nucleic acid molecule comprising a nucleotide sequence which is at least 95% identical to the complete nucleotide sequence of SEQ ID NO:X or the complementary strand thereto, the nucleotide sequence as defined in column 5 of Table 1A or columns 8 and 9 of Table 2 or the complementary strand thereto, and/or cDNA contained in Clone ID NO:Z.

[0848] Also preferred is an isolated nucleic acid molecule which hybridizes under stringent hybridization conditions to a nucleic acid molecule comprising a nucleotide sequence of SEQ ID NO:X or the complementary strand thereto, the nucleotide sequence as defined in column 5 of Table 1A or columns 8 and 9 of Table 2 or the complementary strand thereto, and/or cDNA contained in Clone ID NO:Z, wherein said nucleic acid molecule which hybridizes does not hybridize under stringent hybridization conditions to a nucleic acid molecule having a nucleotide sequence consisting of only A residues or of only T residues.

[0849] Also preferred is a composition of matter comprising a DNA molecule which comprises the cDNA contained in Clone ID NO:Z.

[0850] Also preferred is an isolated nucleic acid molecule comprising a nucleotide sequence which is at least 95% identical to a sequence of at least 50 contiguous nucleotides of the cDNA sequence contained in Clone ID NO:Z.

[0851] Also preferred is an isolated nucleic acid molecule, wherein said sequence of at least 50 contiguous nucleotides is included in the nucleotide sequence of an open reading frame sequence encoded by cDNA contained in Clone ID NO:Z.

[0852] Also preferred is an isolated nucleic acid molecule comprising a nucleotide sequence which is at least 95% identical to sequence of at least 150 contiguous nucleotides in the nucleotide sequence encoded by cDNA contained in Clone ID NO:Z.

[0853] A further preferred embodiment is an isolated nucleic acid molecule comprising a nucleotide sequence which is at least 95% identical to sequence of at least 500 contiguous nucleotides in the nucleotide sequence encoded by cDNA contained in Clone ID NO:Z.

[0854] A further preferred embodiment is an isolated nucleic acid molecule comprising a nucleotide sequence which is at least 95% identical to the complete nucleotide sequence encoded by cDNA contained in Clone ID NO:Z.

[0855] A further preferred embodiment is a method for detecting in a biological sample a nucleic acid molecule comprising a nucleotide sequence which is at least 95% identical to a sequence of at least 50 contiguous nucleotides in a sequence selected from the group consisting of: a nucleotide sequence of SEQ ID NO:X or the complementary strand thereto; the nucleotide sequence as defined in column 5 of Table 1A or columns 8 and 9 of Table 2 or the complementary strand thereto; and a nucleotide sequence encoded by cDNA contained in Clone ID NO:Z; which method comprises a step of comparing a nucleotide sequence of at least one nucleic acid molecule in said sample with a sequence selected from said group and determining whether the sequence of said nucleic acid molecule in said sample is at least 95% identical to said selected sequence.

[0856] Also preferred is the above method wherein said step of comparing sequences comprises determining the extent of nucleic acid hybridization between nucleic acid molecules in said sample and a nucleic acid molecule comprising said sequence selected from said group. Similarly, also preferred is the above method wherein said step of comparing sequences is performed by comparing the nucleotide sequence determined from a nucleic acid molecule in said sample with said sequence selected from said group. The nucleic acid molecules can comprise DNA molecules or RNA molecules.

[0857] A further preferred embodiment is a method for identifying the species, tissue or cell type of a biological sample which method comprises a step of detecting nucleic acid molecules in said sample, if any, comprising a nucleotide sequence that is at least 95% identical to a sequence of at least 50 contiguous nucleotides in a sequence selected from the group consisting of: a nucleotide sequence of SEQ ID NO:X or the complementary strand thereto; the nucleotide sequence as defined in column 5 of Table 1A or columns 8 and 9 of Table 2 or the complementary strand thereto; and a nucleotide sequence of the cDNA contained in Clone ID NO:Z.

[0858] The method for identifying the species, tissue or cell type of a biological sample can comprise a step of detecting nucleic acid molecules comprising a nucleotide sequence in a panel of at least two nucleotide sequences, wherein at least one sequence in said panel is at least 95% identical to a sequence of at least 50 contiguous nucleotides in a sequence selected from said group.

[0859] Also preferred is a method for diagnosing in a subject a pathological condition associated with abnormal structure or expression of a nucleotide sequence of SEQ ID NO:X or the complementary strand thereto; the nucleotide sequence as defined in column 5 of Table 1A or columns 8 and 9 of Table 2 or the complementary strand thereto; or the cDNA contained in Clone ID NO:Z which encodes a protein, wherein the method comprises a step of detecting in a biological sample obtained from said subject nucleic acid molecules, if any, comprising a nucleotide sequence that is at least 95% identical to a sequence of at least 50 contiguous nucleotides in a sequence selected from the group consisting of: a nucleotide sequence of SEQ ID NO:X or the complementary strand thereto; the nucleotide sequence as defined in column 5 of Table 1A or columns 8 and 9 of Table 2 or the complementary strand thereto; and a nucleotide sequence of cDNA contained in Clone ID NO:Z.

[0860] The method for diagnosing a pathological condition can comprise a step of detecting nucleic acid molecules comprising a nucleotide sequence in a panel of at least two nucleotide sequences, wherein at least one sequence in said panel is at least 95% identical to a sequence of at least 50 contiguous nucleotides in a sequence selected from said group.

[0861] Also preferred is a composition of matter comprising isolated nucleic acid molecules wherein the nucleotide sequences of said nucleic acid molecules comprise a panel of at least two nucleotide sequences, wherein at least one sequence in said panel is at least 95% identical to a sequence of at least 50 contiguous nucleotides in a sequence selected from the group consisting of: a nucleotide sequence of SEQ ID NO:X or the complementary strand thereto; the nucleotide sequence as defined in column 5 of Table 1A or columns 8 and 9 of Table 2 or the complementary strand thereto; and a nucleotide sequence encoded by cDNA contained in Clone ID NO:Z. The nucleic acid molecules can comprise DNA molecules or RNA molecules.

[0862] Also preferred is a composition of matter comprising isolated nucleic acid molecules wherein the nucleotide sequences of said nucleic acid molecules comprise a DNA microarray or “chip” of at least 1, 2, 3, 4, 5, 6, 7, 8, 9, 10, 15, 20, 25, 30, 40, 50, 100, 150, 200, 250, 300, 500, 1000, 2000, 3000, or 4000 nucleotide sequences, wherein at least one sequence in said DNA microarray or “chip” is at least 95% identical to a sequence of at least 50 contiguous nucleotides in a sequence selected from the group consisting of: a nucleotide sequence of SEQ ID NO:X wherein X is any integer as defined in Table 1A; and a nucleotide sequence encoded by a human cDNA clone identified by a cDNA “Clone ID” in Table 1A.

[0863] Also preferred is an isolated polypeptide comprising an amino acid sequence at least 90% identical to a sequence of at least about 10 contiguous amino acids in the polypeptide sequence of SEQ ID NO:Y; a polypeptide encoded by SEQ ID NO:X or the complementary strand thereto; the polypeptide encoded by the nucleotide sequence as defined in columns 8 and 9 of Table 2; and/or a polypeptide encoded by cDNA contained in Clone ID NO:Z.

[0864] Also preferred is an isolated polypeptide comprising an amino acid sequence at least 95% identical to a sequence of at least about 30 contiguous amino acids in the amino acid sequence of SEQ ID NO:Y; a polypeptide encoded by SEQ ID NO:X or the complementary strand thereto; the polypeptide encoded by the nucleotide sequence as defined in columns 8 and 9 of Table 2; and/or a polypeptide encoded by cDNA contained in Clone ID NO:Z.

[0865] Further preferred is an isolated polypeptide comprising an amino acid sequence at least 95% identical to a sequence of at least about 100 contiguous amino acids in the amino acid sequence of SEQ ID NO:Y; a polypeptide encoded by SEQ ID NO:X or the complementary strand thereto; the polypeptide encoded by the nucleotide sequence as defined in columns 8 and 9 of Table 2; and/or a polypeptide encoded by cDNA contained in Clone ID NO:Z.

[0866] Further preferred is an isolated polypeptide comprising an amino acid sequence at least 95% identical to the complete amino acid sequence of SEQ ID NO:Y; a polypeptide encoded by SEQ ID NO:X or the complementary strand thereto; the polypeptide encoded by the nucleotide sequence as defined in columns 8 and 9 of Table 2; and/or a polypeptide encoded by cDNA contained in Clone ID NO:Z.

[0867] Further preferred is an isolated polypeptide comprising an amino acid sequence at least 90% identical to a sequence of at least about 10 contiguous amino acids in the complete amino acid sequence of a polypeptide encoded by contained in Clone ID NO:Z

[0868] Also preferred is a polypeptide wherein said sequence of contiguous amino acids is included in the amino acid sequence of a portion of said polypeptide encoded by cDNA contained in Clone ID NO:Z; a polypeptide encoded by SEQ ID NO:X or the complementary strand thereto; the polypeptide encoded by the nucleotide sequence as defined in columns 8 and 9 of Table 2; and/or the polypeptide sequence of SEQ ID NO:Y.

[0869] Also preferred is an isolated polypeptide comprising an amino acid sequence at least 95% identical to a sequence of at least about 30 contiguous amino acids in the amino acid sequence of a polypeptide encoded by the cDNA contained in Clone ID NO:Z.

[0870] Also preferred is an isolated polypeptide comprising an amino acid sequence at least 95% identical to a sequence of at least about 100 contiguous amino acids in the amino acid sequence of a polypeptide encoded by cDNA contained in Clone ID NO:Z.

[0871] Also preferred is an isolated polypeptide comprising an amino acid sequence at least 95% identical to the amino acid sequence of a polypeptide encoded by the cDNA contained in Clone ID NO:Z.

[0872] Further preferred is an isolated antibody which binds specifically to a polypeptide comprising an amino acid sequence that is at least 90% identical to a sequence of at least 10 contiguous amino acids in a sequence selected from the group consisting of: a polypeptide sequence of SEQ ID NO:Y; a polypeptide encoded by SEQ ID NO:X or the complementary strand thereto; the polypeptide encoded by the nucleotide sequence as defined in columns 8 and 9 of Table 2; and a polypeptide encoded by the cDNA contained in Clone ID NO:Z.

[0873] Further preferred is a method for detecting in a biological sample a polypeptide comprising an amino acid sequence which is at least 90% identical to a sequence of at least 10 contiguous amino acids in a sequence selected from the group consisting of: a polypeptide sequence of SEQ ID NO:Y; a polypeptide encoded by SEQ ID NO:X or the complementary strand thereto; the polypeptide encoded by the nucleotide sequence as defined in columns 8 and 9 of Table 2; and a polypeptide encoded by the cDNA contained in Clone ID NO:Z; which method comprises a step of comparing an amino acid sequence of at least one polypeptide molecule in said sample with a sequence selected from said group and determining whether the sequence of said polypeptide molecule in said sample is at least 90% identical to said sequence of at least 10 contiguous amino acids.

[0874] Also preferred is the above method wherein said step of comparing an amino acid sequence of at least one polypeptide molecule in said sample with a sequence selected from said group comprises determining the extent of specific binding of polypeptides in said sample to an antibody which binds specifically to a polypeptide comprising an amino acid sequence that is at least 90% identical to a sequence of at least 10 contiguous amino acids in a sequence selected from the group consisting of: a polypeptide sequence of SEQ ID NO:Y; a polypeptide encoded by SEQ ID NO:X or the complementary strand thereto; the polypeptide encoded by the nucleotide sequence as defined in columns 8 and 9 of Table 2; and a polypeptide encoded by the cDNA contained in Clone ID NO:Z.

[0875] Also preferred is the above method wherein said step of comparing sequences is performed by comparing the amino acid sequence determined from a polypeptide molecule in said sample with said sequence selected from said group.

[0876] Also preferred is a method for identifying the species, tissue or cell type of a biological sample which method comprises a step of detecting polypeptide molecules in said sample, if any, comprising an amino acid sequence that is at least 90% identical to a sequence of at least 10 contiguous amino acids in a sequence selected from the group consisting of: polypeptide sequence of SEQ ID NO:Y; a polypeptide encoded by SEQ ID NO:X or the complementary strand thereto; the polypeptide encoded by the nucleotide sequence as defined in columns 8 and 9 of Table 2; and a polypeptide encoded by the cDNA contained in Clone ID NO:Z.

[0877] Also preferred is the above method for identifying the species, tissue or cell type of a biological sample, which method comprises a step of detecting polypeptide molecules comprising an amino acid sequence in a panel of at least two amino acid sequences, wherein at least one sequence in said panel is at least 90% identical to a sequence of at least 10 contiguous amino acids in a sequence selected from the above group.

[0878] Also preferred is a method for diagnosing in a subject a pathological condition associated with abnormal structure or expression of a nucleic acid sequence identified in Table 1A or Table 2 encoding a polypeptide, which method comprises a step of detecting in a biological sample obtained from said subject polypeptide molecules comprising an amino acid sequence in a panel of at least two amino acid sequences, wherein at least one sequence in said panel is at least 90% identical to a sequence of at least 10 contiguous amino acids in a sequence selected from the group consisting of: polypeptide sequence of SEQ ID NO:Y; a polypeptide encoded by SEQ ID NO:X or the complementary strand thereto; the polypeptide encoded by the nucleotide sequence as defined in columns 8 and 9 of Table 2; and a polypeptide encoded by the cDNA contained in Clone ID NO:Z.

[0879] In any of these methods, the step of detecting said polypeptide molecules includes using an antibody.

[0880] Also preferred is an isolated nucleic acid molecule comprising a nucleotide sequence which is at least 95% identical to a nucleotide sequence encoding a polypeptide wherein said polypeptide comprises an amino acid sequence that is at least 90% identical to a sequence of at least 10 contiguous amino acids in a sequence selected from the group consisting of: polypeptide sequence of SEQ ID NO:Y; a polypeptide encoded by SEQ ID NO:X or the complementary strand thereto; the polypeptide encoded by the nucleotide sequence as defined in columns 8 and 9 of Table 2; and a polypeptide encoded by the cDNA contained in Clone ID NO:Z.

[0881] Also preferred is an isolated nucleic acid molecule, wherein said nucleotide sequence encoding a polypeptide has been optimized for expression of said polypeptide in a prokaryotic host.

[0882] Also preferred is a polypeptide molecule, wherein said polypeptide comprises an amino acid sequence selected from the group consisting of: polypeptide sequence of SEQ ID NO:Y; a polypeptide encoded by SEQ ID NO:X or the complementary strand thereto; the polypeptide encoded by the nucleotide sequence as defined in columns 8 and 9 of Table 2; and a polypeptide encoded by the cDNA contained in Clone ID NO:Z.

[0883] Further preferred is a method of making a recombinant vector comprising inserting any of the above isolated nucleic acid molecule into a vector. Also preferred is the recombinant vector produced by this method. Also preferred is a method of making a recombinant host cell comprising introducing the vector into a host cell, as well as the recombinant host cell produced by this method.

[0884] Also preferred is a method of making an isolated polypeptide comprising culturing this recombinant host cell under conditions such that said polypeptide is expressed and recovering said polypeptide. Also preferred is this method of making an isolated polypeptide, wherein said recombinant host cell is a eukaryotic cell and said polypeptide is a human protein comprising an amino acid sequence selected from the group consisting of: polypeptide sequence of SEQ ID NO:Y; a polypeptide encoded by SEQ ID NO:X or the complementary strand thereto; the polypeptide encoded by the nucleotide sequence as defined in columns 8 and 9 of Table 2; and a polypeptide encoded by the cDNA contained in Clone ID NO:Z. The isolated polypeptide produced by this method is also preferred.

[0885] Also preferred is a method of treatment of an individual in need of an increased level of a protein activity, which method comprises administering to such an individual a Therapeutic comprising an amount of an isolated polypeptide, polynucleotide, immunogenic fragment or analogue thereof, binding agent, antibody, or antigen binding fragment of the claimed invention effective to increase the level of said protein activity in said individual.

[0886] Also preferred is a method of treatment of an individual in need of a decreased level of a protein activity, which method comprised administering to such an individual a Therapeutic comprising an amount of an isolated polypeptide, polynucleotide, immunogenic fragment or analogue thereof, binding agent, antibody, or antigen binding fragment of the claimed invention effective to decrease the level of said protein activity in said individual.

[0887] Also preferred is a method of treatment of an individual in need of a specific delivery of toxic compositions to diseased cells (e.g., tumors, leukemias or lymphomas), which method comprises administering to such an individual a Therapeutic comprising an amount of an isolated polypeptide of the invention, including, but not limited to a binding agent, or antibody of the claimed invention that are associated with toxin or cytotoxic prodrugs.

[0888] Having generally described the invention, the same will be more readily understood by reference to the following examples, which are provided by way of illustration and are not intended as limiting.

TABLE 6

| ATCC Deposits | Deposit Date | ATCC Designation Number |
|---|---|---|
| LP01, LP02, LP03, | May-20-97 | 209059, 209060, 209061, 209062, |
| LP04, LP05, LP06, | | 209063, 209064, 209065, 209066, |
| LP07, LP08, LP09, | | 209067, 209068, 209069 |
| LP10, LP11, | | |
| LP12 | Jan-12-98 | 209579 |
| LP13 | Jan-12-98 | 209578 |
| LP14 | Jul-16-98 | 203067 |
| LP15 | Jul-16-98 | 203068 |
| LP16 | Feb-1-99 | 203609 |
| LP17 | Feb-1-99 | 203610 |
| LP20 | Nov-17-98 | 203485 |
| LP21 | Jun-18-99 | PTA-252 |
| LP22 | Jun-18-99 | PTA-253 |
| LP23 | Dec-22-99 | PTA-1081 |

### EXAMPLES

### Example 1

[0889] Isolation of a Selected cDNA Clone from the Deposited Sample

[0890] Each Clone ID NO:Z is contained in a plasmid vector. Table 7 identifies the vectors used to construct the cDNA library from which each clone was isolated. In many cases, the vector used to construct the library is a phage vector from which a plasmid has been excised. The following correlates the related plasmid for each phage vector used in constructing the cDNA library. For example, where a particular clone is identified in Table 7 as being isolated in the vector “Lambda Zap,” the corresponding deposited clone is in “pBluescript.”

| Vector Used to Construct Library | Corresponding Deposited Plasmid |
|---|---|
| Lambda Zap | pBluescript (pBS) |
| Uni-Zap XR | pBluescript (pBS) |
| Zap Express | pBK |
| lafmid BA | plafmid BA |
| pSport1 | pSport1 |
| pCMVSport 2.0 | pCMVSport 2.0 |
| pCMVSport 3.0 | pCMVSport 3.0 |
| pCR ® 2.1 | pCR ® 2.1 |

[0891] Vectors Lambda Zap (U.S. Pat. Nos. 5,128,256 and 5,286,636), Uni-Zap XR (U.S. Pat. Nos. 5,128, 256 and 5,286,636), Zap Express (U.S. Pat. Nos. 5,128,256 and 5,286,636), pBluescript (pBS) (Short, J. M. et al., Nucleic Acids Res. 16:7583-7600 (1988); Alting-Mees, M. A. and Short, J. M., Nucleic Acids Res. 17:9494 (1989)) and pBK (Alting-Mees, M. A. et al., Strategies 5:58-61 (1992)) are commercially available from Stratagene Cloning Systems, Inc., 11011 N. Torrey Pines Road, La Jolla, Calif., 92037. pBS contains an ampicillin resistance gene and pBK contains a neomycin resistance gene. Both can be transformed into E. coli strain XL-1 Blue, also available from Stratagene. pBS comes in 4 forms SK+, SK−, KS+ and KS. The S and K refers to the orientation of the polylinker to the T7 and T3 primer sequences which flank the polylinker region (“S” is for Sacd and “K” is for KpnI which are the first sites on each respective end of the linker). “+” or “−” refer to the orientation of the f1 origin of replication (“ori”), such that in one orientation, single stranded rescue initiated from the f1 ori generates sense strand DNA and in the other, antisense.

[0892] Vectors pSport1, pCMVSport 2.0 and pCMVSport 3.0, were obtained from Life Technologies, Inc., P.O. Box 6009, Gaithersburg, Md. 20897. All Sport vectors contain an ampicillin resistance gene and may be transformed into E. coli strain DH10B, also available from Life Technologies. (See, for instance, Gruber, C. E., et al., Focus 15:59 (1993)). Vector lafmid BA (Bento Soares, Columbia University, N.Y.) contains an ampicillin resistance gene and can be transformed into E. coli strain XL-1 Blue. Vector pCR®2. 1, which is available from Invitrogen, 1600 Faraday Avenue, Carlsbad, Calif. 92008, contains an ampicillin resistance gene and may be transformed into E. coli strain DH10B, available from Life Technologies. (See, for instance, Clark, J. M., Nuc. Acids Res. 16:9677-9686 (1988) and Mead, D. et al., Bio/Technology 9: (1991)). Preferably, a polynucleotide of the present invention does not comprise the phage vector sequences identified for the particular clone in Table 7, as well as the corresponding plasmid vector sequences designated above.

[0893] The deposited material in the sample assigned the ATCC Deposit Number cited by reference to Tables 1, 2, 6 and 7 for any given cDNA clone also may contain one or more additional plasmids, each comprising a cDNA clone different from that given clone. Thus, deposits sharing the same ATCC Deposit Number contain at least a plasmid for each Clone ID NO:Z.

TABLE 7

| Libraries owned by Catalog | Catalog Description | Vector | ATCC Deposit |
|---|---|---|---|
| HUKA HUKB HUKC HUKD HUKE | Human Uterine Cancer | Lambda ZAP II | LP01 |
| HUKF HUKG | | | |
| HCNA HCNB | Human Colon | Lambda Zap II | LP01 |
| HFFA | Human Fetal Brain, random primed | Lambda Zap II | LP01 |
| HTWA | Resting T-Cell | Lambda ZAP II | LP01 |
| HBQA | Early Stage Human Brain, random | Lambda ZAP II | LP01 |
| | primed | | |
| HLMB HLMF HLMG HLMH HLMI | breast lymph node CDNA library | Lambda ZAP II | LP01 |
| HLMJ HLMM HLMN | | | |
| HCQA HCQB | human colon cancer | Lamda ZAP II | LP01 |
| HMEA HMEC HMED HMEE HMEF | Human Microvascular Endothelial | Lambda ZAP II | LP01 |
| HMEG HMEI HMEJ HMEK HMEL | Cells, fract. A | | |
| HUSA HUSC | Human Umbilical Vein Endothelial | Lambda ZAP II | LP01 |
| | Cells, fract. A | | |
| HLQA HLQB | Hepatocellular Tumor | Lambda ZAP II | LP01 |
| HHGA HHGB HHGC HHGD | Hemangiopericytoma | Lambda ZAP II | LP01 |
| HSDM | Human Striatum Depression, re-rescue | Lambda ZAP II | LP01 |
| HUSH | H Umbilical Vein Endothelial Cells, | Lambda ZAP II | LP01 |
| | frac A, re-excision | | |
| HSGS | Salivary gland, subtracted | Lambda ZAP II | LP01 |
| HFXA HFXB HFXC HFXD HFXE | Brain frontal cortex | Lambda ZAP II | LP01 |
| HFXF HFXG HFXH | | | |
| HPQA HPQB HPQC | PERM TF274 | Lambda ZAP II | LP01 |
| HFXJ HFXK | Brain Frontal Cortex, re-excision | Lambda ZAP II | LP01 |
| HCWA HCWB HCWC HCWD HCWE | CD34 positive cells (Cord Blood) | ZAP Express | LP02 |
| HCWF HCWG HCWH HCWI HCWJ | | | |
| HCWK | | | |
| HCUA HCUB HCUC | CD34 depleted Buffy Coat (Cord | ZAP Express | LP02 |
| | Blood) | | |
| HRSM | A-14 cell line | ZAP Express | LP02 |
| HRSA | A1-CELL LINE | ZAP Express | LP02 |
| HCUD HCUE HCUF HCUG HCUH | CD34 depleted Buffy Coat (Cord | ZAP Express | LP02 |
| HCUI | Blood), re-excision | | |
| HBXE HBXF HBXG | H. Whole Brain #2, re-excision | ZAP Express | LP02 |
| HRLM | L8 cell line | ZAP Express | LP02 |
| HBXA HBXB HBXC HBXD | Human Whole Brain #2-Oligo dT > | ZAP Express | LP02 |
| | 1.5 Kb | | |
| HUDA HUDB HUDC | Testes | ZAP Express | LP02 |
| HHTM HHTN HHTO | H. hypothalamus, frac A; re-excision | ZAP Express | LP02 |
| HHTL | H. hypothalamus, frac A | ZAP Express | LP02 |
| HASA HASD | Human Adult Spleen | Uni-ZAP XR | LP03 |
| HFKC HFKD HFKE HFKF HFKG | Human Fetal Kidney | Uni-ZAP XR | LP03 |
| HE8A HE8B HE8C HE8D HE8E HE8F | Human 8 Week Whole Embryo | Uni-ZAP XR | LP03 |
| HE8M HE8N | | | |
| HGBA HGBD HGBE HGBF HGBG | Human Gall Bladder | Uni-ZAP XR | LP03 |
| HGBH HGBI | | | |
| HLHA HLHB HLHC HLHD HLHE | Human Fetal Lung III | Uni-ZAP XR | LP03 |
| HLHF HLHG HLHH HLHQ | | | |
| HPMA HPMB HPMC HPMD HPME | Human Placenta | Uni-ZAP XR | LP03 |
| HPMF HPMG HPMH | | | |
| HPRA HPRB HPRC HPRD | Human Prostate | Uni-ZAP XR | LP03 |
| HSIA HSIC HSID HSIE | Human Adult Small Intestine | Uni-ZAP XR | LP03 |
| HTEA HTEB HTEC HTED HTEE | Human Testes | Uni-ZAP XR | LP03 |
| HTEF HTEG HTEH HTEI HTEJ HTEK | | | |
| HTPA HTPB HTPC HTPD HTPE | Human Pancreas Tumor | Uni-ZAP XR | LP03 |
| HTTA HTTB HTTC HTTD HTTE | Human Testes Tumor | Uni-ZAP XR | LP03 |
| HTTF | | | |
| HAPA HAPB HAPC HAPM | Human Adult Pulmonary | Uni-ZAP XR | LP03 |
| HETA HETB HETC HETD HETE | Human Endometrial Tumor | Uni-ZAP XR | LP03 |
| HETF HETG HETH HETI | | | |
| HHFB HHFC HHFD HHFE HHFF | Human Fetal Heart | Uni-ZAP XR | LP03 |
| HHFG HHFH HHFI | | | |
| HHPB HHPC HHPD HHPE HHPF | Human Hippocampus | Uni-ZAP XR | LP03 |
| HHPG HHPH | | | |
| HCE1 HCE2 HCE3 HCE4 HCE5 HCEB | Human Cerebellum | Uni-ZAP XR | LP03 |
| HCEC HCED HCEE HCEF HCEG | | | |
| HUVB HUVC HUVD HUVE | Human Umbilical Vein, Endo. remake | Uni-ZAP XR | LP03 |
| HSTA HSTB HSTC HSTD | Human Skin Tumor | Uni-ZAP XR | LP03 |
| HTAA HTAB HTAC HTAD HTAE | Human Activated T-Cells | Uni-ZAP XR | LP03 |
| HFEA HFEB HFEC | Human Fetal Epithelium (Skin) | Uni-ZAP XR | LP03 |
| HJPA HJPB HJPC HJPD | HUMAN JURKAT MEMBRANE | Uni-ZAP XR | LP03 |
| | BOUND POLYSOMES | | |
| HESA | Human epithelioid sarcoma | Uni-Zap XR | LP03 |
| HLTA HLTB HLTC HLTD HLTE | Human T-Cell Lymphoma | Uni-ZAP XR | LP03 |
| HLTF | | | |
| HFTA HFTB HFTC HFTD | Human Fetal Dura Mater | Uni-ZAP XR | LP03 |
| HRDA HRDB HRDC HRDD HRDE | Human Rhabdomyosarcoma | Uni-ZAP XR | LP03 |
| HRDF | | | |
| HCAA HCAB HCAC | Cem cells cyclohexamide treated | Uni-ZAP XR | LP03 |
| HRGA HRGB HRGC HRGD | Raji Cells, cyclohexamide treated | Uni-ZAP XR | LP03 |
| HSUA HSUB HSUC HSUM | Supt Cells, cyclohexamide treated | Uni-ZAP XR | LP03 |
| HT4A HT4C HT4D | Activated T-Cells, 12 hrs. | Uni-ZAP XR | LP03 |
| HE9A HE9B HE9C HE9D HE9E HE9F | Nine Week Old Early Stage Human | Uni-ZAP XR | LP03 |
| HE9G HE9H HE9M HE9N | | | |
| HATA HATB HATC HATD HATE | Human Adrenal Gland Tumor | Uni-ZAP XR | LP03 |
| HT5A | Activated T-Cells, 24 hrs. | Uni-ZAP XR | LP03 |
| HFGA HFGM | Human Fetal Brain | Uni-ZAP XR | LP03 |
| HNEA HNEB HNEC HNED HNEE | Human Neutrophil | Uni-ZAP XR | LP03 |
| HBGB HBGD | Human Primary Breast Cancer | Uni-ZAP XR | LP03 |
| HBNA HBNB | Human Normal Breast | Uni-ZAP XR | LP03 |
| HCAS | Cem Cells, cyclohexamide treated, | Uni-ZAP XR | LP03 |
| | subtra | | |
| HHPS | Human Hippocampus, subtracted | pBS | LP03 |
| HKCS HKCU | Human Colon Cancer, subtracted | pBS | LP03 |
| HRGS | Raji cells, cyclohexamide treated, | pBS | LP03 |
| | subtracted | | |
| HSUT | Supt cells, cyclohexamide treated, | pBS | LP03 |
| | differentially expressed | | |
| HT4S | Activated T-Cells, 12 hrs, subtracted | Uni-ZAP XR | LP03 |
| HCDA HCDB HCDC HCDD HCDE | Human Chondrosarcoma | Uni-ZAP XR | LP03 |
| HOAA HOAB HOAC | Human Osteosarcoma | Uni-ZAP XR | LP03 |
| HTLA HTLB HTLC HTLD HTLE | Human adult testis, large inserts | Uni-ZAP XR | LP03 |
| HTLF | | | |
| HLMA HLMC HLMD | Breast Lymph node cDNA library | Uni-ZAP XR | LP03 |
| H6EA H6EB H6EC | HL-60, PMA 4H | Uni-ZAP XR | LP03 |
| HTXA HTXB HTXC HTXD HTXE | Activated T-Cell (12 hs)/Thiouridine | Uni-ZAP XR | LP03 |
| HTXF HTXG HTXH | labelled Eco | | |
| HNFA HNFB HNFC HNFD HNFE | Human Neutrophil, Activated | Uni-ZAP XR | LP03 |
| HNFF HNFG HNFH HNFJ | | | |
| HTOB HTOC | HUMAN TONSILS, FRACTION 2 | Uni-ZAP XR | LP03 |
| HMGB | Human OB MG63 control fraction I | Uni-ZAP XR | LP03 |
| HOPB | Human OB HOS control fraction I | Uni-ZAP XR | LP03 |
| HORB | Human OB HOS treated (10 nM E2) | Uni-ZAP XR | LP03 |
| | fraction I | | |
| HSVA HSVB HSVC | Human Chronic Synovitis | Uni-ZAP XR | LP03 |
| HROA | HUMAN STOMACH | Uni-ZAP XR | LP03 |
| HBJA HBJB HBJC HBJD HBJE HBJF | HUMAN B CELL LYMPHOMA | Uni-ZAP XR | LP03 |
| HBJG HBJH HBJI HBJJ HBJK | | | |
| HCRA HCRB HCRC | human corpus colosum | Uni-ZAP XR | LP03 |
| HODA HODB HODC HODD | human ovarian cancer | Uni-ZAP XR | LP03 |
| HDSA | Dermatofibrosarcoma Protuberance | Uni-ZAP XR | LP03 |
| HMWA HMWB HMWC HMWD | Bone Marrow Cell Line (RS4; 11) | Uni-ZAP XR | LP03 |
| HMWE HMWF HMWG HMWH | | | |
| HMWI HMWJ | | | |
| HSOA | stomach cancer (human) | Uni-ZAP XR | LP03 |
| HERA | SKIN | Uni-ZAP XR | LP03 |
| HMDA | Brain-medulloblastoma | Uni-ZAP XR | LP03 |
| HGLA HGLB HGLD | Glioblastoma | Uni-ZAP XR | LP03 |
| HEAA | H. Atrophic Endometrium | Uni-ZAP XR | LP03 |
| HBCA HBCB | H. Lymph node breast Cancer | Uni-ZAP XR | LP03 |
| HPWT | Human Prostate BPH, re-excision | Uni-ZAP XR | LP03 |
| HFVG HFVH HFVI | Fetal Liver, subtraction II | pBS | LP03 |
| HNFI | Human Neutrophils, Activated, | pBS | LP03 |
| | re-excision | | |
| HBMB HBMC HBMD | Human Bone Marrow, re-excision | pBS | LP03 |
| HKML HKMM HKMN | H. Kidney Medulla, re-excision | pBS | LP03 |
| HKIX HKIY | H. Kidney Cortex, subtracted | pBS | LP03 |
| HADT | H. Amygdala Depression, subtracted | pBS | LP03 |
| H6AS | Hl-60, untreated, subtracted | Uni-ZAP XR | LP03 |
| H6ES | HL-60, PMA 4H, subtracted | Uni-ZAP XR | LP03 |
| H6BS | HL-60, RA 4h, Subtracted | Uni-ZAP XR | LP03 |
| H6CS | HL-60, PMA 1d, subtracted | Uni-ZAP XR | LP03 |
| HTXJ HTXK | Activated T-cell(12 h)/Thiouridine- | Uni-ZAP XR | LP03 |
| | re-excision | | |
| HMSA HMSB HMSC HMSD HMSE | Monocyte activated | Uni-ZAP XR | LP03 |
| HMSF HMSG HMSH HMSI HMSJ | | | |
| HMSK | | | |
| HAGA HAGB HAGC HAGD HAGE | Human Amygdala | Uni-ZAP XR | LP03 |
| HAGF | | | |
| HSRA HSRB HSRE | STROMAL-OSTEOCLASTOMA | Uni-ZAP XR | LP03 |
| HSRD HSRF HSRG HSRH | Human Osteoclastoma Stromal Cells- | Uni-ZAP XR | LP03 |
| | unamplified | | |
| HSQA HSQB HSQC HSQD HSQE | Stromal cell TF274 | Uni-ZAP XR | LP03 |
| HSQF HSQG | | | |
| HSKA HSKB HSKC HSKD HSKE | Smooth muscle, serum treated | Uni-ZAP XR | LP03 |
| HSKF HSKZ | | | |
| HSLA HSLB HSLC HSLD HSLE | Smooth muscle, control | Uni-ZAP XR | LP03 |
| HSLF HSLG | | | |
| HSDA HSDD HSDE HSDF HSDG | Spinal cord | Uni-ZAP XR | LP03 |
| HSDH | | | |
| HPWS | Prostate-BPH subtracted II | pBS | LP03 |
| HSKW HSKX HSKY | Smooth Muscle-HASTE normalized | pBS | LP03 |
| HFPB HFPC HFPD | H. Frontal cortex, epileptic; re-excision | Uni-ZAP XR | LP03 |
| HSDI HSDJ HSDK | Spinal Cord, re-excision | Uni-ZAP XR | LP03 |
| HSKN HSKO | Smooth Muscle Serum Treated, Norm | pBS | LP03 |
| HSKG HSKH HSKI | Smooth muscle, serum induced, re-exc | pBS | LP03 |
| HFCA HFCB HFCC HFCD HFCE | Human Fetal Brain | Uni-ZAP XR | LP04 |
| HFCF | | | |
| HPTA HPTB HPTD | Human Pituitaiy | Uni-ZAP XR | LP04 |
| HTHB HTHC HTHD | Human Thymus | Uni-ZAP XR | LP04 |
| HE6B HE6C HE6D HE6E HE6F HE6G | Human Whole Six Week Old Embryo | Uni-ZAP XR | LP04 |
| HE6S | | | |
| HSSA HSSB HSSC HSSD HSSE HSSF | Human Synovial Sarcoma | Uni-ZAP XR | LP04 |
| HSSG HSSH HSSI HSSJ HSSK | | | |
| HE7T | 7 Week Old Early Stage Human, | Uni-ZAP XR | LP04 |
| | subtracted | | |
| HEPA HEPB HEPC | Human Epididymus | Uni-ZAP XR | LP04 |
| HSNA HSNB HSNC HSNM HSNN | Human Synovium | Uni-ZAP XR | LP04 |
| HPFB HPFC HPFD HPFE | Human Prostate Cancer, Stage C | Uni-ZAP XR | LP04 |
| | fraction | | |
| HE2A HE2D HE2E HE2H HE2I HE2M | 12 Week Old Early Stage Human | Uni-ZAP XR | LP04 |
| HE2N HE2O | | | |
| HE2B HE2C HE2F HE2G HE2P HE2Q | 12 Week Old Early Stage Human, II | Uni-ZAP XR | LP04 |
| HPTS HPTT HPTU | Human Pituitary, subtracted | Uni-ZAP XR | LP04 |
| HAUA HAUB HAUC | Amniotic Cells-TNF induced | Uni-ZAP XR | LP04 |
| HAQA HAQB HAQC HAQD | Amniotic Cells-Primary Culture | Uni-ZAP XR | LP04 |
| HWTA HWTB HWTC | wilm's tumor | Uni-ZAP XR | LP04 |
| HBSD | Bone Cancer, re-excision | Uni-ZAP XR | LP04 |
| HSGB | Salivary gland, re-excision | Uni-ZAP XR | LP04 |
| HSJA HSJB HSJC | Smooth muscle-ILb induced | Uni-ZAP XR | LP04 |
| HSXA HSXB HSXC HSXD | Human Substantia Nigra | Uni-ZAP XR | LP04 |
| HSHA HSHB HSHC | Smooth muscle, IL1b induced | Uni-ZAP XR | LP04 |
| HOUA HOUB HOUC HOUD HOUE | Adipocytes | Uni-ZAP XR | LP04 |
| HPWA HPWB HPWC HPWD HPWE | Prostate BPH | Uni-ZAP XR | LP04 |
| HELA HELB HELC HELD HELE | Endothelial cells-control | Uni-ZAP XR | LP04 |
| HELF HELG HELH | | | |
| HEMA HEMB HEMC HEMD HEME | Endothelial-induced | Uni-ZAP XR | LP04 |
| HEMF HEMG HEMH | | | |
| HBIA HBIB HBIC | Human Brain, Striatum | Uni-ZAP XR | LP04 |
| HHSA HHSB HHSC HHSD HHSE | Human Hypothalmus, Schizophrenia | Uni-ZAP XR | LP04 |
| HNGA HNGB HNGC HNGD HNGE | neutrophils control | Uni-ZAP XR | LP04 |
| HNGF HNGG HNGH HNGI HNGJ | | | |
| HNHA HNHB HNHC HNHD HNHE | Neutrophils IL-1 and LPS induced | Uni-ZAP XR | LP04 |
| HNHF HNHG HNHH HNHI HNHJ | | | |
| HSDB HSDC | STRIATUM DEPRESSION | Uni-ZAP XR | LP04 |
| HHPT | Hypothalamus | Uni-ZAP XR | LP04 |
| HSAT HSAU HSAV HSAW HSAX | Anergic T-cell | Uni-ZAP XR | LP04 |
| HSAY HSAZ | | | |
| HBMS HBMT HBMU HBMV HBMW | Bone marrow | Uni-ZAP XR | LP04 |
| HBMX | | | |
| HOEA HOEB HOEC HOED HOEE | Osteoblasts | Uni-ZAP XR | LP04 |
| HOEF HOEJ | | | |
| HAIA HAIB HAIC HAID HAIE HAIF | Epithelial-TNFa and INF induced | Uni-ZAP XR | LP04 |
| HTGA HTGB HTGC HTGD | Apoptotic T-cell | Uni-ZAP XR | LP04 |
| HMCA HMCB HMCC HMCD HMCE | Macrophage-oxLDL | Uni-ZAP XR | LP04 |
| HMAA HMAB HMAC HMAD HMAE | Macrophage (GM-CSF treated) | Uni-ZAP XR | LP04 |
| HMAF HMAG | | | |
| HPHA | Normal Prostate | Uni-ZAP XR | LP04 |
| HPIA HPIB HPIC | LNCAP prostate cell line | Uni-ZAP XR | LP04 |
| HPJA HPJB HPJC | PC3 Prostate cell line | Uni-ZAP XR | LP04 |
| HOSE HOSF HOSG | Human Osteoclastoma, re-excision | Uni-ZAP XR | LP04 |
| HTGE HTGF | Apoptotic T-cell, re-excision | Uni-ZAP XR | LP04 |
| HMAJ HMAK | H Macrophage (GM-CSF treated), | Uni-ZAP XR | LP04 |
| | re-excision | | |
| HACB HACC HACD | Human Adipose Tissue, re-excision | Uni-ZAP XR | LP04 |
| HFPA | H. Frontal Cortex, Epileptic | Uni-ZAP XR | LP04 |
| HFAA HFAB HFAC HFAD HFAE | Alzheimer's, spongy change | Uni-ZAP XR | LP04 |
| HFAM | Frontal Lobe, Dementia | Uni-ZAP XR | LP04 |
| HMIA HMIB HMIC | Human Manic Depression Tissue | Uni-ZAP XR | LP04 |
| HTSA HTSE HTSF HTSG HTSH | Human Thymus | pBS | LP05 |
| HPBA HPBB HPBC HPBD HPBE | Human Pineal Gland | pBS | LP05 |
| HSAA HSAB HSAC | HSA 172 Cells | pBS | LP05 |
| HSBA HSBB HSBC HSBM | HSC 172 cells | pBS | LP05 |
| HJAA HJAB HJAC HJAD | Jurkat T-cell G1 phase | pBS | LP05 |
| HJBA HJBB HJBC HJBD | Jurkat T-Cell, S phase | pBS | LP05 |
| HAFA HAFB | Aorta endothelial cells + TNF-a | pBS | LP05 |
| HAWA HAWB HAWC | Human White Adipose | pBS | LP05 |
| HTNA HTNB | Human Thyroid | pBS | LP05 |
| HONA | Normal Ovary, Premenopausal | pBS | LP05 |
| HARA HARB | Human Adult Retina | pBS | LP05 |
| HLJA HLJB | Human Lung | pCMVSport 1 | LP06 |
| HOFM HOFN HOFO | H. Ovarian Tumor, II, OV5232 | pCMVSport 2.0 | LP07 |
| HOGA HOGB HOGC | OV 10-3-95 | pCMVSport 2.0 | LP07 |
| HCGL | CD34+ cells, II | pCMVSport 2.0 | LP07 |
| HDLA | Hodgkin's Lymphoma I | pCMVSport 2.0 | LP07 |
| HDTA HDTB HDTC HDTD HDTE | Hodgkin's Lymphoma II | pCMVSport 2.0 | LP07 |
| HKAA HKAB HKAC HKAD HKAE | Keratinocyte | pCMVSport 2.0 | LP07 |
| HKAF HKAG HKAH | | | |
| HCIM | CAPFINDER, Crohn's Disease, lib 2 | pCMVSport 2.0 | LP07 |
| HKAL | Keratinocyte, lib 2 | pCMVSport 2.0 | LP07 |
| HKAT | Keratinocyte, lib 3 | pCMVSport 2.0 | LP07 |
| HNDA | Nasal polyps | pCMVSport 2.0 | LP07 |
| HDRA | H. Primary Dendritic Cells, lib 3 | pCMVSport 2.0 | LP07 |
| HOHA HOHB HOHC | Human Osteoblasts II | pCMVSport 2.0 | LP07 |
| HLDA HLDB HLDC | Liver, Hepatoma | pCMVSport 3.0 | LP08 |
| HLDN HLDO HLDP | Human Liver, normal | pCMVSport 3.0 | LP08 |
| HMTA | pBMC stimulated w/poly I/C | pCMVSport 3.0 | LP08 |
| HNTA | NTERA2, control | pCMVSport 3.0 | LP08 |
| HDPA HDPB HDPC HDPD HDPF | Primary Dendritic Cells, lib 1 | pCMVSport 3.0 | LP08 |
| HDPG HDPH HDPI HDPJ HDPK | | | |
| HDPM HDPN HDPO HDPP | Primary Dendritic cells, frac 2 | pCMVSport 3.0 | LP08 |
| HMUA HMUB HMUC | Myoloid Progenitor Cell Line | pCMVSport 3.0 | LP08 |
| HHEA HHEB HHEC HHED | T Cell helper I | pCMVSport 3.0 | LP08 |
| HHEM HHEN HHEO HHEP | T cell helper II | pCMVSport 3.0 | LP08 |
| HEQA HEQB HEQC | Human endometrial stromal cells | pCMVSport 3.0 | LP08 |
| HJMA HJMB | Human endometrial stromal cells- | pCMVSport 3.0 | LP08 |
| | treated with progesterone | | |
| HSWA HSWB HSWC | Human endometrial stromal cells- | pCMVSport 3.0 | LP08 |
| | treated with estradiol | | |
| HSYA HSYB HSYC | Human Thymus Stromal Cells | pCMVSport 3.0 | LP08 |
| HLWA HLWB HLWC | Human Placenta | pCMVSport 3.0 | LP08 |
| HRAA HRAB HRAC | Rejected Kidney, lib 4 | pCMVSport 3.0 | LP08 |
| HMTM | PCR, pBMC I/C treated | PCRII | LP09 |
| HMJA | H. Meniingima, M6 | pSport 1 | LP10 |
| HMKA HMKB HMKC HMKD HMKE | H Meningima, M1 | pSport 1 | LP10 |
| HUSG HUSI | Human umbilical vein endothelial cells, | pSport 1 | LP10 |
| | IL-4 induced | | |
| HUSX HUSY | Human Umbilical Vein Endothelial | pSport 1 | LP10 |
| | Cells, uninduced | | |
| HOFA | Ovarian Tumor I, OV5232 | pSport 1 | LP10 |
| HCFA HCFB HCFC HCFD | T-Cell PHA 16 hrs | pSport 1 | LP10 |
| HCFL HCFM HCFN HCFO | T-Cell PHA 24 hrs | pSport 1 | LP10 |
| HADA HADC HADD HADE HADF | Human Adipose | pSport 1 | LP10 |
| HADG | | | |
| HOVA HOVB HOVC | Human Ovary | pSport 1 | LP10 |
| HTWB HTWC HTWD HTWE HTWF | Resting T-Cell Library, II | pSport 1 | LP10 |
| HMMA | Spleen metastic melanoma | pSport 1 | LP10 |
| HLYA HLYB HLYC HLYD HLYE | Spleen, Chronic lymphocytic leukemia | pSport 1 | LP10 |
| HCGA | CD34+ cell, I | pSport 1 | LP10 |
| HEOM HEON | Human Eosinophils | pSport 1 | LP10 |
| HTDA | Human Tonsil, Lib 3 | pSport 1 | LP10 |
| HSPA | Salivary Gland, Lib 2 | pSport 1 | LP10 |
| HCHA HCHB HCHC | Breast Cancer cell line, MDA 36 | pSport 1 | LP10 |
| HCHM HCHN | Breast Cancer Cell line, angiogenic | pSport 1 | LP10 |
| HCIA | Crohn's Disease | pSport 1 | LP10 |
| HDAA HDAB HDAC | HEL cell line | pSport 1 | LP10 |
| HABA | Human Astrocyte | pSport 1 | LP10 |
| HUFA HUFB HUFC | Ulcerative Colitis | pSport 1 | LP10 |
| HNTM | NTERA2 + retinoic acid, 14 days | pSport 1 | LP10 |
| HDQA | Primary Dendritic cells, CapFinder2, | pSport 1 | LP10 |
| | frac 1 | | |
| HDQM | Primary Dendritic Cells, CapFinder, | pSport 1 | LP10 |
| | frac 2 | | |
| HLDX | Human Liver, normal, CapFinder | pSport 1 | LP10 |
| HULA HULB HULC | Human Dermal Endothelial | pSport 1 | LP10 |
| | Cells, untreated | | |
| HUMA | Human Dermal Endothelial cells, treated | pSport 1 | LP10 |
| HCJA | Human Stromal Endometrial | pSport 1 | LP10 |
| | fibroblasts, untreated | | |
| HCJM | Human Stromal endometrial fibroblasts, | pSport 1 | LP10 |
| | treated w/estradiol | | |
| HEDA | Human Stromal endometrial fibroblasts, | pSport 1 | LP10 |
| | treated with progesterone | | |
| HFNA | Human ovary tumor cell OV350721 | pSport 1 | LP10 |
| HKGA HKGB HKGC HKGD | Merkel Cells | pSport 1 | LP10 |
| HISA HISB HISC | Pancreas Islet Cell Tumor | pSport 1 | LP10 |
| HLSA | Skin, bumed | pSport 1 | LP10 |
| HBZA | Prostate, BPH, Lib 2 | pSport 1 | LP10 |
| HBZS | Prostate BPH, Lib 2, subtracted | pSport 1 | LP10 |
| HFIA HFIB HFIC | Synovial Fibroblasts (control) | pSport 1 | LP10 |
| HFIH HEII HFIJ | Synovial hypoxia | pSport 1 | LP10 |
| HFIT HFIU HFIV | Synovial IL-1/TNF stimulated | pSport 1 | LP10 |
| HGCA | Messangial cell, frac 1 | pSport 1 | LP10 |
| HMVA HMVB HMVC | Bone Marrow Stromal Cell, untreated | pSport 1 | LP10 |
| HFIX HFIY HFIZ | Synovial Fibroblasts (Ill/TNF), subt | pSport 1 | LP10 |
| HFOX HFOY HFOZ | Synovial hypoxia-RSF subtracted | pSport 1 | LP10 |
| HMQA HMQB HMQC HMQD | Human Activated Monocytes | Uni-ZAP XR | LP11 |
| HLIA HLIB HLIC | Human Liver | pCMVSport 1 | LP012 |
| HHBA HHBB HHBC HHBD HHBE | Human Heart | pCMVSport 1 | LP012 |
| HBBA HBBB | Human Brain | pCMVSport 1 | LP012 |
| HLJA HLJB HLJC HLJD HLJE | Human Lung | pCMVSport 1 | LP012 |
| HOGA HOGB HOGC | Ovarian Tumor | pCMVSport 2.0 | LP012 |
| HTJM | Human Tonsils, Lib 2 | pCMVSport 2.0 | LP012 |
| HAMF HAMG | KMH2 | pCMVSport 3.0 | LP012 |
| HAJA HAJB HAJC | L428 | pCMVSport 3.0 | LP012 |
| HWBA HWBB HWBC HWBD HWBE | Dendritic cells, pooled | pCMVSport 3.0 | LP012 |
| HWAA HWAB HWAC HWAD HWAE | Human Bone Marrow, treated | pCMVSport 3.0 | LP012 |
| HYAA HYAB HYAC | B Cell lymphoma | pCMVSport 3.0 | LP012 |
| HWHG HWHH HWHI | Healing groin wound, 6.5 hours post | pCMVSport 3.0 | LP012 |
| | incision | | |
| HWHP HWHQ HWHR | Healing groin wound; 7.5 hours post | pCMVSport 3.0 | LP012 |
| | incision | | |
| HARM | Healing groin wound-zero hr post- | pCMVSport 3.0 | LP012 |
| | incision (control) | | |
| HBIM | Olfactory epithelium; nasal cavity | pCMVSport 3.0 | LP012 |
| HWDA | Healing Abdomen wound; 70 & 90 min | pCMVSport 3.0 | LP012 |
| | post incision | | |
| HWEA | Healing Abdomen Wound; 15 days post | pCMVSport 3.0 | LP012 |
| | incision | | |
| HWJA | Healing Abdomen Wound; 21 & 29 days | pCMVSport 3.0 | LP012 |
| HNAL | Human Tongue, frac 2 | pSport 1 | LP012 |
| HMJA | H. Meniingima, M6 | pSport 1 | LP012 |
| HMKA HMKB HMKC HMKD HMKE | H. Meningima, M1 | pSport 1 | LP012 |
| HOFA | Ovarian Tumor I, OV5232 | pSport 1 | LP012 |
| HCFA HCFB HCFC HCFD | T-Cell PHA 16 hrs | pSport 1 | LP012 |
| HCFL HCFM HCFN HCFO | T-Cell PHA 24 hrs | pSport 1 | LP012 |
| HMMA HMMB HMMC | Spleen metastic melanoma | pSport 1 | LP012 |
| HTDA | Human Tonsil, Lib 3 | pSport 1 | LP012 |
| HDBA | Human Fetal Thymus | pSport 1 | LP012 |
| HDUA | Pericardium | pSport 1 | LP012 |
| HBZA | Prostate, BPH, Lib 2 | pSport 1 | LP012 |
| HWCA | Larynx tumor | pSport 1 | LP012 |
| HWKA | Normal lung | pSport 1 | LP012 |
| HSMB | Bone marrow stroma, treated | pSport 1 | LP012 |
| HBHM | Normal trachea | pSport 1 | LP012 |
| HLFC | Human Larynx | pSport 1 | LP012 |
| HLRB | Siebben Polyposis | pSport 1 | LP012 |
| HNIA | Mammary Gland | pSport 1 | LP012 |
| HNJB | Palate carcinoma | pSport 1 | LP012 |
| HNKA | Palate normal | pSport 1 | LP012 |
| HMZA | Pharynx carcinoma | pSport 1 | LP012 |
| HABG | Cheek Carcinoma | pSport 1 | LP012 |
| HMZM | Pharynx Carcinoma | pSport 1 | LP012 |
| HDRM | Larynx Carcinoma | pSport 1 | LP012 |
| HVAA | Pancreas normal PCA4 No | pSport 1 | LP012 |
| HICA | Tongue carcinoma | pSport 1 | LP012 |
| HUKA HUKB HUKC HUKD HUKE | Human Uterine Cancer | Lambda ZAP II | LP013 |
| HFFA | Human Fetal Brain, random primed | Lambda ZAP II | LP013 |
| HTUA | Activated T-cell labeled with 4-thioluri | Lambda ZAP II | LP013 |
| HBQA | Early Stage Human Brain, random | Lambda ZAP II | LP013 |
| | primed | | |
| HMEB | Human microvascular Endothelial cells, | Lambda ZAP II | LP013 |
| | fract. B | | |
| HUSH | Human Umbilical Vein Endothelial | Lambda ZAP II | LP013 |
| | cells, fract. A, re-excision | | |
| HLQC HLQD | Hepatocellular tumor, re-excision | Lambda ZAP II | LP013 |
| HTWJ HTWK HTWL | Resting T-cell, re-excision | Lambda ZAP II | LP013 |
| HF6S | Human Whole 6 week Old Embryo (II), | pBluescript | LP013 |
| | subt | | |
| HHPS | Human Hippocampus, subtracted | pBluescript | LP013 |
| HL1S | LNCAP, differential expression | pBluescript | LP013 |
| HLHS HLHT | Early Stage Human Lung, Subtracted | pBluescript | LP013 |
| HSUS | Supt cells, cyclohexamide treated, | pBluescnpt | LP013 |
| | subtracted | | |
| HSUT | Supt cells, cyclohexamide treated, | pBluescript | LP013 |
| | differentially expressed | | |
| HSDS | H. Striatum Depression, subtracted | pBluescript | LP013 |
| HPTZ | Human Pituitary, Subtracted VII | pBluescript | LP013 |
| HSDX | H. Striatum Depression, subt II | pBluescript | LP013 |
| HSDZ | H. Striatum Depression, subt | pBluescript | LP013 |
| HPBA HPBB HPBC HPBD HPBE | Human Pineal Gland | pBluescript SK- | LP013 |
| HRTA | Colorectal Tumor | pBluescript SK- | LP013 |
| HSBA HSBB HSBC HSBM | HSC172 cells | pBluescript SK- | LP013 |
| HJAA HJAB HJAC HJAD | Jurkat T-cell G1 phase | pBluescript SK- | LP013 |
| HJBA HJBB HJBC HJBD | Jurkat T-cell, S1 phase | pBluescript SK- | LP013 |
| HTNA HTNB | Human Thyroid | pBluescript SK- | LP013 |
| HAHA HAHB | Human Adult Heart | Uni-ZAP XR | LP013 |
| HE6A | Whole 6 week Old Embryo | Uni-ZAP XR | LP013 |
| HFCA HFCB HFCC HFCD HECE | Human Fetal Brain | Uni-ZAP XR | LP013 |
| HFKC HFKD HEKE HFKF HFKG | Human Fetal Kidney | Uni-ZAP XR | LP013 |
| HGBA HGBD HGBE HGBF HGBG | Human Gall Bladder | Uni-ZAP XR | LP013 |
| HPRA HPRB HPRC HPRD | Human Prostate | Uni-ZAP XR | LP013 |
| HTEA HTEB HTEC HTED HTEE | Human Testes | Uni-ZAP XR | LP013 |
| HTTA HTTB HTTC HTTD HTTE | Human Testes Tumor | Uni-ZAP XR | LP013 |
| HYBA HYBB | Human Fetal Bone | Uni-ZAP XR | LP013 |
| HFLA | Human Fetal Liver | Uni-ZAP XR | LP013 |
| HHFB HHFC HHFD HHFE HHFF | Human Fetal Heart | Uni-ZAP XR | LP013 |
| HUVB HUVC HUVD HUVE | Human Umbilical Vein, End. remake | Uni-ZAP XR | LP013 |
| HTHB HTHC HTHD | Human Thymus | Uni-ZAP XR | LP013 |
| HSTA HSTB HSTC HSTD | Human Skin Tumor | Uni-ZAP XR | LP013 |
| HTAA HTAB HTAC HTAD HTAE | Human Activated T-cells | Uni-ZAP XR | LP013 |
| HFEA HFEB HFEC | Human Fetal Epithelium (skin) | Uni-ZAP XR | LP013 |
| HJPA HJPB HJPC HJPD | Human Jurkat Membrane Bound | Uni-ZAP XR | LP013 |
| | Polysomes | | |
| HESA | Human Epithelioid Sarcoma | Uni-ZAP XR | LP013 |
| HALS | Human Adult Liver, Subtracted | Uni-ZAP XR | LP013 |
| HFTA HFTB HFTC HFTD | Human Fetal Dura Mater | Uni-ZAP XR | LP013 |
| HCAA HCAB HCAC | Cem cells, cyclohexamide treated | Uni-ZAP XR | LP013 |
| HRGA HRGB HRGC HRGD | Raji Cells, cyclohexamide treated | Uni-ZAP XR | LP013 |
| HE9A HE9B HE9C HE9D HE9E | Nine Week Old Early Stage Human | Uni-ZAP XR | LP013 |
| HSFA | Human Fibrosarcoma | Uni-ZAP XR | LP013 |
| HATA HATB HATC HATD HATE | Human Adrenal Gland Tumor | Uni-ZAP XR | LP013 |
| HTRA | Human Trachea Tumor | Uni-ZAP XR | LP013 |
| HE2A HE2D HE2E HE2H HE2I | 12 Week Old Early Stage Human | Uni-ZAP XR | LP013 |
| HE2B HE2C HE2F HE2G HE2P | 12 Week Old Early Stage Human, II | Uni-ZAP XR | LP013 |
| HNEA HNEB HNEC HNED HNEE | Human Neutrophil | Uni-ZAP XR | LP013 |
| HBGA | Human Primary Breast Cancer | Uni-ZAP XR | LP013 |
| HPTS HPTT HPTU | Human Pituitary, subtracted | Uni-ZAP XR | LP013 |
| HMQA HMQB HMQC HMQD | Human Activated Monocytes | Uni-ZAP XR | LP013 |
| HOAA HOAB HOAC | Human Osteosarcoma | Uni-ZAP XR | LP013 |
| HTOA HTOD HTOE HTOF HTOG | human tonsils | Uni-ZAP XR | LP013 |
| HMGB | Human OB MG63 control fraction I | Uni-ZAP XR | LP013 |
| HOPB | Human OB HOS control fraction I | Uni-ZAP XR | LP013 |
| HOQB | Human OB HOS treated (1 nM E2) | Uni-ZAP XR | LP013 |
| | fraction I | | |
| HAUA HAUB HAUC | Amniotic Cells-TNF induced | Uni-ZAP XR | LP013 |
| HAQA HAQB HAQC HAQD | Amniotic Cells-Primary Culture | Uni-ZAP XR | LP013 |
| HROA HROC | HUMAN STOMACH | Uni-ZAP XR | LP013 |
| HBJA HBJB HBJC HBJD HBJE | HUMAN B CELL LYMPHOMA | Uni-ZAP XR | LP013 |
| HODA HODB HODC HODD | human ovarian cancer | Uni-ZAP XR | LP013 |
| HCPA | Corpus Callosum | Uni-ZAP XR | LP013 |
| HSOA | stomach cancer (human) | Uni-ZAP XR | LP013 |
| HERA | SKIN | Uni-ZAP XR | LP013 |
| HMDA | Brain-medulloblastoma | Uni-ZAP XR | LP013 |
| HGLA HGLB HGLD | Glioblastoma | Uni-ZAP XR | LP013 |
| HWTA HWTB HWTC | wilm's tumor | Uni-ZAP XR | LP013 |
| HEAA | H. Atrophic Endometrium | Uni-ZAP XR | LP013 |
| HAPN HAPO HAPP HAPQ HAPR | Human Adult Pulmonary; re-excision | Uni-ZAP XR | LP013 |
| HLTG HLTH | Human T-cell lymphoma; re-excision | Uni-ZAP XR | LP013 |
| HAHC HAHD HAHE | Human Adult Heart; re-excision | Uni-ZAP XR | LP013 |
| HAGA HAGB HAGC HAGD HAGE | Human Amygdala | Uni-ZAP XR | LP013 |
| HSJA HSJB HSJC | Smooth muscle-ILb tnduced | Uni-ZAP XR | LP013 |
| HSHA HSHB HSHC | Smooth muscle, IL1b induced | Uni-ZAP XR | LP013 |
| HPWA HPWB HPWC HPWD HPWE | Prostate BPH | Uni-ZAP XR | LP013 |
| HPIA HPIB HPIC | LNCAP prostate cell line | Uni-ZAP XR | LP013 |
| HPJA HPJB HPJC | PC3 Prostate cell line | Uni-ZAP XR | LP013 |
| HBTA | Bone Marrow Stroma, TNF & LPS ind | Uni-ZAP XR | LP013 |
| HMCF HMCG HMCH HMCI HMCJ | Macrophage-oxLDL; re-excision | Uni-ZAP XR | LP013 |
| HAGG HAGH HAGI | Human Amygdala; re-excision | Uni-ZAP XR | LP013 |
| HACA | H. Adipose Tissue | Uni-ZAP XR | LP013 |
| HKFB | K562 + PMA (36 hrs), re-excision | ZAP Express | LP013 |
| HCWT HCWU HCWV | CD34 positive cells (cord blood), re-ex | ZAP Express | LP013 |
| HBWA | Whole brain | ZAP Express | LP013 |
| HBXA HBXB HBXC HBXD | Human Whole Brain #2-Oligo dT > | ZAP Express | LP013 |
| | 1.5 Kb | | |
| HAVM | Temporal cortex-Alzheizmer | pT-Adv | LP014 |
| HAVT | Hippocampus, Alzheimer Subtracted | pT-Adv | LP014 |
| HHAS | CHME Cell Line | Uni-ZAP XR | LP014 |
| HAJR | Larynx normal | pSport 1 | LP014 |
| HWLE HWLF HWLG HWLH | Colon Normal | pSport 1 | LP014 |
| HCRM HCRN HCRO | Colon Carcinoma | pSport 1 | LP014 |
| HWLI HWLJ HWLK | Colon Normal | pSport 1 | LP014 |
| HWLQ HWLR HWLS HWLT | Colon Tumor | pSport 1 | LP014 |
| HBFM | Gastrocnemius Muscle | pSport 1 | LP014 |
| HBOD HBOE | Quadriceps Muscle | pSport 1 | LP014 |
| HBKD HBKE | Soleus Muscle | pSport 1 | LP014 |
| HCCM | Pancreatic Langerhans | pSport 1 | LP014 |
| HWGA | Larynx carcinoma | pSport 1 | LP014 |
| HWGM HWGN | Larynx carcinoma | pSport 1 | LP014 |
| HWLA HWLB HWLC | Normal colon | pSport 1 | LP014 |
| HWLM HWLN | Colon Tumor | pSport 1 | LP014 |
| HVAM HVAN HVAO | Pancreas Tumor | pSport 1 | LP014 |
| HWGQ | Larynx carcinoma | pSport 1 | LP014 |
| HAQM HAQN | Salivary Gland | pSport 1 | LP014 |
| HASM | Stomach; normal | pSport 1 | LP014 |
| HBCM | Uterus; normal | pSport 1 | LP014 |
| HCDM | Testis; normal | pSport 1 | LP014 |
| HDJM | Brain; normal | pSport 1 | LP014 |
| HEFM | Adrenal Gland, normal | pSport 1 | LP014 |
| HBAA | Rectum normal | pSport 1 | LP014 |
| HFDM | Rectum tumour | pSport 1 | LP014 |
| HGAM | Colon, normal | pSport 1 | LP014 |
| HHMM | Colon, tumour | pSport 1 | LP014 |
| HCLB HCLC | Human Lung Cancer | Lambda Zap II | LP015 |
| HRLA | L1 Cell line | ZAP Express | LP015 |
| HHAM | Hypothalamus, Alzheimer's | pCMVSport 3.0 | LP015 |
| HKBA | Ku 812F Basophils Line | pSport 1 | LP015 |
| HS2S | Saos2, Dexamethosome Treated | pSport 1 | LP016 |
| HA5A | Lung Carcinoma A549 TNF alpha | pSport 1 | LP016 |
| | activated | | |
| HTFM | TF-1 Cell Line GM-CSF Treated | pSport 1 | LP016 |
| HYAS | Thyroid Tumour | pSport 1 | LP016 |
| HUTS | Larynx Normal | pSport 1 | LP016 |
| HXOA | Larynx Tumor | pSport 1 | LP016 |
| HEAH | Ea.hy.926 cell line | pSport 1 | LP016 |
| HINA | Adenocarcinoma Human | pSport 1 | LP016 |
| HRMA | Lung Mesothelium | pSport 1 | LP016 |
| HLCL | Human Pre-Differentiated Adipocytes | Uni-Zap XR | LP017 |
| HS2A | Saos2 Cells | pSport 1 | LP020 |
| HS2I | Saos2 Cells; Vitamin D3 Treated | pSport 1 | LP020 |
| HUCM | CHME Cell Line, untreated | pSport 1 | LP020 |
| HEPN | Aryepiglottis Normal | pSport 1 | LP020 |
| HPSN | Sinus Piniformis Tumour | pSport 1 | LP020 |
| HNSA | Stomach Normal | pSport 1 | LP020 |
| HNSM | Stomach Tumour | pSport 1 | LP020 |
| HNLA | Liver Normal Met 5 No | pSport 1 | LP020 |
| HUTA | Liver Tumour Met 5 Tu | pSport 1 | LP020 |
| HOCN | Colon Normal | pSport 1 | LP020 |
| HOCT | Colon Tumor | pSport 1 | LP020 |
| HTNT | Tongue Tumour | pSport 1 | LP020 |
| HLXN | Larynx Normal | pSport 1 | LP020 |
| HLXT | Larynx Tumour | pSport 1 | LP020 |
| HTYN | Thymus | pSport 1 | LP020 |
| HPLN | Placenta | pSport 1 | LP020 |
| HTNG | Tongue Normal | pSport 1 | LP020 |
| HZAA | Thyroid Normal (SDCA2 No) | pSport 1 | LP020 |
| HWES | Thyroid Thyroiditis | pSport 1 | LP020 |
| HFHD | Ficolled Human Stromal Cells, 5 Fu | pTrip1Ex2 | LP021 |
| | treated | | |
| HFHM, HFHN | Ficolled Human Stromal Cells, | pTrip1Ex2 | LP021 |
| | Untreated | | |
| HPCI | Hep G2 Cells, lambda library | lambda Zap-CMV XR | LP021 |
| HBCA, HBCB, HBCC | H. Lymph node breast Cancer | Uni-ZAP XR | LP021 |
| HCOK | Chondrocytes | pSPORT 1 | LP022 |
| HDCA, HDCB, HDCC | Dendritic Cells From CD34 Cells | pSPORT 1 | LP022 |
| HDMA, HDMB | CD40 activated monocyte dendritic | pSPORT 1 | LP022 |
| | cells | | |
| HDDM, HDDN, HDDO | LPS activated derived dendritic cells | pSPORT 1 | LP022 |
| HPCR | Hep G2 Cells, PCR library | lambda Zap-CMV XR | LP022 |
| HAAA, HAAB, HAAC | Lung, Cancer (4005313A3): Invasive | pSPORT 1 | LP022 |
| | Poorly Differentiated Lung | | |
| | Adenocarcinoma | | |
| HIPA, HIPB, HIPC | Lung, Cancer (4005163 B7): Invasive, | pSPORT 1 | LP022 |
| | Poorly Duff. Adenocarcinoma, | | |
| | Metastatic | | |
| HOOH, HOOI | Ovary, Cancer: (4004562 B6) Papillary | pSPORT 1 | LP022 |
| | Serous Cystic Neoplasm, Low | | |
| | Malignant Pot | | |
| HIDA | Lung, Normal: (4005313 B1) | pSPORT 1 | LP022 |
| HUJA, HUJB, HUJC, HUJD, HUJE | B-Cells | pCMVSport 3.0 | LP022 |
| HNOA, HNOB, HNOC, HNOD | Ovary, Normal: (9805C040R) | pSPORT 1 | LP022 |
| HNLM | Lung, Normal: (4005313 B1) | pSPORT 1 | LP022 |
| HSCL | Stromal Cells | pSPORT 1 | LP022 |
| HAAX | Lung, Cancer: (4005313 A3) Invasive | pSPORT 1 | LP022 |
| | Poorly-differentiated Metastatic lung | | |
| | adenocarcinoma | | |
| HUUA, HUUB, HUUC, HUUD | B-cells (unstimulated) | pTrip1Ex2 | LP022 |
| HWWA, HWWB, HWWC, HWWD, | B-cells (stimulated) | pSPORT 1 | LP022 |
| HWWE, HWWF, HWWG | | | |
| HCCC | Colon, Cancer: (9808C064R) | pCMVSport 3.0 | LP023 |
| HPDO HPDP HPDQ HPDR HPD | Ovary, Cancer (9809C332): Poorly | pSport 1 | LP023 |
| | differentiated adenocarcinoma | | |
| HPCO HPCP HPCQ HPCT | Ovary, Cancer (15395A1F): Grade II | pSport 1 | LP023 |
| | Papillary Carcinoma | | |
| HOCM HOCO HOCP HOCQ | Ovary, Cancer: (15799A1F) Poorly | pSport 1 | LP023 |
| | differentiated carcinoma | | |
| HCBM HCBN HCBO | Breast, Cancer: (4004943 A5) | pSport 1 | LP023 |
| HNBT HNBU HNBV | Breast, Normal: (4005522B2) | pSport 1 | LP023 |
| HBCP HBCQ | Breast, Cancer: (4005522 A2) | pSport 1 | LP023 |
| HBCJ | Breast, Cancer: (9806C012R) | pSport 1 | LP023 |
| HSAM HSAN | Stromal cells 3.88 | pSport 1 | LP023 |
| HVCA HVCB HVCC HVCD | Ovary, Cancer: (4004332 A2) | pSport 1 | LP023 |
| HSCK HSEN HSEO | Stromal cells (HBM3.18) | pSport 1 | LP023 |
| HSCP HSCQ | stromal cell clone 2.5 | pSport 1 | LP023 |
| HUXA | Breast Cancer: (4005385 A2) | pSport 1 | LP023 |
| HCOM HCON HCOO HCOP HCOQ | Ovary, Cancer (4004650 A3): Well- | pSport 1 | LP023 |
| | Differentiated Micropapillary Serous | | |
| | Carcinoma | | |
| HBNM | Breast, Cancer: (9802C020E) | pSport 1 | LP023 |
| HVVA HVVB HVVC HVVD HVVE | Human Bone Marrow, treated | pSport 1 | LP023 |

[0894] Two nonlimiting examples are provided below for isolating a particular clone from the deposited sample of plasmid cDNAs cited for that clone in Table 7. First, a plasmid is directly isolated by screening the clones using a polynucleotide probe corresponding to the nucleotide sequence of SEQ ID NO:X.

[0895] Particularly, a specific polynucleotide with 30-40 nucleotides is synthesized using an Applied Biosystems DNA synthesizer according to the sequence reported. The Oligonucleotide is labeled, for instance, with ³²P-γ-ATP using T4 polynucleotide kinase and purified according to routine methods. (E.g., Maniatis et al., Molecular Cloning: A Laboratory Manual, Cold Spring Harbor Press, Cold Spring, N.Y. (1982)). The plasmid mixture is transformed into a suitable host, as indicated above (such as XL-1 Blue (Stratagene)) using techniques known to those of skill in the art, such as those provided by the vector supplier or in related publications or patents cited above. The transformants are plated on 1.5% agar plates (containing the appropriate selection agent, e.g., ampicillin) to a density of about 150 transformants (colonies) per plate. These plates are screened using Nylon membranes according to routine methods for bacterial colony screening (e.g., Sambrook et al., Molecular Cloning: A Laboratory Manual, 2nd Edit., (1989), Cold Spring Harbor Laboratory Press, pages 1.93 to 1.104), or other techniques known to those of skill in the art.

[0896] Alternatively, two primers of 17-20 nucleotides derived from both ends of the nucleotide sequence of SEQ ID NO:X are synthesized and used to amplify the desired cDNA using the deposited cDNA plasmid as a template. The polymerase chain reaction is carried out under routine conditions, for instance, in 25 μl of reaction mixture with 0.5 ug of the above cDNA template. A convenient reaction mixture is 1.5-5 mM MgCl₂, 0.01% (w/v) gelatin, 20 μM each of dATP, dCTP, dGTP, dTTP, 25 pmol of each primer and 0.25 Unit of Taq polymerase. Thirty five cycles of PCR (denaturation at 94° C. for 1 min; annealing at 55° C. for 1 min; elongation at 72° C. for 1 min) are performed with a Perkin-Elmer Cetus automated thermal cycler. The amplified product is analyzed by agarose gel electrophoresis and the DNA band with expected molecular weight is excised and purified. The PCR product is verified to be the selected sequence by subcloning and sequencing the DNA product.

[0897] Several methods are available for the identification of the 5′ or 3′ non-coding portions of a gene which may not be present in the deposited clone. These methods include but are not limited to, filter probing, clone enrichment using specific probes, and protocols similar or identical to 5′ and 3′ “RACE” protocols which are well known in the art. For instance, a method similar to 5′ RACE is available for generating the missing 5′ end of a desired full-length transcript. (Fromont-Racine et al., Nucleic Acids Res. 21(7):1683-1684 (1993)).

[0898] Briefly, a specific RNA oligonucleotide is ligated to the 5′ ends of a population of RNA presumably containing full-length gene RNA transcripts. A primer set containing a primer specific to the ligated RNA oligonucleotide and a primer specific to a known sequence of the gene of interest is used to PCR amplify the 5′ portion of the desired full-length gene. This amplified product may then be sequenced and used to generate the full length gene.

[0899] This above method starts with total RNA isolated from the desired source, although poly-A+ RNA can be used. The RNA preparation can then be treated with phosphatase if necessary to eliminate 5′ phosphate groups on degraded or damaged RNA which may interfere with the later RNA ligase step. The phosphatase should then be inactivated and the RNA treated with tobacco acid pyrophosphatase in order to remove the cap structure present at the 5′ ends of messenger RNAs. This reaction leaves a 5′ phosphate group at the 5′ end of the cap cleaved RNA which can then be ligated to an RNA oligonucleotide using T4 RNA ligase.

[0900] This modified RNA preparation is used as a template for first strand cDNA synthesis using a gene specific oligonucleotide. The first strand synthesis reaction is used as a template for PCR amplification of the desired 5′ end using a primer specific to the ligated RNA oligonucleotide and a primer specific to the known sequence of the gene of interest. The resultant product is then sequenced and analyzed to confirm that the 5′ end sequence belongs to the desired gene.

### Example 2

[0901] Isolation of Genomic Clones Corresponding to a Polynucleotide

[0902] A human genomic P1 library (Genomic Systems, Inc.) is screened by PCR using primers selected for the sequence corresponding to SEQ ID NO:X according to the method described in Example 1. (See also, Sambrook.)

### Example 3

[0903] Tissue Specific Expression Analysis

[0904] The Human Genome Sciences, Inc. (HGS) database is derived from sequencing tissue and/or disease specific cDNA libraries. Libraries generated from a particular tissue are selected and the specific tissue expression pattern of EST groups or assembled contigs within these libraries is determined by comparison of the expression patterns of those groups or contigs within the entire database. ESTs and assembled contigs which show tissue specific expression are selected.

[0905] The original clone from which the specific EST sequence was generated, or in the case of an assembled contig, the clone from which the 5′ most EST sequence was generated, is obtained from the catalogued library of clones and the insert amplified by PCR using methods known in the art. The PCR product is denatured and then transferred in 96 or 384 well format to a nylon membrane (Schleicher and Scheull) generating an array filter of tissue specific clones. Housekeeping genes, maize genes, and known tissue specific genes are included on the filters. These targets can be used in signal normalization and to validate assay sensitivity. Additional targets are included to monitor probe length and specificity of hybridization.

[0906] Radioactively labeled hybridization probes are generated by first strand cDNA synthesis per the manufacturer's instructions (Life Technologies) from mRNA/RNA samples prepared from the specific tissue being analyzed (e.g., prostate, prostate cancer, ovarian, ovarian cancer, etc.). The hybridization probes are purified by gel exclusion chromatography, quantitated, and hybridized with the array filters in hybridization bottles at 65° C. overnight. The filters are washed under stringent conditions and signals are captured using a Fuji phosphorimager.

[0907] Data is extracted using AIS software and following background subtraction, signal normalization is performed. This includes a normalization of filter-wide expression levels between different experimental runs. Genes that are differentially expressed in the tissue of interest are identified.

### Example 4

[0908] Chromosomal Mapping of the Polynucleotides

[0909] An oligonucleotide primer set is designed according to the sequence at the 5′ end of SEQ ID NO:X. This primer preferably spans about 100 nucleotides. This primer set is then used in a polymerase chain reaction under the following set of conditions: 30 seconds, 95° C.; 1 minute, 56° C.; 1 minute, 70° C. This cycle is repeated 32 times followed by one 5 minute cycle at 70° C. Human, mouse, and hamster DNA is used as template in addition to a somatic cell hybrid panel containing individual chromosomes or chromosome fragments (Bios, Inc). The reactions are analyzed on either 8% polyacrylamide gels or 3.5% agarose gels. Chromosome mapping is determined by the presence of an approximately 100 bp PCR fragment in the particular somatic cell hybrid.

### Example 5

[0910] Bacterial Expression of a Polypeptide

[0911] A polynucleotide encoding a polypeptide of the present invention is amplified using PCR oligonucleotide primers corresponding to the 5′ and 3′ ends of the DNA sequence, as outlined in Example 1, to synthesize insertion fragments. The primers used to amplify the cDNA insert should preferably contain restriction sites, such as BamHI and XbaI, at the 5′ end of the primers in order to clone the amplified product into the expression vector. For example, BamHI and XbaI correspond to the restriction enzyme sites on the bacterial expression vector pQE-9. (Qiagen, Inc., Chatsworth, Calif.). This plasmid vector encodes antibiotic resistance (Amp^{r}), a bacterial origin of replication (ori), an IPTG-regulatable promoter/operator (P/O), a ribosome binding site (RBS), a 6-histidine tag (6-His), and restriction enzyme cloning sites.

[0912] The pQE-9 vector is digested with BamHI and XbaI and the amplified fragment is ligated into the pQE-9 vector maintaining the reading frame initiated at the bacterial RBS. The ligation mixture is then used to transform the E. coli strain M15/rep4 (Qiagen, Inc.) which contains multiple copies of the plasmid pREP4, which expresses the lacI repressor and also confers kanamycin resistance (Kan^{r}). Transformants are identified by their ability to grow on LB plates and ampicillin/kanamycin resistant colonies are selected. Plasmid DNA is isolated and confirmed by restriction analysis.

[0913] Clones containing the desired constructs are grown overnight (O/N) in liquid culture in LB media supplemented with both Amp (100 ug/ml) and Kan (25 ug/ml). The O/N culture is used to inoculate a large culture at a ratio of 1:100 to 1:250. The cells are grown to an optical density 600 (O.D.⁶⁰⁰) of between 0.4 and 0.6. IPTG (Isopropyl-B-D-thiogalacto pyranoside) is then added to a final concentration of 1 mM. IPTG induces by inactivating the lacI repressor, clearing the P/O leading to increased gene expression.

[0914] Cells are grown for an extra 3 to 4 hours. Cells are then harvested by centrifugation (20 mins at 600 ×g). The cell pellet is solubilized in the chaotropic agent 6 Molar Guanidine HCl by stirring for 3-4 hours at 4° C. The cell debris is removed by centrifugation, and the supernatant containing the polypeptide is loaded onto a nickel-nitrilo-tri-acetic acid (“Ni—NTA”) affinity resin column (available from QIAGEN, Inc., supra). Proteins with a 6×His tag bind to the Ni—NTA resin with high affinity and can be purified in a simple one-step procedure (for details see: The QIAexpressionist (1995) QIAGEN, Inc., supra).

[0915] Briefly, the supernatant is loaded onto the column in 6 M guanidine-HCl, pH 8. The column is first washed with 10 volumes of 6 M guanidine-HCl, pH 8, then washed with 10 volumes of 6 M guanidine-HCl pH 6, and finally the polypeptide is eluted with 6 M guanidine-HCl, pH 5.

[0916] The purified protein is then renatured by dialyzing it against phosphate-buffered saline (PBS) or 50 mM Na-acetate, pH 6 buffer plus 200 mM NaCl. Alternatively, the protein can be successfully refolded while immobilized on the Ni—NTA column. The recommended conditions are as follows: renature using a linear 6M-1M urea gradient in 500 mM NaCl, 20% glycerol, 20 mM Tris/HCl pH 7.4, containing protease inhibitors. The renaturation should be performed over a period of 1.5 hours or more. After renaturation the proteins are eluted by the addition of 250 mM immidazole. Immidazole is removed by a final dialyzing step against PBS or 50 mM sodium acetate pH 6 buffer plus 200 mM NaCl. The purified protein is stored at 4° C. or frozen at −80° C.

[0917] In addition to the above expression vector, the present invention further includes an expression vector, called pHE4a (ATCC Accession Number 209645, deposited on Feb. 25, 1998) which contains phage operator and promoter elements operatively linked to a polynucleotide of the present invention, called pHE4a. (ATCC Accession Number 209645, deposited on Feb. 25, 1998.) This vector contains: 1) a neomycinphosphotransferase gene as a selection marker, 2) an E. coli origin of replication, 3) a T5 phage promoter sequence, 4) two lac operator sequences, 5) a Shine-Delgarno sequence, and 6) the lactose operon repressor gene (lacIq). The origin of replication (oriC) is derived from pUC19 (LTI, Gaithersburg, Md.). The promoter and operator sequences are made synthetically.

[0918] DNA can be inserted into the pHE4a by restricting the vector with NdeI and XbaI, BamHI, XhoI, or Asp718, running the restricted product on a gel, and isolating the larger fragment (the stuffer fragment should be about 310 base pairs). The DNA insert is generated according to the PCR protocol described in Example 1, using PCR primers having restriction sites for NdeI (5′ primer) and XbaI, BamHI, XhoI, or Asp718 (3′ primer). The PCR insert is gel purified and restricted with compatible enzymes. The insert and vector are ligated according to standard protocols.

[0919] The engineered vector could easily be substituted in the above protocol to express protein in a bacterial system.

### Example 6

[0920] Purification of a Polypeptide from an Inclusion Body

[0921] The following alternative method can be used to purify a polypeptide expressed in E coli when it is present in the form of inclusion bodies. Unless otherwise specified, all of the following steps are conducted at 4-10° C.

[0922] Upon completion of the production phase of the E. coli fermentation, the cell culture is cooled to 4-10° C. and the cells harvested by continuous centrifugation at 15,000 rpm (Heraeus Sepatech). On the basis of the expected yield of protein per unit weight of cell paste and the amount of purified protein required, an appropriate amount of cell paste, by weight, is suspended in a buffer solution containing 100 mM Tris, 50 mM EDTA, pH 7.4. The cells are dispersed to a homogeneous suspension using a high shear mixer.

[0923] The cells are then lysed by passing the solution through a microfluidizer (Microfuidics, Corp. or APV Gaulin, Inc.) twice at 4000-6000 psi. The homogenate is then mixed with NaCl solution to a final concentration of 0.5 M NaCl, followed by centrifugation at 7000×g for 15 min. The resultant pellet is washed again using 0.5M NaCl, 100 mM Tris, 50 mM EDTA, pH 7.4.

[0924] The resulting washed inclusion bodies are solubilized with 1.5 M guanidine hydrochloride (GuHCl) for 2-4 hours. After 7000 ×g centrifugation for 15 min., the pellet is discarded and the polypeptide containing supernatant is incubated at 4° C. overnight to allow further GuHCl extraction.

[0925] Following high speed centrifugation (30,000×g) to remove insoluble particles, the GuHCl solubilized protein is refolded by quickly mixing the GuHCl extract with 20 volumes of buffer containing 50 mM sodium, pH 4.5, 150 mM NaCl, 2 mM EDTA by vigorous stirring. The refolded diluted protein solution is kept at 4° C. without mixing for 12 hours prior to further purification steps.

[0926] To clarify the refolded polypeptide solution, a previously prepared tangential filtration unit equipped with 0.16 μm membrane filter with appropriate surface area (e.g., Filtron), equilibrated with 40 mM sodium acetate, pH 6.0 is employed. The filtered sample is loaded onto a cation exchange resin (e.g., Poros HS-50, Perseptive Biosystems). The column is washed with 40 mM sodium acetate, pH 6.0 and eluted with 250 mM, 500 mM, 1000 mM, and 1500 mM NaCl in the same buffer, in a stepwise manner. The absorbance at 280 nm of the effluent is continuously monitored. Fractions are collected and further analyzed by SDS-PAGE.

[0927] Fractions containing the polypeptide are then pooled and mixed with 4 volumes of water. The diluted sample is then loaded onto a previously prepared set of tandem columns of strong anion (Poros HQ-50, Perseptive Biosystems) and weak anion (Poros CM-20, Perseptive Biosystems) exchange resins. The columns are equilibrated with 40 mM sodium acetate, pH 6.0. Both columns are washed with 40 mM sodium acetate, pH 6.0, 200 mM NaCl. The CM-20 column is then eluted using a 10 column volume linear gradient ranging from 0.2 M NaCl, 50 mM sodium acetate, pH 6.0 to 1.0 M NaCl, 50 mM sodium acetate, pH 6.5. Fractions are collected under constant A₂₈₀ monitoring of the effluent. Fractions containing the polypeptide (determined, for instance, by 16% SDS-PAGE) are then pooled.

[0928] The resultant polypeptide should exhibit greater than 95% purity after the above refolding and purification steps. No major contaminant bands should be observed from Commassie blue stained 16% SDS-PAGE gel when 5 μg of purified protein is loaded. The purified protein can also be tested for endotoxin/LPS contamination, and typically the LPS content is less than 0.1 ng/ml according to LAL assays.

### Example 7

[0929] Cloning and Expression of a Polypeptide in a Baculovirus Expression System

[0930] In this example, the plasmid shuttle vector pA2 is used to insert a polynucleotide into a baculovirus to express a polypeptide. This expression vector contains the strong polyhedrin promoter of the Autographa californica nuclear polyhedrosis virus (AcMNPV) followed by convenient restriction sites such as BamHI, Xba I and Asp718. The polyadenylation site of the simian virus 40 (“SV40”) is used for efficient polyadenylation. For easy selection of recombinant virus, the plasmid contains the beta-galactosidase gene from E. coli under control of a weak Drosophila promoter in the same orientation, followed by the polyadenylation signal of the polyhedrin gene. The inserted genes are flanked on both sides by viral sequences for cell-mediated homologous recombination with wild-type viral DNA to generate a viable virus that express the cloned polynucleotide.

[0931] Many other baculovirus vectors can be used in place of the vector above, such as pAc373, pVL941, and pAcIM1, as one skilled in the art would readily appreciate, as long as the construct provides appropriately located signals for transcription, translation, secretion and the like, including a signal peptide and an in-frame AUG as required. Such vectors are described, for instance, in Luckow et al., Virology 170:31-39 (1989).

[0932] Specifically, the cDNA sequence contained in the deposited clone, including the AUG initiation codon, is amplified using the PCR protocol described in Example 1. If a naturally occurring signal sequence is used to produce the polypeptide of the present invention, the pA2 vector does not need a second signal peptide. Alternatively, the vector can be modified (pA2 GP) to include a baculovirus leader sequence, using the standard methods described in Summers et al., “A Manual of Methods for Baculovirus Vectors and Insect Cell Culture Procedures,” Texas Agricultural Experimental Station Bulletin No. 1555 (1987).

[0933] The amplified fragment is isolated from a 1% agarose gel using a commercially available kit (“Geneclean,” BIO 101 Inc., La Jolla, Calif.). The fragment then is digested with appropriate restriction enzymes and again purified on a 1% agarose gel.

[0934] The plasmid is digested with the corresponding restriction enzymes and optionally, can be dephosphorylated using calf intestinal phosphatase, using routine procedures known in the art. The DNA is then isolated from a 1% agarose gel using a commercially available kit (“Geneclean” BIO 101 Inc., La Jolla, Calif.).

[0935] The fragment and the dephosphorylated plasmid are ligated together with T4 DNA ligase. E. coli HB101 or other suitable E. coli hosts such as XL-1 Blue (Stratagene Cloning Systems, La Jolla, Calif.) cells are transformed with the ligation mixture and spread on culture plates. Bacteria containing the plasmid are identified by digesting DNA from individual colonies and analyzing the digestion product by gel electrophoresis. The sequence of the cloned fragment is confirmed by DNA sequencing.

[0936] Five μg of a plasmid containing the polynucleotide is co-transfected with 1.0 μg of a commercially available linearized baculovirus DNA (“BaculoGold™ baculovirus DNA, Pharmingen, San Diego, Calif.), using the lipofection method described by Felgner et al., Proc. Natl. Acad. Sci. USA 84:7413-7417 (1987). One μg of BaculoGold™ virus DNA and 5 μg of the plasmid are mixed in a sterile well of a microtiter plate containing 50 μl of serum-free Grace's medium (Life Technologies Inc., Gaithersburg, Md.). Afterwards, 10 μl Lipofectin plus 90 μl Grace's medium are added, mixed and incubated for 15 minutes at room temperature. Then the transfection mixture is added drop-wise to Sf9 insect cells (ATCC CRL 1711) seeded in a 35 mm tissue culture plate with 1 ml Grace's medium without serum. The plate is then incubated for 5 hours at 27° C. The transfection solution is then removed from the plate and 1 ml of Grace's insect medium supplemented with 10% fetal calf serum is added. Cultivation is then continued at 27° C. for four days.

[0937] After four days the supernatant is collected and a plaque assay is performed, as described by Summers and Smith, supra. An agarose gel with “Blue Gal” (Life Technologies Inc., Gaithersburg) is used to allow easy identification and isolation of gal-expressing clones, which produce blue-stained plaques. (A detailed description of a “plaque assay” of this type can also be found in the user's guide for insect cell culture and baculovirology distributed by Life Technologies Inc., Gaithersburg, page 9-10.) After appropriate incubation, blue stained plaques are picked with the tip of a micropipettor (e.g., Eppendorf). The agar containing the recombinant viruses is then resuspended in a microcentrifuge tube containing 200 μl of Grace's medium and the suspension containing the recombinant baculovirus is used to infect Sf9 cells seeded in 35 mm dishes. Four days later the supernatants of these culture dishes are harvested and then they are stored at 4° C.

[0938] To verify the expression of the polypeptide, Sf9 cells are grown in Grace's medium supplemented with 10% heat-inactivated FBS. The cells are infected with the recombinant baculovirus containing the polynucleotide at a multiplicity of infection (“MOI”) of about 2. If radiolabeled proteins are desired, 6 hours later the medium is removed and is replaced with SF900 II medium minus methionine and cysteine (available from Life Technologies Inc., Rockville, Md.). After 42 hours, 5 μCi of ³⁵S-methionine and 5 μCi ³⁵S-cysteine (available from Amersham) are added. The cells are further incubated for 16 hours and then are harvested by centrifugation. The proteins in the supernatant as well as the intracellular proteins are analyzed by SDS-PAGE followed by autoradiography (if radiolabeled).

[0939] Microsequencing of the amino acid sequence of the amino terminus of purified protein may be used to determine the amino terminal sequence of the produced protein.

### Example 8

[0940] Expression of a Polypeptide in Mammalian Cells

[0941] The polypeptide of the present invention can be expressed in a mammalian cell. A typical mammalian expression vector contains a promoter element, which mediates the initiation of transcription of mRNA, a protein coding sequence, and signals required for the termination of transcription and polyadenylation of the transcript. Additional elements include enhancers, Kozak sequences and intervening sequences flanked by donor and acceptor sites for RNA splicing. Highly efficient transcription is achieved with the early and late promoters from SV40, the long terminal repeats (LTRs) from Retroviruses, e.g., RSV, HTLVI, HIVI and the early promoter of the cytomegalovirus (CMV). However, cellular elements can also be used (e.g., the human actin promoter).

[0942] Suitable expression vectors for use in practicing the present invention include, for example, vectors such as pSVL and pMSG (Pharmacia, Uppsala, Sweden), pRSVcat (ATCC 37152), pSV2dhfr (ATCC 37146), pBC12MI (ATCC 67109), pCMVSport 2.0, and pCMVSport 3.0. Mammalian host cells that could be used include, human Hela, 293, H9 and Jurkat cells, mouse NIH3T3 and C127 cells, Cos 1, Cos 7 and CV1, quail QC1-3 cells, mouse L cells and Chinese hamster ovary (CHO) cells.

[0943] Alternatively, the polypeptide can be expressed in stable cell lines containing the polynucleotide integrated into a chromosome. The co-transfection with a selectable marker such as DHFR, gpt, neomycin, or hygromycin allows the identification and isolation of the transfected cells.

[0944] The transfected gene can also be amplified to express large amounts of the encoded protein. The DHFR (dihydrofolate reductase) marker is useful in developing cell lines that carry several hundred or even several thousand copies of the gene of interest. (See, e.g., Alt, F. W., et al., J. Biol. Chem. 253:1357-1370 (1978); Hamlin, J. L. and Ma, C., Biochem. et Biophys. Acta, 1097:107-143 (1990); Page, M. J. and Sydenham, M. A., Biotechnology 9:64-68 (1991)). Another useful selection marker is the enzyme glutamine synthase (GS) (Murphy et al., Biochem J. 227:277-279 (1991); Bebbington et al., Bio/Technology 10:169-175 (1992). Using these markers, the mammalian cells are grown in selective medium and the cells with the highest resistance are selected. These cell lines contain the amplified gene(s) integrated into a chromosome. Chinese hamster ovary (CHO) and NSO cells are often used for the production of proteins.

[0945] Derivatives of the plasmid pSV2-dhfr (ATCC Accession No. 37146), the expression vectors pC4 (ATCC Accession No. 209646) and pC6 (ATCC Accession No.209647) contain the strong promoter (LTR) of the Rous Sarcoma Virus (Cullen et al., Molecular and Cellular Biology, 438-447 (March, 1985)) plus a fragment of the CMV-enhancer (Boshart et al., Cell 41:521-530 (1985)). Multiple cloning sites, e.g., with the restriction enzyme cleavage sites BamHI, XbaI and Asp718, facilitate the cloning of the gene of interest. The vectors also contain the 3′ intron, the polyadenylation and termination signal of the rat preproinsulin gene, and the mouse DHFR gene under control of the SV40 early promoter.

[0946] Specifically, the plasmid pC6, for example, is digested with appropriate restriction enzymes and then dephosphorylated using calf intestinal phosphates by procedures known in the art. The vector is then isolated from a 1% agarose gel.

[0947] A polynucleotide of the present invention is amplified according to the protocol outlined in Example 1. If a naturally occurring signal sequence is used to produce the polypeptide of the present invention, the vector does not need a second signal peptide. Alternatively, if a naturally occurring signal sequence is not used, the vector can be modified to include a heterologous signal sequence. (See, e.g., International Publication No. WO 96/34891.)

[0948] The amplified fragment is isolated from a 1% agarose gel using a commercially available kit (“Geneclean,” BIO 101 Inc., La Jolla, Calif.). The fragment then is digested with appropriate restriction enzymes and again purified on a 1% agarose gel.

[0949] The amplified fragment is then digested with the same restriction enzyme and purified on a 1% agarose gel. The isolated fragment and the dephosphorylated vector are then ligated with T4 DNA ligase. E. coli HB101 or XL-1 Blue cells are then transformed and bacteria are identified that contain the fragment inserted into plasmid pC6 using, for instance, restriction enzyme analysis.

[0950] Chinese hamster ovary cells lacking an active DHFR gene is used for transfection. Five μg of the expression plasmid pC6 or pC4 is cotransfected with 0.5 μg of the plasmid pSVneo using lipofectin (Felgner et al., supra). The plasmid pSV2-neo contains a dominant selectable marker, the neo gene from Tn5 encoding an enzyme that confers resistance to a group of antibiotics including G418. The cells are seeded in alpha minus MEM supplemented with 1 mg/ml G418. After 2 days, the cells are trypsinized and seeded in hybridoma cloning plates (Greiner, Germany) in alpha minus MEM supplemented with 10, 25, or 50 ng/ml of methotrexate plus 1 mg/ml G418. After about 10-14 days single clones are trypsinized and then seeded in 6-well petri dishes or 10 ml flasks using different concentrations of methotrexate (50 nM, 100 nM, 200 nM, 400 nM, 800 nM). Clones growing at the highest concentrations of methotrexate are then transferred to new 6-well plates containing even higher concentrations of methotrexate (1 μM, 2 μM, 5 μM, 10 mM, 20 mM). The same procedure is repeated until clones are obtained which grow at a concentration of 100 -200 μM. Expression of the desired gene product is analyzed, for instance, by SDS-PAGE and Western blot or by reversed phase HPLC analysis.

### Example 9

[0951] Protein Fusions

[0952] The polypeptides of the present invention are preferably fused to other proteins. These fusion proteins can be used for a variety of applications. For example, fusion of the present polypeptides to His-tag, HA-tag, protein A, IgG domains, and maltose binding protein facilitates purification. (See Example 5; see also EP A 394,827; Traunecker, et al., Nature 331:84-86 (1988)). Similarly, fusion to IgG-1, IgG-3, and albumin increases the halflife time in vivo. Nuclear localization signals fused to the polypeptides of the present invention can target the protein to a specific subcellular localization, while covalent heterodimer or homodimers can increase or decrease the activity of a fusion protein. Fusion proteins can also create chimeric molecules having more than one function. Finally, fusion proteins can increase solubility and/or stability of the fused protein compared to the non-fused protein. All of the types of fusion proteins described above can be made by modifying the following protocol, which outlines the fusion of a polypeptide to an IgG molecule, or the protocol described in Example 5.

[0953] Briefly, the human Fc portion of the IgG molecule can be PCR amplified, using primers that span the 5′ and 3′ ends of the sequence described below. These primers also should have convenient restriction enzyme sites that will facilitate cloning into an expression vector, preferably a mammalian expression vector.

[0954] For example, if pC4 (ATCC Accession No. 209646) is used, the human Fc portion can be ligated into the BamHI cloning site. Note that the 3′ BamHI site should be destroyed. Next, the vector containing the human Fc portion is re-restricted with BamHI, linearizing the vector, and a polynucleotide of the present invention, isolated by the PCR protocol described in Example 1, is ligated into this BamHI site. Note that the polynucleotide is cloned without a stop codon, otherwise a fusion protein will not be produced.

[0955] If the naturally occurring signal sequence is used to produce the polypeptide of the present invention, pC4 does not need a second signal peptide. Alternatively, if the naturally occurring signal sequence is not used, the vector can be modified to include a heterologous signal sequence. (See, e.g., International Publication No. WO 96/34891.)

[0956] Human IgG Fc Region

| | |
|---|---|
| GGGATCCGGAGCCCAAATCTTCTGACAAAACTCACACATGCCCACCGTGCCCAG | (SEQ ID NO: 1) |
| CACCTGAATTCGAGGGTGCACCGTCAGTCTTCCTCTTCCCCCCAAAACCCAAGGA | |
| CACCCTCATGATCTCCCGGACTCCTGAGGTCACATGCGTGGTGGTGGACGTAAGC | |
| CACGAAGACCCTGAGGTCAAGTTCAACTGGTACGTGGACGGCGTGGAGGTGCAT | |
| AATGCCAAGACAAAGCCGCGGGAGGAGCAGTACAACAGCACGTACCGTGTGGTC | |
| AGCGTCCTCACCGTCCTGCACCAGGACTGGCTGAATGGCAAGGAGTACAAGTGC | |
| AAGGTCTCCAACAAAGCCCTCCCAACCCCCATCGAGAAAACCATCTCCAAAGCC | |
| AAAGGGCAGCCCCGAGAACCACAGGTGTACACCCTGCCCCCATCCCGGGATGAG | |
| CTGACCAAGAACCAGGTCAGCCTGACCTGCCTGGTCAAAGGCTTCTATCCAAGC | |
| GACATCGCCGTGGAGTGGGAGAGCAATGGGCAGCCGGAGAACAACTACAAGAC | |
| CACGCCTCCCGTGCTGGACTCCGACGGCTCCTTCTTCCTCTACAGCAAGCTCACC | |
| GTGGACAAGAGCAGGTGGCAGCAGGGGAACGTCTTCTCATGCTCCGTGATGCAT | |
| GAGGCTCTGCACAACCACTACACGCAGAAGAGCCTCTCCCTGTCTCCGGGTAAAT | |
| GAGTGCGACGGCCGCGACTCTAGAGGAT | |

### Example 10

[0957] Production of an Antibody from a Polypeptide

[0958] a) Hybridoma Technology

[0959] The antibodies of the present invention can be prepared by a variety of methods. (See, Current Protocols, Chapter 2.) As one example of such methods, cells expressing a polypeptide of the present invention are administered to an animal to induce the production of sera containing polyclonal antibodies. In a preferred method, a preparation of a a polypeptide of the present invention is prepared and purified to render it substantially free of natural contaminants. Such a preparation is then introduced into an animal in order to produce polyclonal antisera of greater specific activity.

[0960] Monoclonal antibodies specific for a polypeptide of the present invention are prepared using hybridoma technology (Kohler et al., Nature 256:495 (1975); Kohler et al., Eur. J. Immunol. 6:511 (1976); Kohler et al., Eur. J. Immunol. 6:292 (1976); Hammerling et al., in: Monoclonal Antibodies and T-Cell Hybridomas, Elsevier, N.Y., pp. 563-681 (1981)). In general, an animal (preferably a mouse) is immunized with a polypeptide of the present invention or, more preferably, with a secreted polypeptide of the present invention-expressing cell. Such polypeptide-expressing cells are cultured in any suitable tissue culture medium, preferably in Earle's modified Eagle's medium supplemented with 10% fetal bovine serum (inactivated at about 56° C.), and supplemented with about 10 g/l of nonessential amino acids, about 1,000 U/ml of penicillin, and about 100 μg/ml of streptomycin.

[0961] The splenocytes of such mice are extracted and fused with a suitable myeloma cell line. Any suitable myeloma cell line may be employed in accordance with the present invention; however, it is preferable to employ the parent myeloma cell line (SP20), available from the ATCC. After fusion, the resulting hybridoma cells are selectively maintained in HAT medium, and then cloned by limiting dilution as described by Wands et al. (Gastroenterology 80:225-232 (1981)). The hybridoma cells obtained through such a selection are then assayed to identify clones which secrete antibodies capable of binding the polypeptide of the present invention.

[0962] Alternatively, additional antibodies capable of binding to polypeptide of the present invention can be produced in a two-step procedure using anti-idiotypic antibodies. Such a method makes use of the fact that antibodies are themselves antigens, and therefore, it is possible to obtain an antibody which binds to a second antibody. In accordance with this method, protein specific antibodies are used to immunize an animal, preferably a mouse. The splenocytes of such an animal are then used to produce hybridoma cells, and the hybridoma cells are screened to identify clones which produce an antibody whose ability to bind to the polypeptide of the present invention-specific antibody can be blocked by polypeptide of the present invention. Such antibodies comprise anti-idiotypic antibodies to the polypeptide of the present invention-specific antibody and are used to immunize an animal to induce formation of further polypeptide of the present invention-specific antibodies.

[0963] For in vivo use of antibodies in humans, an antibody is “humanized”. Such antibodies can be produced using genetic constructs derived from hybridoma cells producing the monoclonal antibodies described above. Methods for producing chimeric and humanized antibodies are known in the art and are discussed herein. (See, for review, Morrison, Science 229:1202 (1985); Oi et al., BioTechniques 4:214 (1986); Cabilly et al., U.S. Pat. No. 4,816,567; Taniguchi et al., EP 171496; Morrison et al., EP 173494; Neuberger et al., WO 8601533; Robinson et al., International Publication No. WO 8702671; Boulianne et al., Nature 312:643 (1984); Neuberger et al., Nature 314:268 (1985)).

[0964] b) Isolation of Antibody Fragments Directed Against Polypeptide of the Present Invention From a Library of scFvs

[0965] Naturally occurring V-genes isolated from human PBLs are constructed into a library of antibody fragments which contain reactivities against polypeptide of the present invention to which the donor may or may not have been exposed (see e.g., U.S. Pat. No. 5,885,793 incorporated herein by reference in its entirety).

[0966] Rescue of the Library. A library of scFvs is constructed from the RNA of human PBLs as described in International Publication No. WO 92/01047. To rescue phage displaying antibody fragments, approximately 10⁹ E. coli harboring the phagemid are used to inoculate 50 ml of 2xTY containing 1% glucose and 100 μg/ml of ampicillin (2xTY-AMP-GLU) and grown to an O.D. of 0.8 with shaking. Five ml of this culture is used to inoculate 50 ml of 2xTY-AMP-GLU, 2×108 TU of delta gene 3 helper (M13 delta gene III, see International Publication No. WO 92/01047) are added and the culture incubated at 37° C. for 45 minutes without shaking and then at 37° C. for 45 minutes with shaking. The culture is centrifuged at 4000 r.p.m. for 10 min. and the pellet resuspended in 2 liters of 2xTY containing 100 μg/ml ampicillin and 50 ug/ml kanamycin and grown overnight. Phage are prepared as described in International Publication No. WO 92/01047.

[0967] M13 delta gene III is prepared as follows: M13 delta gene III helper phage does not encode gene III protein, hence the phage(mid) displaying antibody fragments have a greater avidity of binding to antigen. Infectious M13 delta gene III particles are made by growing the helper phage in cells harboring a pUC19 derivative supplying the wild type gene III protein during phage morphogenesis. The culture is incubated for 1 hour at 37° C. without shaking and then for a further hour at 37° C. with shaking. Cells are spun down (IEC-Centra 8,400 r.p.m. for 10 min), resuspended in 300 ml 2xTY broth containing 100 μg ampicillin/ml and 25 μg kanamycin/ml (2xTY-AMP-KAN) and grown overnight, shaking at 37° C. Phage particles are purified and concentrated from the culture medium by two PEG-precipitations (Sambrook et al., 1990), resuspended in 2 ml PBS and passed through a 0.45 μm filter (Minisart NML; Sartorius) to give a final concentration of approximately 10¹³ transducing units/ml (ampicillin-resistant clones).

[0968] Panning of the Library. Immunotubes (Nunc) are coated overnight in PBS with 4 ml of either 100 μg/ml or 10 μg/ml of a polypeptide of the present invention. Tubes are blocked with 2% Marvel-PBS for 2 hours at 37° C. and then washed 3 times in PBS. Approximately 10¹³ TU of phage is applied to the tube and incubated for 30 minutes at room temperature tumbling on an over and under turntable and then left to stand for another 1.5 hours. Tubes are washed 10 times with PBS 0.1% Tween-20 and 10 times with PBS. Phage are eluted by adding 1 ml of 100 mM triethylamine and rotating 15 minutes on an under and over turntable after which the solution is immediately neutralized with 0.5 ml of 1.0M Tris-HCl, pH 7.4. Phage are then used to infect 10 ml of mid-log E. coli TG1 by incubating eluted phage with bacteria for 30 minutes at 37° C. The E. coli are then plated on TYE plates containing 1% glucose and 100 μg/ml ampicillin. The resulting bacterial library is then rescued with delta gene 3 helper phage as described above to prepare phage for a subsequent round of selection. This process is then repeated for a total of 4 rounds of affinity purification with tube-washing increased to 20 times with PBS, 0.1% Tween-20 and 20 times with PBS for rounds 3 and 4.

[0969] Characterization of Binders. Eluted phage from the 3rd and 4th rounds of selection are used to infect E. coli HB 2151 and soluble scFv is produced (Marks, et al., 1991) from single colonies for assay. ELISAs are performed with microtitre plates coated with either 10 pg/ml of the polypeptide of the present invention in 50 mM bicarbonate pH 9.6. Clones positive in ELISA are further characterized by PCR fingerprinting (see, e.g., International Publication No. WO 92/01047) and then by sequencing. These ELISA positive clones may also be further characterized by techniques known in the art, such as, for example, epitope mapping, binding affinity, receptor signal transduction, ability to block or competitively inhibit antibody/antigen binding, and competitive agonistic or antagonistic activity.

### Example 11

[0970] Method of Determining Alterations in a Gene Corresponding to a Polynucleotide

[0971] RNA isolated from entire families or individual patients presenting with a phenotype of interest (such as a disease) is isolated. cDNA is then generated from these RNA samples using protocols known in the art. (See, Sambrook.) The cDNA is then used as a template for PCR, employing primers surrounding regions of interest in SEQ ID NO:X; and/or the nucleotide sequence of the cDNA contained in Clone ID NO:Z. Suggested PCR conditions consist of 35 cycles at 95 degrees C. for 30 seconds; 60-120 seconds at 52-58 degrees C.; and 60-120 seconds at 70 degrees C., using buffer solutions described in Sidransky et al., Science 252:706 (1991).

[0972] PCR products are then sequenced using primers labeled at their 5′ end with T4 polynucleotide kinase, employing SequiTherm Polymerase (Epicentre Technologies). The intron-exon boundaries of selected exons is also determined and genomic PCR products analyzed to confirm the results. PCR products harboring suspected mutations are then cloned and sequenced to validate the results of the direct sequencing.

[0973] PCR products are cloned into T-tailed vectors as described in Holton et al., Nucleic Acids Research, 19:1156 (1991) and sequenced with T7 polymerase (United States Biochemical). Affected individuals are identified by mutations not present in unaffected individuals.

[0974] Genomic rearrangements are also observed as a method of determining alterations in a gene corresponding to a polynucleotide. Genomic clones isolated according to Example 2 are nick-translated with digoxigenindeoxy-uridine 5′-triphosphate (Boehringer Manheim), and FISH performed as described in Johnson et al., Methods Cell Biol. 35:73-99 (1991). Hybridization with the labeled probe is carried out using a vast excess of human cot-1 DNA for specific hybridization to the corresponding genomic locus.

[0975] Chromosomes are counterstained with 4,6-diamino-2-phenylidole and propidium iodide, producing a combination of C- and R-bands. Aligned images for precise mapping are obtained using a triple-band filter set (Chroma Technology, Brattleboro, Vt.) in combination with a cooled charge-coupled device camera (Photometrics, Tucson, Ariz.) and variable excitation wavelength filters. (Johnson et al., Genet. Anal. Tech. Appl., 8:75 (1991)). Image collection, analysis and chromosomal fractional length measurements are performed using the ISee Graphical Program System. (Inovision Corporation, Durham, N.C.). Chromosome alterations of the genomic region hybridized by the probe are identified as insertions, deletions, and translocations. These alterations are used as a diagnostic marker for an associated disease.

### Example 12

[0976] Method of Detecting Abnormal Levels of a Polypeptide in a Biological Sample

[0977] A polypeptide of the present invention can be detected in a biological sample, and if an increased or decreased level of the polypeptide is detected, this polypeptide is a marker for a particular phenotype. Methods of detection are numerous, and thus, it is understood that one skilled in the art can modify the following assay to fit their particular needs.

[0978] For example, antibody-sandwich ELISAs are used to detect polypeptides in a sample, preferably a biological sample. Wells of a microtiter plate are coated with specific antibodies, at a final concentration of 0.2 to 10 ug/ml. The antibodies are either monoclonal or polyclonal and are produced by the method described in Example 10. The wells are blocked so that non-specific binding of the polypeptide to the well is reduced.

[0979] The coated wells are then incubated for >2 hours at RT with a sample containing the polypeptide. Preferably, serial dilutions of the sample should be used to validate results. The plates are then washed three times with deionized or distilled water to remove unbound polypeptide.

[0980] Next, 50 ul of specific antibody-alkaline phosphatase conjugate, at a concentration of 25-400 ng, is added and incubated for 2 hours at room temperature. The plates are again washed three times with deionized or distilled water to remove unbound conjugate.

[0981] Add 75 ul of 4-methylumbelliferyl phosphate (MUP) or p-nitrophenyl phosphate (NPP) substrate solution to each well and incubate 1 hour at room temperature. Measure the reaction by a microtiter plate reader. Prepare a standard curve, using serial dilutions of a control sample, and plot polypeptide concentration on the X-axis (log scale) and fluorescence or absorbance of the Y-axis (linear scale). Interpolate the concentration of the polypeptide in the sample using the standard curve.

### Example 13

[0982] Formulation

[0983] The invention also provides methods of treatment and/or prevention of diseases or disorders (such as, for example, any one or more of the diseases or disorders disclosed herein) by administration to a subject of an effective amount of a Therapeutic. By therapeutic is meant polynucleotides or polypeptides of the invention (including fragments and variants), agonists or antagonists thereof, and/or antibodies thereto, in combination with a pharmaceutically acceptable carrier type (e.g., a sterile carrier).

[0984] The Therapeutic will be formulated and dosed in a fashion consistent with good medical practice, taking into account the clinical condition of the individual patient (especially the side effects of treatment with the Therapeutic alone), the site of delivery, the method of administration, the scheduling of administration, and other factors known to practitioners. The “effective amount” for purposes herein is thus determined by such considerations.

[0985] As a general proposition, the total pharmaceutically effective amount of the Therapeutic administered parenterally per dose will be in the range of about 1 ug/kg/day to 10 mg/kg/day of patient body weight, although, as noted above, this will be subject to therapeutic discretion. More preferably, this dose is at least 0.01 mg/kg/day, and most preferably for humans between about 0.01 and 1 mg/kg/day for the hormone. If given continuously, the Therapeutic is typically administered at a dose rate of about 1 ug/kg/hour to about 50 ug/kg/hour, either by 1-4 injections per day or by continuous subcutaneous infusions, for example, using a mini-pump. An intravenous bag solution may also be employed. The length of treatment needed to observe changes and the interval following treatment for responses to occur appears to vary depending on the desired effect.

[0986] Therapeutics can be are administered orally, rectally, parenterally, intracistemally, intravaginally, intraperitoneally, topically (as by powders, ointments, gels, drops or transdermal patch), bucally, or as an oral or nasal spray. “Pharmaceutically acceptable carrier” refers to a non-toxic solid, semisolid or liquid filler, diluent, encapsulating material or formulation auxiliary of any. The term “parenteral” as used herein refers to modes of administration which include intravenous, intramuscular, intraperitoneal, intrasternal, subcutaneous and intraarticular injection and infusion.

[0987] Therapeutics of the invention are also suitably administered by sustained-release systems. Suitable examples of sustained-release Therapeutics are administered orally, rectally, parenterally, intracistemally, intravaginally, intraperitoneally, topically (as by powders, ointments, gels, drops or transdermal patch), bucally, or as an oral or nasal spray. “Pharmaceutically acceptable carrier” refers to a non-toxic solid, semisolid or liquid filler, diluent, encapsulating material or formulation auxiliary of any type. The term “parenteral” as used herein refers to modes of administration which include intravenous, intramuscular, intraperitoneal, intrasternal, subcutaneous and intraarticular injection and infusion.

[0988] Therapeutics of the invention are also suitably administered by sustained-release systems. Suitable examples of sustained-release Therapeutics include suitable polymeric materials (such as, for example, semi-permeable polymer matrices in the form of shaped articles, e.g., films, or mirocapsules), suitable hydrophobic materials (for example as an emulsion in an acceptable oil) or ion exchange resins, and sparingly soluble derivatives (such as, for example, a sparingly soluble salt).

[0989] Sustained-release matrices include polylactides (U.S. Pat. No. 3,773,919, EP 58,481), copolymers of L-glutamic acid and gamma-ethyl-L-glutamate (Sidman et al., Biopolymers 22:547-556 (1983)), poly (2-hydroxyethyl methacrylate) (Langer et al., J. Biomed. Mater. Res. 15:167-277 (1981), and Langer, Chem. Tech. 12:98-105 (1982)), ethylene vinyl acetate (Langer et al., Id.) or poly-D-(−)-3-hydroxybutyric acid (EP 133,988).

[0990] Sustained-release Therapeutics also include liposomally entrapped Therapeutics of the invention (see generally, Langer, Science 249:1527-1533 (1990); Treat et al., in Liposomes in the Therapy of Infectious Disease and Cancer, Lopez-Berestein and Fidler (eds.), Liss, New York, pp. 317-327 and 353-365 (1989)). Liposomes containing the Therapeutic are prepared by methods known per se: DE 3,218,121; Epstein et al., Proc. Natl. Acad. Sci. (USA) 82:3688-3692 (1985); Hwang et al., Proc. Natl. Acad. Sci.(USA) 77:4030-4034 (1980); EP 52,322; EP 36,676; EP 88,046; EP 143,949; EP 142,641; Japanese Pat. Appl. 83-118008; U.S. Pat. Nos. 4,485,045 and 4,544,545; and EP 102,324. Ordinarily, the liposomes are of the small (about 200-800 Angstroms) unilamellar type in which the lipid content is greater than about 30 mol. percent cholesterol, the selected proportion being adjusted for the optimal Therapeutic.

[0991] In yet an additional embodiment, the Therapeutics of the invention are delivered by way of a pump (see Langer, supra; Sefton, CRC Crit. Ref. Biomed. Eng. 14:201 (1987); Buchwald et al., Surgery 88:507 (1980); Saudek et al., N. Engl. J. Med. 321:574 (1989)).

[0992] Other controlled release systems are discussed in the review by Langer (Science 249:1527-1533 (1990)).

[0993] For parenteral administration, in one embodiment, the Therapeutic is formulated generally by mixing it at the desired degree of purity, in a unit dosage injectable form (solution, suspension, or emulsion), with a pharmaceutically acceptable carrier, i.e., one that is non-toxic to recipients at the dosages and concentrations employed and is compatible with other ingredients of the formulation. For example, the formulation preferably does not include oxidizing agents and other compounds that are known to be deleterious to the Therapeutic.

[0994] Generally, the formulations are prepared by contacting the Therapeutic uniformly and intimately with liquid carriers or finely divided solid carriers or both. Then, if necessary, the product is shaped into the desired formulation. Preferably the carrier is a parenteral carrier, more preferably a solution that is isotonic with the blood of the recipient. Examples of such carrier vehicles include water, saline, Ringer's solution, and dextrose solution. Non-aqueous vehicles such as fixed oils and ethyl oleate are also useful herein, as well as liposomes.

[0995] The carrier suitably contains minor amounts of additives such as substances that enhance isotonicity and chemical stability. Such materials are non-toxic to recipients at the dosages and concentrations employed, and include buffers such as phosphate, citrate, succinate, acetic acid, and other organic acids or their salts; antioxidants such as ascorbic acid; low molecular weight (less than about ten residues) polypeptides, e.g., polyarginine or tripeptides; proteins, such as serum albumin, gelatin, or immunoglobulins; hydrophilic polymers such as polyvinylpyrrolidone; amino acids, such as glycine, glutamic acid, aspartic acid, or arginine; monosaccharides, disaccharides, and other carbohydrates including cellulose or its derivatives, glucose, manose, or dextrins; chelating agents such as EDTA; sugar alcohols such as mannitol or sorbitol; counterions such as sodium; and/or nonionic surfactants such as polysorbates, poloxamers, or PEG.

[0996] The Therapeutic is typically formulated in such vehicles at a concentration of about 0.1 mg/ml to 100 mg/ml, preferably 1-10 mg/ml, at a pH of about 3 to 8. It will be understood that the use of certain of the foregoing excipients, carriers, or stabilizers will result in the formation of polypeptide salts.

[0997] Any pharmaceutical used for therapeutic administration can be sterile. Sterility is readily accomplished by filtration through sterile filtration membranes (e.g., 0.2 micron membranes). Therapeutics generally are placed into a container having a sterile access port, for example, an intravenous solution bag or vial having a stopper pierceable by a hypodermic injection needle.

[0998] Therapeutics ordinarily will be stored in unit or multi-dose containers, for example, sealed ampoules or vials, as an aqueous solution or as a lyophilized formulation for reconstitution. As an example of a lyophilized formulation, 10-ml vials are filled with 5 ml of sterile-filtered 1% (w/v) aqueous Therapeutic solution, and the resulting mixture is lyophilized. The infusion solution is prepared by reconstituting the lyophilized Therapeutic using bacteriostatic Water-for-Injection.

[0999] The invention also provides a pharmaceutical pack or kit comprising one or more containers filled with one or more of the ingredients of the Therapeutics of the invention. Associated with such container(s) can be a notice in the form prescribed by a governmental agency regulating the manufacture, use or sale of pharmaceuticals or biological products, which notice reflects approval by the agency of manufacture, use or sale for human administration. In addition, the Therapeutics may be employed in conjunction with other therapeutic compounds.

[1000] The Therapeutics of the invention may be administered alone or in combination with adjuvants. Adjuvants that may be administered with the Therapeutics of the invention include, but are not limited to, alum, alum plus deoxycholate (ImmunoAg), MTP-PE (Biocine Corp.), QS21 (Genentech, Inc.), BCG (e.g., THERACYS®), MPL and nonviable prepartions of Corynebacterium parvum. In a specific embodiment, Therapeutics of the invention are administered in combination with alum. In another specific embodiment, Therapeutics of the invention are administered in combination with QS-21. Further adjuvants that may be administered with the Therapeutics of the invention include, but are not limited to, Monophosphoryl lipid immunomodulator, AdjuVax 100a, QS-21, QS-18, CRL1005, Aluminum salts, MF-59, and Virosomal adjuvant technology. Vaccines that may be administered with the Therapeutics of the invention include, but are not limited to, vaccines directed toward protection against MMR (measles, mumps, rubella), polio, varicella, tetanus/diptheria, hepatitis A, hepatitis B, haemophilus influenzae B, whooping cough, pneumonia, influenza, Lyme's Disease, rotavirus, cholera, yellow fever, Japanese encephalitis, poliomyelitis, rabies, typhoid fever, and pertussis. Combinations may be administered either concomitantly, e.g., as an admixture, separately but simultaneously or concurrently; or sequentially. This includes presentations in which the combined agents are administered together as a therapeutic mixture, and also procedures in which the combined agents are administered separately but simultaneously, e.g., as through separate intravenous lines into the same individual. Administration “in combination” further includes the separate administration of one of the compounds or agents given first, followed by the second.

[1001] The Therapeutics of the invention may be administered alone or in combination with other therapeutic agents. Therapeutic agents that may be administered in combination with the Therapeutics of the invention, include but not limited to, chemotherapeutic agents, antibiotics, steroidal and non-steroidal anti-inflammatories, conventional immunotherapeutic agents, and/or therapeutic treatments described below. Combinations may be administered either concomitantly, e.g., as an admixture, separately but simultaneously or concurrently; or sequentially. This includes presentations in which the combined agents are administered together as a therapeutic mixture, and also procedures in which the combined agents are administered separately but simultaneously, e.g., as through separate intravenous lines into the same individual. Administration “in combination” further includes the separate administration of one of the compounds or agents given first, followed by the second.

[1002] In certain embodiments, Therapeutics of the invention are administered in combination with antiretroviral agents, nucleoside/nucleotide reverse transcriptase inhibitors (NRTIs), non-nucleoside reverse transcriptase inhibitors (NNRTIs), and/or protease inhibitors (PIs). NRTIs that may be administered in combination with the Therapeutics of the invention, include, but are not limited to, RETROVIR™ (zidovudine/AZT), VIDEX™ (didanosine/ddI), HIVID™ (zalcitabine/ddC), ZERIT™ (stavudine/d4T), EPIVIR™ (lamivudine/3TC), and COMBIVIR™ (zidovudine/lamivudine). NNRTIs that may be administered in combination with the Therapeutics of the invention, include, but are not limited to, VIRAMUNE™ (nevirapine), RESCRIPTOR™ (delavirdine), and SUSTIVA™ (efavirenz). Protease inhibitors that may be administered in combination with the Therapeutics of the invention, include, but are not limited to, CRIXIVAN™ (indinavir), NORVIR™ (ritonavir), INVIRASE™ (saquinavir), and VIRACEPT™ (nelfinavir). In a specific embodiment, antiretroviral agents, nucleoside reverse transcriptase inhibitors, non-nucleoside reverse transcriptase inhibitors, and/or protease inhibitors may be used in any combination with Therapeutics of the invention to treat AIDS and/or to prevent or treat HIV infection.

[1003] Additional NRTIs include LODENOSINE™ (F-ddA; an acid-stable adenosine NRTI; Triangle/Abbott; COVIRACIL™ (emtricitabine/FTC; structurally related to lamivudine (3TC) but with 3- to 10-fold greater activity in vitro; Triangle/Abbott); dOTC (BCH-10652, also structurally related to lamivudine but retains activity against a substantial proportion of lamivudine-resistant isolates; Biochem Pharma); Adefovir (refused approval for anti-HIV therapy by FDA; Gilead Sciences); PREVEON® (Adefovir Dipivoxil, the active prodrug of adefovir; its active form is PMEA-pp); TENOFOVIR™ (bis-POC PMPA, a PMPA prodrug; Gilead); DAPD/DXG (active metabolite of DAPD; Triangle/Abbott); D-D4FC (related to 3TC, with activity against AZT/3TC-resistant virus); GW420867X (Glaxo Wellcome); ZIAGEN™ (abacavir/159U89; Glaxo Wellcome Inc.); CS-87 (3′azido-2′,3′-dideoxyuridine; WO 99/66936); and S-acyl-2-thioethyl (SATE)-bearing prodrug forms of β-L-FD4C and β-L-FddC (WO 98/17281).

[1004] Additional NNRTIs include COACTINON™ (Emivirine/MKC-442, potent NNRTI of the HEPT class; Triangle/Abbott); CAPRAVIRINE™ (AG-1549/S-1153, a next generation NNRTI with activity against viruses containing the K103N mutation; Agouron); PNU-142721 (has 20- to 50-fold greater activity than its predecessor delavirdine and is active against K103N mutants; Pharmacia & Upjohn); DPC-961 and DPC-963 (second-generation derivatives of efavirenz, designed to be active against viruses with the K103N mutation; DuPont); GW-420867X (has 25-fold greater activity than HBY097 and is active against K103N mutants; Glaxo Wellcome); CALANOLIDE A (naturally occurring agent from the latex tree; active against viruses containing either or both the Y181C and K103N mutations); and Propolis (WO 99/49830).

[1005] Additional protease inhibitors include LOPINAVIR™ (ABT378/r; Abbott Laboratories); BMS-232632 (an azapeptide; Bristol-Myres Squibb); TIPRANAVIR™(PNU-140690, a non-peptic dihydropyrone; Pharmacia & Upjohn); PD-178390 (a nonpeptidic dihydropyrone; Parke-Davis); BMS 232632 (an azapeptide; Bristol-Myers Squibb); L-756,423 (an indinavir analog; Merck); DMP-450 (a cyclic urea compound; Avid & DuPont); AG-1776 (a peptidomimetic with in vitro activity against protease inhibitor-resistant viruses; Agouron); VX-175/GW-433908 (phosphate prodrug of amprenavir; Vertex & Glaxo Welcome); CGP61755 (Ciba); and AGENERASE™ (amprenavir; Glaxo Wellcome Inc.).

[1006] Additional antiretroviral agents include fusion inhibitors/gp41 binders. Fusion inhibitors/gp41 binders include T-20 (a peptide from residues 643-678 of the HIV gp41 transmembrane protein ectodomain which binds to gp41 in its resting state and prevents transformation to the fusogenic state; Trimeris) and T-1249 (a second-generation fusion inhibitor; Trimeris).

[1007] Additional antiretroviral agents include fusion inhibitors/chemokine receptor antagonists. Fusion inhibitors/chemokine receptor antagonists include CXCR4 antagonists such as AMD 3100 (a bicyclam), SDF-1 and its analogs, and ALX40-4C (a cationic peptide), T22 (an 18 amino acid peptide; Trimeris) and the T22 analogs T134 and T140; CCR5 antagonists such as RANTES (9-68), AOP-RANTES, NNY-RANTES, and TAK-779; and CCR5/CXCR4 antagonists such as NSC 651016 (a distamycin analog). Also included are CCR2B, CCR3, and CCR6 antagonists. Chemokine recpetor agonists such as RANTES, SDF-1, MIP-1α, MIP-1β, etc., may also inhibit fusion.

[1008] Additional antiretroviral agents include integrase inhibitors. Integrase inhibitors include dicaffeoylquinic (DFQA) acids; L-chicoric acid (a dicaffeoyltartaric (DCTA) acid); quinalizarin (QLC) and related anthraquinones; ZINTEVIR™ (AR 177, an oligonucleotide that probably acts at cell surface rather than being a true integrase inhibitor; Arondex); and naphthols such as those disclosed in WO 98/50347.

[1009] Additional antiretroviral agents include hydroxyurea-like compounds such as BCX-34 (a purine nucleoside phosphorylase inhibitor; Biocryst); ribonucleotide reductase inhibitors such as DIDOX™ (Molecules for Health); inosine monophosphate dehydrogenase (IMPDH) inhibitors sucha as VX-497 (Vertex); and mycopholic acids such as CellCept (mycophenolate mofetil; Roche).

[1010] Additional antiretroviral agents include inhibitors of viral integrase, inhibitors of viral genome nuclear translocation such as arylene bis(methylketone) compounds; inhibitors of HIV entry such as AOP-RANTES, NNY-RANTES, RANTES-IgG fusion protein, soluble complexes of RANTES and glycosaminoglycans (GAG), and AMD-3100; nucleocapsid zinc finger inhibitors such as dithiane compounds; targets of HIV Tat and Rev; and pharmacoenhancers such as ABT-378.

[1011] Other antiretroviral therapies and adjunct therapies include cytokines and lymphokines such as MIP-1α, MIP-1β, SDF-1α, IL-2, PROLEUKIN™ (aldesleukin/L2-7001; Chiron), IL-4, IL-10, IL-12, and IL-13; interferons such as IFN-α2a; antagonists of TNFs, NFκB, GM-CSF, M-CSF, and IL-10; agents that modulate immune activation such as cyclosporin and prednisone; vaccines such as Remune™ (HIV Immunogen), APL 400-003 (Apollon), recombinant gp120 and fragments, bivalent (B/E) recombinant envelope glycoprotein, rgp120CM235, MN rgp120, SF-2 rgp120, gp120/soluble CD4 complex, Delta JR-FL protein, branched synthetic peptide derived from discontinuous gp120 C3/C4 domain, fusion-competent immunogens, and Gag, Pol, Nef, and Tat vaccines; gene-based therapies such as genetic suppressor elements (GSEs; WO 98/54366), and intrakines (genetically modified CC chemokines targetted to the ER to block surface expression of newly synthesized CCR5 (Yang et al., PNAS 94:11567-72 (1997); Chen et al., Nat. Med. 3:1110-16 (1997)); antibodies such as the anti-CXCR4 antibody 12G5, the anti-CCR5 antibodies 2D7, 5C7, PA8, PA9, PA10, PA11, PA12, and PA14, the anti-CD4 antibodies Q4120 and RPA-T4, the anti-CCR3 antibody 7B11, the anti-gp120 antibodies 17b, 48d, 447-52D, 257-D, 268-D and 50.1, anti-Tat antibodies, anti-TNF-a antibodies, and monoclonal antibody 33A; aryl hydrocarbon (AH) receptor agonists and antagonists such as TCDD, 3,3′,4,4′,5-pentachlorobiphenyl, 3,3′,4,4′-tetrachlorobiphenyl, and α-naphthoflavone (WO 98/30213); and antioxidants such as γ-L-glutamyl-L-cysteine ethyl ester (γ-GCE; WO 99/56764).

[1012] In a further embodiment, the Therapeutics of the invention are administered in combination with an antiviral agent. Antiviral agents that may be administered with the Therapeutics of the invention include, but are not limited to, acyclovir, ribavirin, amantadine, and remantidine.

[1013] In other embodiments, Therapeutics of the invention may be administered in combination with anti-opportunistic infection agents. Anti-opportunistic agents that may be administered in combination with the Therapeutics of the invention, include, but are not limited to, TRIMETHOPRIM-SULFAMETHOXAZOLE™, DAPSONE™, PENTAMIDINE™, ATOVAQUONE™, ISONIAZID™, RIFAMPIN™, PYRAZINAMIDE™, ETHAMBUTOL™, RIFABUTIN™, CLARITHROMYCIN™, AZITHROMYCIN™, GANCICLOVIR™, FOSCARNET™, CIDOFOVIR™, FLUCONAZOLE™, ITRACONAZOLE™, KETOCONAZOLE™, ACYCLOVIR™, FAMCICOLVIR™, PYRIMETHAMINE™, LEUCOVORIN™, NEUPOGEN™ (filgrastim/G-CSF), and LEUKINE™ (sargramostim/GM-CSF). In a specific embodiment, Therapeutics of the invention are used in any combination with TRIMETHOPRIM-SULFAMETHOXAZOLE™, DAPSONE™, PENTAMIDINE™, and/or ATOVAQUONE™ to prophylactically treat or prevent an opportunistic Pneumocystis carinii pneumonia infection. In another specific embodiment, Therapeutics of the invention are used in any combination with ISONIAZID™, RIFAMPIN™, PYRAZINAMIDE™, and/or ETHAMBUTOL™ to prophylactically treat or prevent an opportunistic Mycobacterium avium complex infection. In another specific embodiment, Therapeutics of the invention are used in any combination with RIFABUTIN™, CLARITHROMYCIN™, and/or AZITHROMYCIN™ to prophylactically treat or prevent an opportunistic Mycobacterium tuberculosis infection. In another specific embodiment, Therapeutics of the invention are used in any combination with GANCICLOVIR™, FOSCARNET™, and/or CIDOFOVIR™ to prophylactically treat or prevent an opportunistic cytomegalovirus infection. In another specific embodiment, Therapeutics of the invention are used in any combination with FLUCONAZOLE™, ITRACONAZOLE™, and/or KETOCONAZOLE™ to prophylactically treat or prevent an opportunistic fungal infection. In another specific embodiment, Therapeutics of the invention are used in any combination with ACYCLOVIR™ and/or FAMCICOLVIR™ to prophylactically treat or prevent an opportunistic herpes simplex virus type I and/or type II infection. In another specific embodiment, Therapeutics of the invention are used in any combination with PYRIMETHAMINE™ and/or LEUCOVORIN™ to prophylactically treat or prevent an opportunistic Toxoplasma gondii infection. In another specific embodiment, Therapeutics of the invention are used in any combination with LEUCOVORIN™ and/or NEUPOGEN™ to prophylactically treat or prevent an opportunistic bacterial infection.

[1014] In a further embodiment, the Therapeutics of the invention are administered in combination with an antibiotic agent. Antibiotic agents that may be administered with the Therapeutics of the invention include, but are not limited to, amoxicillin, beta-lactamases, aminoglycosides, beta-lactam (glycopeptide), beta-lactamases, Clindamycin, chloramphenicol, cephalosporins, ciprofloxacin, erythromycin, fluoroquinolones, macrolides, metronidazole, penicillins, quinolones, rapamycin, rifampin, streptomycin, sulfonamide, tetracyclines, trimethoprim, trimethoprim-sulfamethoxazole, and vancomycin.

[1015] In other embodiments, Therapeutics of the invention are administered in combination with immunosuppressive agents. Immunosuppressive agents that may be administered in combination with the Therapeutics of the invention include, but are not limited to, steroids, cyclosporine, cyclosporine analogs, cyclophosphamide methylprednisone, prednisone, azathioprine, FK-506, 15-deoxyspergualin, and other immunosuppressive agents that act by suppressing the function of responding T cells. Other immunosuppressive agents that may be administered in combination with the Therapeutics of the invention include, but are not limited to, prednisolone, methotrexate, thalidomide, methoxsalen, rapamycin, leflunomide, mizoribine (BREDININ™), brequinar, deoxyspergualin, and azaspirane (SKF 105685), ORTHOCLONE OKT® 3 (muromonab-CD3), SANDIMMUNE™, NEORAL™, SANGDYA™ (cyclosporine), PROGRAF® (FK506, tacrolimus), CELLCEPT® (mycophenolate motefil, of which the active metabolite is mycophenolic acid), IMURAN™ (azathioprine), glucocorticosteroids, adrenocortical steroids such as DELTASONE™ (prednisone) and HYDELTRASOL™ (prednisolone), FOLEX™ and MEXATE™ (methotrxate), OXSORALEN-ULTRA™ (methoxsalen) and RAPAMUNE™ (sirolimus). In a specific embodiment, immunosuppressants may be used to prevent rejection of organ or bone marrow transplantation.

[1016] In an additional embodiment, Therapeutics of the invention are administered alone or in combination with one or more intravenous immune globulin preparations. Intravenous immune globulin preparations that may be administered with the Therapeutics of the invention include, but not limited to, GAMMAR™, IVEEGAM™, SANDOGLOBULIN™, GAMMAGARD S/D™, ATGAM™ (antithymocyte glubulin), and GAMIMUNE™. In a specific embodiment, Therapeutics of the invention are administered in combination with intravenous immune globulin preparations in transplantation therapy (e.g., bone marrow transplant).

[1017] In certain embodiments, the Therapeutics of the invention are administered alone or in combination with an anti-inflammatory agent. Anti-inflammatory agents that may be administered with the Therapeutics of the invention include, but are not limited to, corticosteroids (e.g. betamethasone, budesonide, cortisone, dexamethasone, hydrocortisone, methylprednisolone, prednisolone, prednisone, and triamcinolone), nonsteroidal anti-inflammatory drugs (e.g., diclofenac, diflunisal, etodolac, fenoprofen, floctafenine, flurbiprofen, ibuprofen, indomethacin, ketoprofen, meclofenamate, mefenamic acid, meloxicam, nabumetone, naproxen, oxaprozin, phenylbutazone, piroxicam, sulindac, tenoxicam, tiaprofenic acid, and tolmetin.), as well as antihistamines, aminoarylcarboxylic acid derivatives, arylacetic acid derivatives, arylbutyric acid derivatives, arylcarboxylic acids, arylpropionic acid derivatives, pyrazoles, pyrazolones, salicylic acid derivatives, thiazinecarboxamides, e-acetamidocaproic acid, S-adenosylmethionine, 3-amino-4-hydroxybutyric acid, amixetrine, bendazac, benzydamine, bucolome, difenpiramide, ditazol, emorfazone, guaiazulene, nabumetone, nimesulide, orgotein, oxaceprol, paranyline, perisoxal, pifoxime, proquazone, proxazole, and tenidap.

[1018] In an additional embodiment, the compositions of the invention are administered alone or in combination with an anti-angiogenic agent. Anti-angiogenic agents that may be administered with the compositions of the invention include, but are not limited to, Angiostatin (Entremed, Rockville, Md.), Troponin-1 (Boston Life Sciences, Boston, Mass.), anti-Invasive Factor, retinoic acid and derivatives thereof, paclitaxel (Taxol), Suramin, Tissue Inhibitor of Metalloproteinase-1, Tissue Inhibitor of Metalloproteinase-2, VEGI, Plasminogen Activator Inhibitor-1, Plasminogen Activator Inhibitor-2, and various forms of the lighter “d group” transition metals.

[1019] Lighter “d group” transition metals include, for example, vanadium, molybdenum, tungsten, titanium, niobium, and tantalum species. Such transition metal species may form transition metal complexes. Suitable complexes of the above-mentioned transition metal species include oxo transition metal complexes.

[1020] Representative examples of vanadium complexes include oxo vanadium complexes such as vanadate and vanadyl complexes. Suitable vanadate complexes include metavanadate and orthovanadate complexes such as, for example, ammonium metavanadate, sodium metavanadate, and sodium orthovanadate. Suitable vanadyl complexes include, for example, vanadyl acetylacetonate and vanadyl sulfate including vanadyl sulfate hydrates such as vanadyl sulfate mono- and trihydrates.

[1021] Representative examples of tungsten and molybdenum complexes also include oxo complexes. Suitable oxo tungsten complexes include tungstate and tungsten oxide complexes. Suitable tungstate complexes include ammonium tungstate, calcium tungstate, sodium tungstate dihydrate, and tungstic acid. Suitable tungsten oxides include tungsten (IV) oxide and tungsten (VI) oxide. Suitable oxo molybdenum complexes include molybdate, molybdenum oxide, and molybdenyl complexes. Suitable molybdate complexes include ammonium molybdate and its hydrates, sodium molybdate and its hydrates, and potassium molybdate and its hydrates. Suitable molybdenum oxides include molybdenum (VI) oxide, molybdenum (VI) oxide, and molybdic acid. Suitable molybdenyl complexes include, for example, molybdenyl acetylacetonate. Other suitable tungsten and molybdenum complexes include hydroxo derivatives derived from, for example, glycerol, tartaric acid, and sugars.

[1022] A wide variety of other anti-angiogenic factors may also be utilized within the context of the present invention. Representative examples include, but are not limited to, platelet factor 4; protamine sulphate; sulphated chitin derivatives (prepared from queen crab shells), (Murata et al., Cancer Res. 51:22-26, (1991)); Sulphated Polysaccharide Peptidoglycan Complex (SP-PG) (the function of this compound may be enhanced by the presence of steroids such as estrogen, and tamoxifen citrate); Staurosporine; modulators of matrix metabolism, including for example, proline analogs, cishydroxyproline, d,L-3,4-dehydroproline, Thiaproline, alpha,alpha-dipyridyl, aminopropionitrile fumarate; 4-propyl-5-(4-pyridinyl)-2(3H)-oxazolone; Methotrexate; Mitoxantrone; Heparin; Interferons; 2 Macroglobulin-serum; ChIMP-3 (Pavloff et al., J. Bio. Chem. 267:17321-17326, (1992)); Chymostatin (Tomkinson et al., Biochem J. 286:475-480, (1992)); Cyclodextrin Tetradecasulfate; Eponemycin; Camptothecin; Fumagillin (Ingber et al., Nature 348:555-557, (1990)); Gold Sodium Thiomalate (“GST”; Matsubara and Ziff, J. Clin. Invest. 79:1440-1446, (1987)); anticollagenase-serum; alpha2-antiplasmin (Holmes et al., J. Biol. Chem. 262(4):1659-1664, (1987)); Bisantrene (National Cancer Institute); Lobenzarit disodium (N-(2)-carboxyphenyl-4- chloroanthronilic acid disodium or “CCA”; (Takeuchi et al., Agents Actions 36:312-316, (1992)); and metalloproteinase inhibitors such as BB94.

[1023] Additional anti-angiogenic factors that may also be utilized within the context of the present invention include Thalidomide, (Celgene, Warren, N.J.); Angiostatic steroid; AGM-1470 (H. Brem and J. Folkman J Pediatr. Surg. 28:445-51 (1993)); an integrin alpha v beta 3 antagonist (C. Storgard et al., J Clin. Invest. 103:47-54 (1999)); carboxynaminolmidazole; Carboxyamidotriazole (CAI) (National Cancer Institute, Bethesda, Md.); Conbretastatin A-4 (CA4P) (OXiGENE, Boston, Mass.); Squalamine (Magainin Pharmaceuticals, Plymouth Meeting, Pa.); TNP-470, (Tap Pharmaceuticals, Deerfield, Ill.); ZD-0101 AstraZeneca (London, UK); APRA (CT2584); Benefin, Byrostatin-1 (SC339555); CGP-41251 (PKC 412); CM101; Dexrazoxane (ICRF187); DMXAA; Endostatin; Flavopridiol; Genestein; GTE; ImmTher; Iressa (ZD1839); Octreotide (Somatostatin); Panretin; Penacillamine; Photopoint; PI-88; Prinomastat (AG-3340) Purlytin; Suradista (FCE26644); Tamoxifen (Nolvadex); Tazarotene; Tetrathiomolybdate; Xeloda (Capecitabine); and 5-Fluorouracil.

[1024] Anti-angiogenic agents that may be administered in combination with the compounds of the invention may work through a variety of mechanisms including, but not limited to, inhibiting proteolysis of the extracellular matrix, blocking the function of endothelial cell-extracellular matrix adhesion molecules, by antagonizing the function of angiogenesis inducers such as growth factors, and inhibiting integrin receptors expressed on proliferating endothelial cells. Examples of anti-angiogenic inhibitors that interfere with extracellular matrix proteolysis and which may be administered in combination with the compositions of the invention include, but are not limited to, AG-3340 (Agouron, La Jolla, Calif.), BAY-12-9566 (Bayer, West Haven, Conn.), BMS-275291 (Bristol Myers Squibb, Princeton, N.J.), CGS-27032A (Novartis, East Hanover, N.J.), Marimastat (British Biotech, Oxford, UK), and Metastat (Aetema, St-Foy, Quebec). Examples of anti-angiogenic inhibitors that act by blocking the function of endothelial cell-extracellular matrix adhesion molecules and which may be administered in combination with the compositions of the invention include, but are not limited to, EMD-121974 (Merck KcgaA Darmstadt, Germany) and Vitaxin (Ixsys, La Jolla, Calif./Medimmune, Gaithersburg, Md.). Examples of anti-angiogenic agents that act by directly antagonizing or inhibiting angiogenesis inducers and which may be administered in combination with the compositions of the invention include, but are not limited to, Angiozyme (Ribozyme, Boulder, Colo.), Anti-VEGF antibody (Genentech, S. San Francisco, Calif.), PTK-787/ZK-225846 (Novartis, Basel, Switzerland), SU-101 (Sugen, S. San Francisco, Calif.), SU-5416 (Sugen/Pharmacia Upjohn, Bridgewater, N.J.), and SU-6668 (Sugen). Other anti-angiogenic agents act to indirectly inhibit angiogenesis. Examples of indirect inhibitors of angiogenesis which may be administered in combination with the compositions of the invention include, but are not limited to, IM-862 (Cytran, Kirkland, Wash.), Interferon-alpha, IL-12 (Roche, Nutley, N.J.), and Pentosan polysulfate (Georgetown University, Washington, D.C.).

[1025] In particular embodiments, the use of compositions of the invention in combination with anti-angiogenic agents is contemplated for the treatment, prevention, and/or amelioration of an autoimmune disease, such as for example, an autoimmune disease described herein.

[1026] In a particular embodiment, the use of compositions of the invention in combination with anti-angiogenic agents is contemplated for the treatment, prevention, and/or amelioration of arthritis. In a more particular embodiment, the use of compositions of the invention in combination with anti-angiogenic agents is contemplated for the treatment, prevention, and/or amelioration of rheumatoid arthritis.

[1027] In another embodiment, the polynucleotides encoding a polypeptide of the present invention are administered in combination with an angiogenic protein, or polynucleotides encoding an angiogenic protein. Examples of angiogenic proteins that may be administered with the compositions of the invention include, but are not limited to, acidic and basic fibroblast growth factors, VEGF-1, VEGF-2, VEGF-3, epidermal growth factor alpha and beta, platelet-derived endothelial cell growth factor, platelet-derived growth factor, tumor necrosis factor alpha, hepatocyte growth factor, insulin-like growth factor, colony stimulating factor, macrophage colony stimulating factor, granulocyte/macrophage colony stimulating factor, and nitric oxide synthase.

[1028] In additional embodiments, compositions of the invention are administered in combination with a chemotherapeutic agent. Chemotherapeutic agents that may be administered with the Therapeutics of the invention include, but are not limited to alkylating agents such as nitrogen mustards (for example, Mechlorethamine, cyclophosphamide, Cyclophosphamide Ifosfamide, Melphalan (L-sarcolysin), and Chlorambucil), ethylenimines and methylmelamines (for example, Hexamethylmelamine and Thiotepa), alkyl sulfonates (for example, Busulfan), nitrosoureas (for example, Carmustine (BCNU), Lomustine (CCNU), Semustine (methyl-CCNU), and Streptozocin (streptozotocin)), triazenes (for example, Dacarbazine (DTIC; dimethyltriazenoimidazolecarboxamide)), folic acid analogs (for example, Methotrexate (amethopterin)), pyrimidine analogs (for example, Fluorouacil (5-fluorouracil; 5-FU), Floxuridine (fluorodeoxyuridine; FudR), and Cytarabine (cytosine arabinoside)), purine analogs and related inhibitors (for example, Mercaptopurine (6-mercaptopurine; 6-MP), Thioguanine (6-thioguanine; TG), and Pentostatin (2′-deoxycoformycin)), vinca alkaloids (for example, Vinblastine (VLB, vinblastine sulfate)) and Vincristine (vincristine sulfate)), epipodophyllotoxins (for example, Etoposide and Teniposide), antibiotics (for example, Dactinomycin (actinomycin D), Daunorubicin (daunomycin; rubidomycin), Doxorubicin, Bleomycin, Plicamycin (mithramycin), and Mitomycin (mitomycin C), enzymes (for example, L-Asparaginase), biological response modifiers (for example, Interferon-alpha and interferon-alpha-2b), platinum coordination compounds (for example, Cisplatin (cis-DDP) and Carboplatin), anthracenedione (Mitoxantrone), substituted ureas (for example, Hydroxyurea), methylhydrazine derivatives (for example, Procarbazine (N-methylhydrazine; MIH), adrenocorticosteroids (for example, Prednisone), progestins (for example, Hydroxyprogesterone caproate, Medroxyprogesterone, Medroxyprogesterone acetate, and Megestrol acetate), estrogens (for example, Diethylstilbestrol (DES), Diethylstilbestrol diphosphate, Estradiol, and Ethinyl estradiol), antiestrogens (for example, Tamoxifen), androgens (Testosterone proprionate, and Fluoxymesterone), antiandrogens (for example, Flutamide), gonadotropin-releasing horomone analogs (for example, Leuprolide), other hormones and hormone analogs (for example, methyltestosterone, estramustine, estramustine phosphate sodium, chlorotrianisene, and testolactone), and others (for example, dicarbazine, glutamic acid, and mitotane).

[1029] In one embodiment, the compositions of the invention are administered in combination with one or more of the following drugs: infliximab (also known as Remicade™ Centocor, Inc.), Trocade (Roche, RO-32-3555), Leflunomide (also known as Arava™ from Hoechst Marion Roussel), Kineret™ (an IL-1 Receptor antagonist also known as Anakinra from Amgen, Inc.)

[1030] In a specific embodiment, compositions of the invention are administered in combination with CHOP (cyclophosphamide, doxorubicin, vincristine, and prednisone) or combination of one or more of the components of CHOP. In one embodiment, the compositions of the invention are administered in combination with anti-CD20 antibodies, human monoclonal anti-CD20 antibodies. In another embodiment, the compositions of the invention are administered in combination with anti-CD20 antibodies and CHOP, or anti-CD20 antibodies and any combination of one or more of the components of CHOP, particularly cyclophosphamide and/or prednisone. In a specific embodiment, compositions of the invention are administered in combination with Rituximab. In a further embodiment, compositions of the invention are administered with Rituximab and CHOP, or Rituximab and any combination of one or more of the components of CHOP, particularly cyclophosphamide and/or prednisone. In a specific embodiment, compositions of the invention are administered in combination with tositumomab. In a further embodiment, compositions of the invention are administered with tositumomab and CHOP, or tositumomab and any combination of one or more of the components of CHOP, particularly cyclophosphamide and/or prednisone. The anti-CD20 antibodies may optionally be associated with radioisotopes, toxins or cytotoxic prodrugs.

[1031] In another specific embodiment, the compositions of the invention are administered in combination Zevalin™. In a further embodiment, compositions of the invention are administered with Zevalin™ and CHOP, or Zevalin™ and any combination of one or more of the components of CHOP, particularly cyclophosphamide and/or prednisone. Zevalin™ may be associated with one or more radisotopes. Particularly preferred isotopes are ⁹⁰Y and ¹¹¹In.

[1032] In an additional embodiment, the Therapeutics of the invention are administered in combination with cytokines. Cytokines that may be administered with the Therapeutics of the invention include, but are not limited to, IL2, IL3, IL4, IL5, IL6, IL7, IL10, IL12, IL13, IL15, anti-CD40, CD40L, IFN-gamma and TNF-alpha. In another embodiment, Therapeutics of the invention may be administered with any interleukin, including, but not limited to, IL-1alpha, IL-1beta, IL-2, IL-3, IL-4, IL-5, IL-6, IL-7, IL-8, IL-9, IL-10, IL-11, IL-12, IL-13, IL-14, IL-15, IL-16, IL-17, IL-18, IL-19, IL-20, and IL-21.

[1033] In one embodiment, the Therapeutics of the invention are administered in combination with members of the TNF family. TNF, TNF-related or TNF-like molecules that may be administered with the Therapeutics of the invention include, but are not limited to, soluble forms of TNF-alpha, lymphotoxin-alpha (LT-alpha, also known as TNF-beta), LT-beta (found in complex heterotrimer LT-alpha2-beta), OPGL, FasL, CD27L, CD30L, CD40L, 4-1BBL, DcR3, OX40L, TNF-gamma (International Publication No. WO 96/14328), AIM-I (International Publication No. WO 97/33899), endokine-alpha (International Publication No. WO 98/07880), OPG, and neutrokine-alpha (International Publication No. WO 98/18921, OX40, and nerve growth factor (NGF), and soluble forms of Fas, CD30, CD27, CD40 and 4-IBB, TR2 (International Publication No. WO 96/34095), DR3 (International Publication No. WO 97/33904), DR4 (International Publication No. WO 98/32856), TR5 (International Publication No. WO 98/30693), TRANK, TR9 (International Publication No. WO 98/56892),TR10 (International Publication No. WO 98/54202), 312C2 (International Publication No. WO 98/06842), and TR12, and soluble forms CD154, CD70, and CD153.

[1034] In an additional embodiment, the Therapeutics of the invention are administered in combination with angiogenic proteins. Angiogenic proteins that may be administered with the Therapeutics of the invention include, but are not limited to, Glioma Derived Growth Factor (GDGF), as disclosed in European Patent Number EP-399816; Platelet Derived Growth Factor-A (PDGF-A), as disclosed in European Patent Number EP-682110; Platelet Derived Growth Factor-B (PDGF-B), as disclosed in European Patent Number EP-282317; Placental Growth Factor (PlGF), as disclosed in International Publication Number WO 92/06194; Placental Growth Factor-2 (PlGF-2), as disclosed in Hauser et al., Growth Factors, 4:259-268 (1993); Vascular Endothelial Growth Factor (VEGF), as disclosed in International Publication Number WO 90/13649; Vascular Endothelial Growth Factor-A (VEGF-A), as disclosed in European Patent Number EP-506477; Vascular Endothelial Growth Factor-2 (VEGF-2), as disclosed in International Publication Number WO 96/39515; Vascular Endothelial Growth Factor B (VEGF-3); Vascular Endothelial Growth, Factor B-186 (VEGF-B186), as disclosed in International Publication Number WO 96/26736; Vascular Endothelial Growth Factor-D (VEGF-D), as disclosed in International Publication Number WO 98/02543; Vascular Endothelial Growth Factor-D (VEGF-D), as disclosed in International Publication Number WO 98/07832; and Vascular Endothelial Growth Factor-E (VEGF-E), as disclosed in German Patent Number DE19639601. The above mentioned references are herein incorporated by reference in their entireties.

[1035] In an additional embodiment, the Therapeutics of the invention are administered in combination with Fibroblast Growth Factors. Fibroblast Growth Factors that may be administered with the Therapeutics of the invention include, but are not limited to, FGF-1, FGF-2, FGF-3, FGF-4, FGF-5, FGF-6, FGF-7, FGF-8, FGF-9, FGF-10, FGF-11, FGF-12, FGF-13, FGF-14, and FGF-15.

[1036] In an additional embodiment, the Therapeutics of the invention are administered in combination with hematopoietic growth factors. Hematopoietic growth factors that may be administered with the Therapeutics of the invention include, but are not limited to, granulocyte macrophage colony stimulating factor (GM-CSF) (sargramostim, LEUKINE™, PROKINE™), granulocyte colony stimulating factor (G-CSF) (filgrastim, NEUPOGEN™), macrophage colony stimulating factor (M-CSF, CSF-1) erythropoietin (epoetin alfa, EPOGEN™, PROCRIT™), stem cell factor (SCF, c-kit ligand, steel factor), megakaryocyte colony stimulating factor, PIXY321 (a GMCSF/IL-3 fusion protein), interleukins, especially any one or more of IL-1 through IL-12, interferon-gamma, or thrombopoietin.

[1037] In certain embodiments, Therapeutics of the present invention are administered in combination with adrenergic blockers, such as, for example, acebutolol, atenolol, betaxolol, bisoprolol, carteolol, labetalol, metoprolol, nadolol, oxprenolol, penbutolol, pindolol, propranolol, sotalol, and timolol.

[1038] In another embodiment, the Therapeutics of the invention are administered in combination with an antiarrhythmic drug (e.g., adenosine, amidoarone, bretylium, digitalis, digoxin, digitoxin, diliazem, disopyramide, esmolol, flecainide, lidocaine, mexiletine, moricizine, phenytoin, procainamide, N-acetyl procainamide, propafenone, propranolol, quinidine, sotalol, tocainide, and verapamil).

[1039] In another embodiment, the Therapeutics of the invention are administered in combination with diuretic agents, such as carbonic anhydrase-inhibiting agents (e.g., acetazolamide, dichlorphenamide, and methazolamide), osmotic diuretics (e.g., glycerin, isosorbide, mannitol, and urea), diuretics that inhibit Na⁺-K⁺-2Cl⁻ symport (e.g., furosemide, bumetanide, azosemide, piretanide, tripamide, ethacrynic acid, muzolimine, and torsemide), thiazide and thiazide-like diuretics (e.g., bendroflumethiazide, benzthiazide, chlorothiazide, hydrochlorothiazide, hydroflumethiazide, methyclothiazide, polythiazide, trichormethiazide, chlorthalidone, indapamide, metolazone, and quinethazone), potassium sparing diuretics (e.g., amiloride and triamterene), and mineralcorticoid receptor antagonists (e.g., spironolactone, canrenone, and potassium canrenoate).

[1040] In one embodiment, the Therapeutics of the invention are administered in combination with treatments for endocrine and/or hormone imbalance disorders. Treatments for endocrine and/or hormone imbalance disorders include, but are not limited to, ¹²⁷I, radioactive isotopes of iodine such as ¹³¹I and ¹²³I; recombinant growth hormone, such as HUMATROPE™ (recombinant somatropin); growth hormone analogs such as PROTROPIN™ (somatrem); dopamine agonists such as PARLODEL™ (bromocriptine); somatostatin analogs such as SANDOSTATIN™ (octreotide); gonadotropin preparations such as PREGNYL™, A.P.L.™ and PROFASI™ (chorionic gonadotropin (CG)), PERGONAL™ (menotropins), and METRODIN™ (urofollitropin (uFSH)); synthetic human gonadotropin releasing hormone preparations such as FACTREL™ and LUTREPULSE™ (gonadorelin hydrochloride); synthetic gonadotropin agonists such as LUPRON™ (leuprolide acetate), SUPPRELIN™ (histrelin acetate), SYNAREL™ (nafarelin acetate), and ZOLADEX™ (goserelin acetate); synthetic preparations of thyrotropin-releasing hormone such as RELEFACT TRH™ and THYPINONE™ (protirelin); recombinant human TSH such as THYROGEN™; synthetic preparations of the sodium salts of the natural isomers of thyroid hormones such as L-T₄™, SYNTHROID™ and LEVOTHROID™ (levothyroxine sodium), L-T₃™, CYTOMEL™ and TRIOSTAT™ (liothyroine sodium), and THYROLAR™ (liotrix); antithyroid compounds such as 6-n-propylthiouracil (propylthiouracil), 1-methyl-2-mercaptoimidazole and TAPAZOLE™ (methimazole), NEO-MERCAZOLE™ (carbimazole); beta-adrenergic receptor antagonists such as propranolol and esmolol; Ca²⁺ channel blockers; dexamethasone and iodinated radiological contrast agents such as TELEPAQUE™ (iopanoic acid) and ORAGRAFIN™ (sodium ipodate).

[1041] Additional treatments for endocrine and/or hormone imbalance disorders include, but are not limited to, estrogens or congugated estrogens such as ESTRACE™ (estradiol), ESTINYL™ (ethinyl estradiol), PREMARIN™, ESTRATAB™, ORTHO-EST™, OGEN™ and estropipate (estrone), ESTROVIS™ (quinestrol), ESTRADERM™ (estradiol), DELESTROGEN™ and VALERGEN™ (estradiol valerate), DEPO-ESTRADIOL CYPIONATE™ and ESTROJECT LA™ (estradiol cypionate); antiestrogens such as NOLVADEX™ (tamoxifen), SEROPHENE™ and CLOMID™ (clomiphene); progestins such as DURALUTIN™ (hydroxyprogesterone caproate), MPA™ and DEPO-PROVERA™ (medroxyprogesterone acetate), PROVERA™ and CYCRIN™ (MPA), MEGACE™ (megestrol acetate), NORLUTIN™ (norethindrone), and NORLUTATE™ and AYGESTIN™ (norethindrone acetate); progesterone implants such as NORPLANT SYSTEM™ (subdermal implants of norgestrel); antiprogestins such as RU 486™ (mifepristone); hormonal contraceptives such as ENOVID™ (norethynodrel plus mestranol), PROGESTASER™ (intrauterine device that releases progesterone), LOESTRIN™, BREVICON™, MODICON™, GENORA™, NELONA™, NORINYL™, OVACON-35™ and OVACON-50™ (ethinyl estradiol/norethindrone), LEVLEN™, NORDETTE™, TRI-LEVLEN™ and TRIPHASIL-21™ (ethinyl estradiol/levonorgestrel) LO/OVRAL™ and OVRAL™ (ethinyl estradiol/norgestrel), DEMULEN™ (ethinyl estradiol/ethynodiol diacetate), NORINYL™, ORTHO-NOVUM™, NORETHIN™, GENORA™, and NELOVA™ (norethindrone/mestranol), DESOGEN™ and ORTHO-CEPT™ (ethinyl estradiol/desogestrel), ORTHO-CYCLEN™ and ORTHO-TRICYCLEN™ (ethinyl estradiol/norgestimate), MICRONOR™ and NOR-QD™ (norethindrone), and OVRETTE™ (norgestrel).

[1042] Additional treatments for endocrine and/or hormone imbalance disorders include, but are not limited to, testosterone esters such as methenolone acetate and testosterone undecanoate; parenteral and oral androgens such as TESTOJECT-50™ (testosterone), TESTEX™ (testosterone propionate), DELATESTRYL™ (testosterone enanthate), DEPO-TESTOSTERONE™ (testosterone cypionate), DANOCRINE™ (danazol), HALOTESTIN™ (fluoxymesterone), ORETON METHYL™, TESTRED™ and VIRILON™ (methyltestosterone), and OXANDRIN™ (oxandrolone); testosterone transdermal systems such as TESTODERM™; androgen receptor antagonist and 5-alpha-reductase inhibitors such as ANDROCUR™ (cyproterone acetate), EULEXIN™ (flutamide), and PROSCAR™ (finasteride); adrenocorticotropic hormone preparations such as CORTROSYN™ (cosyntropin); adrenocortical steroids and their synthetic analogs such as ACLOVATE™ (alclometasone dipropionate), CYCLOCORT™ (amcinonide), BECLOVENT™ and VANCERIL™ (beclomethasone dipropionate), CELESTONE™ (betamethasone), BENISONE™ and UTICORT™ (betamethasone benzoate), DIPROSONE™ (betamethasone dipropionate), CELESTONE PHOSPHATE™ (betamethasone sodium phosphate), CELESTONE SOLUSPAN™ (betamethasone sodium phosphate and acetate), BETA-VAL™ and VALISONE™ (betamethasone valerate), TEMOVATE™ (clobetasol propionate), CLODERM™ (clocortolone pivalate), CORTEF™ and HYDROCORTONE™ (cortisol (hydrocortisone)), HYDROCORTONE ACETATE™ (cortisol (hydrocortisone) acetate), LOCOID™ (cortisol (hydrocortisone) butyrate), HYDROCORTONE PHOSPHATE™ (cortisol (hydrocortisone) sodium phosphate), A-HYDROCORT™ and SOLU CORTEF™ (cortisol (hydrocortisone) sodium succinate), WESTCORT™ (cortisol (hydrocortisone) valerate), CORTISONE ACETATE™ (cortisone acetate), DESOWEN™ and TRIDESILON™ (desonide), TOPICORT™ (desoximetasone), DECADRON™ (dexamethasone), DECADRON LA™ (dexamethasone acetate), DECADRON PHOSPHATE™ and HEXADROL PHOSPHATE™ (dexamethasone sodium phosphate), FLORONE™ and MAXIFLOR™ (diflorasone diacetate), FLORINEF ACETATE™ (fludrocortisone acetate), AEROBID™ and NASALIDE™ (flunisolide), FLUONID™ and SYNALAR™ (fluocinolone acetonide), LIDEX™ (fluocinonide), FLUOR-OP™ and FML™ (fluorometholone), CORDRAN™ (flurandrenolide), HALOG™ (halcinonide), HMS LIZUIFILM™ (medrysone), MEDROL™ (methylprednisolone), DEPO-MEDROL™ and MEDROL ACETATE™ (methylprednisone acetate), A-METHAPRED™ and SOLUMEDROL™ (methylprednisolone sodium succinate), ELOCON™ (mometasone furoate), HALDRONE™ (paramethasone acetate), DELTA-CORTEF™ (prednisolone), ECONOPRED™ (prednisolone acetate), HYDELTRASOL™ (prednisolone sodium phosphate), HYDELTRA-T.B.A™ (prednisolone tebutate), DELTASONE™ (prednisone), ARISTOCORT™ and KENACORT™ (triamcinolone), KENALOG™ (triamcinolone acetonide), ARISTOCORT™ and KENACORT DIACETATE™ (triamcinolone diacetate), and ARISTOSPAN™ (triamcinolone hexacetonide); inhibitors of biosynthesis and action of adrenocortical steroids such as -CYTADREN™ (aminoglutethimide), NIZORAL™ (ketoconazole), MODRASTANE™ (trilostane), and METOPIRONE™ (metyrapone); bovine, porcine or human insulin or mixtures thereof; insulin analogs; recombinant human insulin such as HUMULIN™ and NOVOLIN™; oral hypoglycemic agents such as ORAMIDE™ and ORINASE™ (tolbutamide), DIABINESE™ (chlorpropamide), TOLAMIDE™ and TOLINASE™ (tolazamide), DYMELOR™ (acetohexamide), glibenclamide, MICRONASE™, DIBETA™ and GLYNASE™ (glyburide), GLUCOTROL™ (glipizide), and DIAMICRON™ (gliclazide), GLUCOPHAGE™ (metformin), ciglitazone, pioglitazone, and alpha-glucosidase inhibitors; bovine or porcine glucagon; somatostatins such as SANDOSTATIN™ (octreotide); and diazoxides such as PROGLYCEM™ (diazoxide).

[1043] In one embodiment, the Therapeutics of the invention are administered in combination with treatments for uterine motility disorders. Treatments for uterine motility disorders include, but are not limited to, estrogen drugs such as conjugated estrogens (e.g., PREMARIN® and ESTRATAB®), estradiols (e.g., CLIMARA® and ALORA®), estropipate, and chlorotrianisene; progestin drugs (e.g., AMEN® (medroxyprogesterone), MICRONOR® (norethidrone acetate), PROMETRIUM® progesterone, and megestrol acetate); and estrogen/progesterone combination therapies such as, for example, conjugated estrogens/medroxyprogesterone (e.g., PREMPRO™ and PREMPHASE®) and norethindrone acetate/ethinyl estsradiol (e.g., FEMHRT™).

[1044] In an additional embodiment, the Therapeutics of the invention are administered in combination with drugs effective in treating iron deficiency and hypochromic anemias,0 including but not limited to, ferrous sulfate (iron sulfate, FEOSOL™), ferrous fumarate (e.g., FEOSTAT™), ferrous gluconate (e.g., FERGON™), polysaccharide-iron complex (e.g., NIFEREX™), iron dextran injection (e.g., INFED™), cupric sulfate, pyroxidine, riboflavin, Vitamin B₁₂, cyancobalamin injection (e.g., REDISOL™, RUBRAMIN PC™), hydroxocobalamin, folic acid (e.g., FOLVITE™), leucovorin (folinic acid, 5-CHOH4PteGlu, citrovorum factor) or WELLCOVORIN (Calcium salt of leucovorin), transferrin or ferritin.

[1045] In certain embodiments, the Therapeutics of the invention are administered in combination with agents used to treat psychiatric disorders. Psychiatric drugs that may be administered with the Therapeutics of the invention include, but are not limited to, antipsychotic agents (e.g., chlorpromazine, chlorprothixene, clozapine, fluphenazine, haloperidol, loxapine, mesoridazine, molindone, otanzapine, perphenazine, pimozide, quetiapine, risperidone, thioridazine, thiothixene, trifluoperazine, and triflupromazine), antimanic agents (e.g., carbamazepine, divalproex sodium, lithium carbonate, and lithium citrate), antidepressants (e.g., amitriptyline, amoxapine, bupropion, citalopram, clomipramine, desipramine, doxepin, fluvoxamine, fluoxetine, imipramine, isocarboxazid, maprotiline, mirtazapine, nefazodone, nortriptyline, paroxetine, phenelzine, protriptyline, sertraline, tranylcypromine, trazodone, trimipramine, and venlafaxine), antianxiety agents (e.g., alprazolam, buspirone, chlordiazepoxide, clorazepate, diazepam, halazepam, lorazepam, oxazepam, and prazepam), and stimulants (e.g., d-amphetamine, methylphenidate, and pemoline).

[1046] In other embodiments, the Therapeutics of the invention are administered in combination with agents used to treat neurological disorders. Neurological agents that may be administered with the Therapeutics of the invention include, but are not limited to, antiepileptic agents (e.g., carbamazepine, clonazepam, ethosuximide, phenobarbital, phenytoin, primidone, valproic acid, divalproex sodium, felbamate, gabapentin, lamotrigine, levetiracetam, oxcarbazepine, tiagabine, topiramate, zonisamide, diazepam, lorazepam, and clonazepam), antiparkinsonian agents (e.g., levodopa/carbidopa, selegiline, amantidine, bromocriptine, pergolide, ropinirole, pramipexole, benztropine; biperiden; ethopropazine; procyclidine; trihexyphenidyl, tolcapone), and ALS therapeutics (e.g. riluzole).

[1047] In another embodiment, Therapeutics of the invention are administered in combination with vasodilating agents and/or calcium channel blocking agents. Vasodilating agents that may be administered with the Therapeutics of the invention include, but are not limited to, Angiotensin Converting Enzyme (ACE) inhibitors (e.g., papaverine, isoxsuprine, benazepril, captopril, cilazapril, enalapril, enalaprilat, fosinopril, lisinopril, moexipril, perindopril, quinapril, ramipril, spirapril, trandolapril, and nylidrin), and nitrates (e.g., isosorbide dinitrate, isosorbide mononitrate, and nitroglycerin). Examples of calcium channel blocking agents that may be administered in combination with the Therapeutics of the invention include, but are not limited to amlodipine, bepridil, diltiazem, felodipine, flunarizine, isradipine, nicardipine, nifedipine, nimodipine, and verapamil.

[1048] In additional embodiments, the Therapeutics of the invention are administered in combination with other therapeutic or prophylactic regimens, such as, for example, radiation therapy.

### Example 14

[1049] Method of Treating Decreased Levels of the Polypeptide

[1050] The present invention relates to a method for treating an individual in need of an increased level of a polypeptide of the invention in the body comprising administering to such an individual a composition comprising a therapeutically effective amount of an agonist of the invention (including polypeptides of the invention). Moreover, it will be appreciated that conditions caused by a decrease in the standard or normal expression level of a polypeptide of the present invention in an individual can be treated by administering the agonist or antagonist of the present invention. Thus, the invention also provides a method of treatment of an individual in need of an increased level of the polypeptide comprising administering to such an individual a Therapeutic comprising an amount of the agonist or antagonist to increase the activity level of the polypeptide in such an individual.

[1051] For example, a patient with decreased levels of a polypeptide receives a daily dose 0.1-100 ug/kg of the agonist or antagonist for six consecutive days. The exact details of the dosing scheme, based on administration and formulation, are provided in Example 13.

### Example 15

[1052] Method of Treating Increased Levels of the Polypeptide

[1053] The present invention also relates to a method of treating an individual in need of a decreased level of a polypeptide of the invention in the body comprising administering to such an individual a composition comprising a therapeutically effective amount of an antagonist of the invention (including polypeptides and antibodies of the invention).

[1054] In one example, antisense technology is used to inhibit production of a polypeptide of the present invention. This technology is one example of a method of decreasing levels of a polypeptide, due to a variety of etiologies, such as cancer.

[1055] For example, a patient diagnosed with abnormally increased levels of a polypeptide is administered intravenously antisense polynucleotides at 0.5, 1.0, 1.5, 2.0 and 3.0 mg/kg day for 21 days. This treatment is repeated after a 7-day rest period if the treatment was well tolerated. The antisense polynucleotides of the present invention can be formulated using techniques and formulations described herein (e.g. see Example 13), or otherwise known in the art.

### Example 16

[1056] Method of Treatment Using Gene Therapy—Ex vivo

[1057] One method of gene therapy transplants fibroblasts, which are capable of expressing a polypeptide, onto a patient. Generally, fibroblasts are obtained from a subject by skin biopsy. The resulting tissue is placed in tissue-culture medium and separated into small pieces. Small chunks of the tissue are placed on a wet surface of a tissue culture flask, approximately ten pieces are placed in each flask. The flask is turned upside down, closed tight and left at room temperature over night. After 24 hours at room temperature, the flask is inverted and the chunks of tissue remain fixed to the bottom of the flask and fresh media (e.g., Ham's F12 media, with 10% FBS, penicillin and streptomycin) is added. The flasks are then incubated at 37 degree C. for approximately one week.

[1058] At this time, fresh media is added and subsequently changed every several days. After an additional two weeks in culture, a monolayer of fibroblasts emerge. The monolayer is trypsinized and scaled into larger flasks.

[1059] pMV-7 (Kirschmeier, P. T. et al., DNA, 7:219-25 (1988)), flanked by the long terminal repeats of the Moloney murine sarcoma virus, is digested with EcoRI and HindIII and subsequently treated with calf intestinal phosphatase. The linear vector is fractionated on agarose gel and purified, using glass beads.

[1060] The cDNA encoding a polypeptide of the present invention can be amplified using PCR primers which correspond to the 5′ and 3′ end sequences respectively as set forth in Example 1 using primers and having appropriate restriction sites and initiation/stop codons, if necessary. Preferably, the 5′ primer contains an EcoRI site and the 3′ primer includes a HindIII site. Equal quantities of the Moloney murine sarcoma virus linear backbone and the amplified EcoRI and HindIII fragment are added together, in the presence of T4 DNA ligase. The resulting mixture is maintained under conditions appropriate for ligation of the two fragments. The ligation mixture is then used to transform bacteria HB101, which are then plated onto agar containing kanamycin for the purpose of confirming that the vector has the gene of interest properly inserted.

[1061] The amphotropic pA317 or GP+aml2 packaging cells are grown in tissue culture to confluent density in Dulbecco's Modified Eagles Medium (DMEM) with 10% calf serum (CS), penicillin and streptomycin. The MSV vector containing the gene is then added to the media and the packaging cells transduced with the vector. The packaging cells now produce infectious viral particles containing the gene (the packaging cells are now referred to as producer cells).

[1062] Fresh media is added to the transduced producer cells, and subsequently, the media is harvested from a 10 cm plate of confluent producer cells. The spent media, containing the infectious viral particles, is filtered through a millipore filter to remove detached producer cells and this media is then used to infect fibroblast cells. Media is removed from a sub-confluent plate of fibroblasts and quickly replaced with the media from the producer cells. This media is removed and replaced with fresh media. If the titer of virus is high, then virtually all fibroblasts will be infected and no selection is required. If the titer is very low, then it is necessary to use a retroviral vector that has a selectable marker, such as neo or his. Once the fibroblasts have been efficiently infected, the fibroblasts are analyzed to determine whether protein is produced.

[1063] The engineered fibroblasts are then transplanted onto the host, either alone or after having been grown to confluence on cytodex 3 microcarrier beads.

### Example 17

[1064] Gene Therapy Using Endogenous Genes Corresponding to Polynucleotides of the Invention

[1065] Another method of gene therapy according to the present invention involves operably associating the endogenous polynucleotide sequence of the invention with a promoter via homologous recombination as described, for example, in U.S. Pat. No. 5,641,670, issued Jun. 24, 1997; International Publication NO: WO 96/29411, published Sep. 26, 1996; International Publication NO: WO 94/12650, published Aug. 4, 1994; Koller et al., Proc. Natl. Acad. Sci. USA, 86:8932-8935 (1989); and Zijlstra et al., Nature, 342:435-438 (1989). This method involves the activation of a gene which is present in the target cells, but which is not expressed in the cells, or is expressed at a lower level than desired.

[1066] Polynucleotide constructs are made which contain a promoter and targeting sequences, which are homologous to the 5′ non-coding sequence of endogenous polynucleotide sequence, flanking the promoter. The targeting sequence will be sufficiently near the 5′ end of the polynucleotide sequence so the promoter will be operably linked to the endogenous sequence upon homologous recombination. The promoter and the targeting sequences can be amplified using PCR. Preferably, the amplified promoter contains distinct restriction enzyme sites on the 5′ and 3′ ends. Preferably, the 3′ end of the first targeting sequence contains the same restriction enzyme site as the 5′ end of the amplified promoter and the 5′ end of the second targeting sequence contains the same restriction site as the 3′ end of the amplified promoter.

[1067] The amplified promoter and the amplified targeting sequences are digested with the appropriate restriction enzymes and subsequently treated with calf intestinal phosphatase. The digested promoter and digested targeting sequences are added together in the presence of T4 DNA ligase. The resulting mixture is maintained under conditions appropriate for ligation of the two fragments. The construct is size fractionated on an agarose gel, then purified by phenol extraction and ethanol precipitation.

[1068] In this Example, the polynucleotide constructs are administered as naked polynucleotides via electroporation. However, the polynucleotide constructs may also be administered with transfection-facilitating agents, such as liposomes, viral sequences, viral particles, precipitating agents, etc. Such methods of delivery are known in the art.

[1069] Once the cells are transfected, homologous recombination will take place which results in the promoter being operably linked to the endogenous polynucleotide sequence. This results in the expression of polynucleotide corresponding to the polynucleotide in the cell. Expression may be detected by immunological staining, or any other method known in the art.

[1070] Fibroblasts are obtained from a subject by skin biopsy. The resulting tissue is placed in DMEM+10% fetal calf serum. Exponentially growing or early stationary phase fibroblasts are trypsinized and rinsed from the plastic surface with nutrient medium. An aliquot of the cell suspension is removed for counting, and the remaining cells are subjected to centrifugation. The supernatant is aspirated and the pellet is resuspended in 5 ml of electroporation buffer (20 mM HEPES pH 7.3, 137 mM NaCl, 5 mM KCl, 0.7 mM Na₂ HPO₄, 6 mM dextrose). The cells are recentrifuged, the supernatant aspirated, and the cells resuspended in electroporation buffer containing 1 mg/ml acetylated bovine serum albumin. The final cell suspension contains approximately 3×10⁶ cells/ml. Electroporation should be performed immediately following resuspension.

[1071] Plasmid DNA is prepared according to standard techniques. For example, to construct a plasmid for targeting to the locus corresponding to the polynucleotide of the invention, plasmid pUC18 (MBI Fermentas, Amherst, N.Y.) is digested with HindIII. The CMV promoter is amplified by PCR with an XbaI site on the 5′ end and a BamHI site on the 3′ end. Two non-coding sequences are amplified via PCR: one non-coding sequence (fragment 1) is amplified with a HindIII site at the 5′ end and an Xba site at the 3′ end; the other non-coding sequence (fragment 2) is amplified with a BamHI site at the 5′end and a HindIII site at the 3′ end. The CMV promoter and the fragments (1 and 2) are digested with the appropriate enzymes (CMV promoter—XbaI and BamHI; fragment 1—XbaI; fragment 2—BamHI) and ligated together. The resulting ligation product is digested with HindIII, and ligated with the HindIII-digested pUC18 plasmid.

[1072] Plasmid DNA is added to a sterile cuvette with a 0.4 cm electrode gap (Bio-Rad). The final DNA concentration is generally at least 120 μg/ml. 0.5 ml of the cell suspension (containing approximately 1.5×10⁶ cells) is then added to the cuvette, and the cell suspension and DNA solutions are gently mixed. Electroporation is performed with a Gene-Pulser apparatus (Bio-Rad). Capacitance and voltage are set at 960 μF and 250-300 V, respectively. As voltage increases, cell survival decreases, but the percentage of surviving cells that stably incorporate the introduced DNA into their genome increases dramatically. Given these parameters, a pulse time of approximately 14-20 mSec should be observed.

[1073] Electroporated cells are maintained at room temperature for approximately 5 min, and the contents of the cuvette are then gently removed with a sterile transfer pipette. The cells are added directly to 10 ml of prewarmed nutrient media (DMEM with 15% calf serum) in a 10 cm dish and incubated at 37 degree C. The following day, the media is aspirated and replaced with 10 ml of fresh media and incubated for a further 16-24 hours.

[1074] The engineered fibroblasts are then injected into the host, either alone or after having been grown to confluence on cytodex 3 microcarrier beads. The fibroblasts now produce the protein product. The fibroblasts can then be introduced into a patient as described above.

### Example 18

[1075] Method of Treatment Using Gene Therapy—In vivo

[1076] Another aspect of the present invention is using in vivo gene therapy methods to treat disorders, diseases and conditions. The gene therapy method relates to the introduction of naked nucleic acid (DNA, RNA, and antisense DNA or RNA) sequences into an animal to increase or decrease the expression of the polypeptide. The polynucleotide of the present invention may be operatively linked to (i.e., associated with) a promoter or any other genetic elements necessary for the expression of the polypeptide by the target tissue. Such gene therapy and delivery techniques and methods are known in the art, see, for example, WO90/11092, WO98/11779; U.S. Pat. Nos. 5,693,622, 5,705,151, 5,580,859; Tabata et al., Cardiovasc. Res. 35(3):470-479 (1997); Chao et al., Pharmacol. Res. 35(6):517-522 (1997); Wolff, Neuromuscul. Disord. 7(5):314-318 (1997); Schwartz et al., Gene Ther. 3(5):405-411 (1996); Tsurumi et al., Circulation 94(12):3281-3290 (1996) (incorporated herein by reference).

[1077] The polynucleotide constructs may be delivered by any method that delivers injectable materials to the cells of an animal, such as, injection into the interstitial space of tissues (heart, muscle, skin, lung, liver, intestine and the like). The polynucleotide constructs can be delivered in a pharmaceutically acceptable liquid or aqueous carrier.

[1078] The term “naked” polynucleotide, DNA or RNA, refers to sequences that are free from any delivery vehicle that acts to assist, promote, or facilitate entry into the cell, including viral sequences, viral particles, liposome formulations, lipofectin or precipitating agents and the like. However, the polynucleotides of the present invention may also be delivered in liposome formulations (such as those taught in Felgner P. L. et al. (1995) Ann. NY Acad. Sci. 772:126-139 and Abdallah B. et al. (1995) Biol. Cell 85(1):1-7) which can be prepared by methods well known to those skilled in the art.

[1079] The polynucleotide vector constructs used in the gene therapy method are preferably constructs that will not integrate into the host genome nor will they contain sequences that allow for replication. Any strong promoter known to those skilled in the art can be used for driving the expression of DNA. Unlike other gene therapy techniques, one major advantage of introducing naked nucleic acid sequences into target cells is the transitory nature of the polynucleotide synthesis in the cells. Studies have shown that non-replicating DNA sequences can be introduced into cells to provide production of the desired polypeptide for periods of up to six months.

[1080] The polynucleotide construct can be delivered to the interstitial space of tissues within an animal, including muscle, skin, brain, lung, liver, spleen, bone marrow, thymus, heart, lymph, blood, bone, cartilage, pancreas, kidney, gall bladder, stomach, intestine, testis, ovary, uterus, rectum, nervous system, eye, gland, and connective tissue. Interstitial space of the tissues comprises the intercellular fluid, mucopolysaccharide matrix among the reticular fibers of organ tissues, elastic fibers in the walls of vessels or chambers, collagen fibers of fibrous tissues, or that same matrix within connective tissue ensheathing muscle cells or in the lacunae of bone. It is similarly the space occupied by the plasma of the circulation and the lymph fluid of the lymphatic channels. Delivery to the interstitial space of muscle tissue is preferred for the reasons discussed below. They may be conveniently delivered by injection into the tissues comprising these cells. They are preferably delivered to and expressed in persistent, non-dividing cells which are differentiated, although delivery and expression may be achieved in non-differentiated or less completely differentiated cells, such as, for example, stem cells of blood or skin fibroblasts. In vivo muscle cells are particularly competent in their ability to take up and express polynucleotides.

[1081] For the naked polynucleotide injection, an effective dosage amount of DNA or RNA will be in the range of from about 0.05 g/kg body weight to about 50 mg/kg body weight. Preferably the dosage will be from about 0.005 mg/kg to about 20 mg/kg and more preferably from about 0.05 mg/kg to about 5 mg/kg. Of course, as the artisan of ordinary skill will appreciate, this dosage will vary according to the tissue site of injection. The appropriate and effective dosage of nucleic acid sequence can readily be determined by those of ordinary skill in the art and may depend on the condition being treated and the route of administration. The preferred route of administration is by the parenteral route of injection into the interstitial space of tissues. However, other parenteral routes may also be used, such as, inhalation of an aerosol formulation particularly for delivery to lungs or bronchial tissues, throat or mucous membranes of the nose. In addition, naked polynucleotide constructs can be delivered to arteries during angioplasty by the catheter used in the procedure.

[1082] The dose response effects of injected polynucleotide in muscle in vivo is determined as follows. Suitable template DNA for production of mRNA coding for polypeptide of the present invention is prepared in accordance with a standard recombinant DNA methodology. The template DNA, which may be either circular or linear, is either used as naked DNA or complexed with liposomes. The quadriceps muscles of mice are then injected with various amounts of the template DNA.

[1083] Five to six week old female and male Balb/C mice are anesthetized by intraperitoneal injection with 0.3 ml of 2.5% Avertin. A 1.5 cm incision is made on the anterior thigh, and the quadriceps muscle is directly visualized. The template DNA is injected in 0.1 ml of carrier in a 1 cc syringe through a 27 gauge needle over one minute, approximately 0.5 cm from the distal insertion site of the muscle into the knee and about 0.2 cm deep. A suture is placed over the injection site for future localization, and the skin is closed with stainless steel clips.

[1084] After an appropriate incubation time (e.g., 7 days) muscle extracts are prepared by excising the entire quadriceps. Every fifth 15 um cross-section of the individual quadriceps muscles is histochemically stained for protein expression. A time course for protein expression may be done in a similar fashion except that quadriceps from different mice are harvested at different times. Persistence of DNA in muscle following injection may be determined by Southern blot analysis after preparing total cellular DNA and HIRT supernatants from injected and control mice. The results of the above experimentation in mice can be used to extrapolate proper dosages and other treatment parameters in humans and other animals using naked DNA.

### Example 19

[1085] Transgenic Animals

[1086] The polypeptides of the invention can also be expressed in transgenic animals. Animals of any species, including, but not limited to, mice, rats, rabbits, hamsters, guinea pigs, pigs, micro-pigs, goats, sheep, cows and non-human primates, e.g., baboons, monkeys, and chimpanzees may be used to generate transgenic animals. In a specific embodiment, techniques described herein or otherwise known in the art, are used to express polypeptides of the invention in humans, as part of a gene therapy protocol.

[1087] Any technique known in the art may be used to introduce the transgene (i.e., polynucleotides of the invention) into animals to produce the founder lines of transgenic animals. Such techniques include, but are not limited to, pronuclear microinjection (Paterson et al., Appl. Microbiol. Biotechnol. 40:691-698 (1994); Carver et al., Biotechnology (NY) 11:1263-1270 (1993); Wright et al., Biotechnology (NY) 9:830-834 (1991); and Hoppe et al., U.S. Pat. No. 4,873,191 (1989)); retrovirus mediated gene transfer into germ lines (Van der Putten et al., Proc. Natl. Acad. Sci., USA 82:6148-6152 (1985)), blastocysts or embryos; gene targeting in embryonic stem cells (Thompson et al., Cell 56:313-321 (1989)); electroporation of cells or embryos (Lo, 1983, Mol Cell. Biol. 3:1803-1814 (1983)); introduction of the polynucleotides of the invention using a gene gun (see, e.g., Ulmer et al., Science 259:1745 (1993); introducing nucleic acid constructs into embryonic pleuripotent stem cells and transferring the stem cells back into the blastocyst; and sperm-mediated gene transfer (Lavitrano et al., Cell 57:717-723 (1989); etc. For a review of such techniques, see Gordon, “Transgenic Animals,” Intl. Rev. Cytol. 115:171-229 (1989), which is incorporated by reference herein in its entirety.

[1088] Any technique known in the art may be used to produce transgenic clones containing polynucleotides of the invention, for example, nuclear transfer into enucleated oocytes of nuclei from cultured embryonic, fetal, or adult cells induced to quiescence (Campell et al., Nature 380:64-66 (1996); Wilmut et al., Nature 385:810-813 (1997)).

[1089] The present invention provides for transgenic animals that carry the transgene in all their cells, as well as animals which carry the transgene in some, but not all their cells, i.e., mosaic animals or chimeric. The transgene may be integrated as a single transgene or as multiple copies such as in concatamers, e.g., head-to-head tandems or head-to-tail tandems. The transgene may also be selectively introduced into and activated in a particular cell type by following, for example, the teaching of Lasko et al. (Lasko et al., Proc. Natl. Acad. Sci. USA 89:62326236 (1992)). The regulatory sequences required for such a cell-type specific activation will depend upon the particular cell type of interest, and will be apparent to those of skill in the art. When it is desired that the polynucleotide transgene be integrated into the chromosomal site of the endogenous gene, gene targeting is preferred. Briefly, when such a technique is to be utilized, vectors containing some nucleotide sequences homologous to the endogenous gene are designed for the purpose of integrating, via homologous recombination with chromosomal sequences, into and disrupting the function of the nucleotide sequence of the endogenous gene. The transgene may also be selectively introduced into a particular cell type, thus inactivating the endogenous gene in only that cell type, by following, for example, the teaching of Gu et al. (Gu et al., Science 265:103-106 (1994)). The regulatory sequences required for such a cell-type specific inactivation will depend upon the particular cell type of interest, and will be apparent to those of skill in the art.

[1090] Once transgenic animals have been generated, the expression of the recombinant gene may be assayed utilizing standard techniques. Initial screening may be accomplished by Southern blot analysis or PCR techniques to analyze animal tissues to verify that integration of the transgene has taken place. The level of mRNA expression of the transgene in the tissues of the transgenic animals may also be assessed using techniques which include, but are not limited to, Northern blot analysis of tissue samples obtained from the animal, in situ hybridization analysis, and reverse transcriptase-PCR (rt-PCR). Samples of transgenic gene-expressing tissue may also be evaluated immunocytochemically or immunohistochemically using antibodies specific for the transgene product.

[1091] Once the founder animals are produced, they may be bred, inbred, outbred, or crossbred to produce colonies of the particular animal. Examples of such breeding strategies include, but are not limited to: outbreeding of founder animals with more than one integration site in order to establish separate lines; inbreeding of separate lines in order to produce compound transgenics that express the transgene at higher levels because of the effects of additive expression of each transgene; crossing of heterozygous transgenic animals to produce animals homozygous for a given integration site in order to both augment expression and eliminate the need for screening of animals by DNA analysis; crossing of separate homozygous lines to produce compound heterozygous or homozygous lines; and breeding to place the transgene on a distinct background that is appropriate for an experimental model of interest.

[1092] Transgenic animals of the invention have uses which include, but are not limited to, animal model systems useful in elaborating the biological function of polypeptides of the present invention, studying conditions and/or disorders associated with aberrant expression, and in screening for compounds effective in ameliorating such conditions and/or disorders.

### Example 20

[1093] Knock-Out Animals

[1094] Endogenous gene expression can also be reduced by inactivating or “knocking out” the gene and/or its promoter using targeted homologous recombination. (e.g., see Smithies et al., Nature 317:230-234 (1985); Thomas & Capecchi, Cell 51:503-512 (1987); Thompson et al., Cell 5:313-321 (1989); each of which is incorporated by reference herein in its entirety). For example, a mutant, non-functional polynucleotide of the invention (or a completely unrelated DNA sequence) flanked by DNA homologous to the endogenous polynucleotide sequence (either the coding regions or regulatory regions of the gene) can be used, with or without a selectable marker and/or a negative selectable marker, to transfect cells that express polypeptides of the invention in vivo. In another embodiment, techniques known in the art are used to generate knockouts in cells that contain, but do not express the gene of interest. Insertion of the DNA construct, via targeted homologous recombination, results in inactivation of the targeted gene. Such approaches are particularly suited in research and agricultural fields where modifications to embryonic stem cells can be used to generate animal offspring with an inactive targeted gene (e.g., see Thomas & Capecchi 1987 and Thompson 1989, supra). However this approach can be routinely adapted for use in humans provided the recombinant DNA constructs are directly administered or targeted to the required site in vivo using appropriate viral vectors that will be apparent to those of skill in the art.

[1095] In further embodiments of the invention, cells that are genetically engineered to express the polypeptides of the invention, or alternatively, that are genetically engineered not to express the polypeptides of the invention (e.g., knockouts) are administered to a patient in vivo. Such cells may be obtained from the patient (i.e., animal, including human) or an MHC compatible donor and can include, but are not limited to fibroblasts, bone marrow cells, blood cells (e.g., lymphocytes), adipocytes, muscle cells, endothelial cells etc. The cells are genetically engineered in vitro using recombinant DNA techniques to introduce the coding sequence of polypeptides of the invention into the cells, or alternatively, to disrupt the coding sequence and/or endogenous regulatory sequence associated with the polypeptides of the invention, e.g., by transduction (using viral vectors, and preferably vectors that integrate the transgene into the cell genome) or transfection procedures, including, but not limited to, the use of plasmids, cosmids, YACs, naked DNA, electroporation, liposomes, etc. The coding sequence of the polypeptides of the invention can be placed under the control of a strong constitutive or inducible promoter or promoter/enhancer to achieve expression, and preferably secretion, of the polypeptides of the invention. The engineered cells which express and preferably secrete the polypeptides of the invention can be introduced into the patient systemically, e.g., in the circulation, or intraperitoneally.

[1096] Alternatively, the cells can be incorporated into a matrix and implanted in the body, e.g., genetically engineered fibroblasts can be implanted as part of a skin graft; genetically engineered endothelial cells can be implanted as part of a lymphatic or vascular graft. (See, for example, Anderson et al. U.S. Pat. No. 5,399,349; and Mulligan & Wilson, U.S. Pat. No. 5,460,959 each of which is incorporated by reference herein in its entirety).

[1097] When the cells to be administered are non-autologous or non-MHC compatible cells, they can be administered using well known techniques which prevent the development of a host immune response against the introduced cells. For example, the cells may be introduced in an encapsulated form which, while allowing for an exchange of components with the immediate extracellular environment, does not allow the introduced cells to be recognized by the host immune system.

[1098] Transgenic and “knock-out” animals of the invention have uses which include, but are not limited to, animal model systems useful in elaborating the biological function of polypeptides of the present invention, studying conditions and/or disorders associated with aberrant expression, and in screening for compounds effective in ameliorating such conditions and/or disorders.

### Example 21

[1099] Assays Detecting Stimulation or Inhibition of B cell Proliferation and Differentiation

[1100] Generation of functional humoral immune responses requires both soluble and cognate signaling between B-lineage cells and their microenvironment. Signals may impart a positive stimulus that allows a B-lineage cell to continue its programmed development, or a negative stimulus that instructs the cell to arrest its current developmental pathway. To date, numerous stimulatory and inhibitory signals have been found to influence B cell responsiveness including IL-2, IL-4, IL-5, IL-6, IL-7, IL10, IL-13, IL-14 and IL-15. Interestingly, these signals are by themselves weak effectors but can, in combination with various co-stimulatory proteins, induce activation, proliferation, differentiation, homing, tolerance and death among B cell populations.

[1101] One of the best studied classes of B-cell co-stimulatory proteins is the TNF-superfamily. Within this family CD40, CD27, and CD30 along with their respective ligands CD154, CD70, and CD153 have been found to regulate a variety of immune responses. Assays which allow for the detection and/or observation of the proliferation and differentiation of these B-cell populations and their precursors are valuable tools in determining the effects various proteins may have on these B-cell populations in terms of proliferation and differentiation. Listed below are two assays designed to allow for the detection of the differentiation, proliferation, or inhibition of B-cell populations and their precursors.

[1102] In Vitro Assay—Agonists or antagonists of the invention can be assessed for its ability to induce activation, proliferation, differentiation or inhibition and/or death in B-cell populations and their precursors. The activity of the agonists or antagonists of the invention on purified human tonsillar B cells, measured qualitatively over the dose range from 0.1 to 10,000 ng/mL, is assessed in a standard B-lymphocyte co-stimulation assay in which purified tonsillar B cells are cultured in the presence of either formalin-fixed Staphylococcus aureus Cowan I (SAC) or immobilized anti-human IgM antibody as the priming agent. Second signals such as IL-2 and IL-15 synergize with SAC and IgM crosslinking to elicit B cell proliferation as measured by tritiated-thymidine incorporation. Novel synergizing agents can be readily identified using this assay. The assay involves isolating human tonsillar B cells by magnetic bead (MACS) depletion of CD3-positive cells. The resulting cell population is greater than 95% B cells as assessed by expression of CD45R(B220).

[1103] Various dilutions of each sample are placed into individual wells of a 96-well plate to which are added 10⁵ B-cells suspended in culture medium (RPMI 1640 containing 10% FBS, 5×10⁻⁵M 2ME, 100 U/ml penicillin, 10 ug/ml streptomycin, and 10⁻⁵ dilution of SAC) in a total volume of 150 ul. Proliferation or inhibition is quantitated by a 20 h pulse (1 uCi/well) with 3H-thymidine (6.7 Ci/mM) beginning 72 h post factor addition. The positive and negative controls are IL2 and medium respectively.

[1104] In vivo Assay—BALB/c mice are injected (i.p.) twice per day with buffer only, or 2 mg/Kg of agonists or antagonists of the invention, or truncated forms thereof. Mice receive this treatment for 4 consecutive days, at which time they are sacrificed and various tissues and serum collected for analyses. Comparison of H&E sections from normal spleens and spleens treated with agonists or antagonists of the invention identify the results of the activity of the agonists or antagonists on spleen cells, such as the diffusion of peri-arterial lymphatic sheaths, and/or significant increases in the nucleated cellularity of the red pulp regions, which may indicate the activation of the differentiation and proliferation of B-cell populations. Immunohistochemical studies using a B cell marker, anti-CD45R(B220), are used to determine whether any physiological changes to splenic cells, such as splenic disorganization, are due to increased B-cell representation within loosely defined B-cell zones that infiltrate established T-cell regions.

[1105] Flow cytometric analyses of the spleens from mice treated with agonist or antagonist is used to indicate whether the agonists or antagonists specifically increases the proportion of ThB+, CD45R(B220)dull B cells over that which is observed in control mice.

[1106] Likewise, a predicted consequence of increased mature B-cell representation in vivo is a relative increase in serum Ig titers. Accordingly, serum IgM and IgA levels are compared between buffer and agonists or antagonists-treated mice.

[1107] The studies described in this example tested activity of agonists or antagonists of the invention. However, one skilled in the art could easily modify the exemplified studies to test the activity of polynucleotides or polypeptides of the invention (e.g., gene therapy).

### Example 22

[1108] T Cell Proliferation Assay

[1109] A CD3-induced proliferation assay is performed on PBMCs and is measured by the uptake of ³H-thymidine. The assay is performed as follows. Ninety-six well plates are coated with 100 μl/well of mAb to CD3 (HIT3a, Pharmingen) or isotype-matched control mAb (B33.1) overnight at 4 degrees C. (1 μg/ml in 0.05M bicarbonate buffer, pH 9.5), then washed three times with PBS. PBMC are isolated by F/H gradient centrifugation from human peripheral blood and added to quadruplicate wells (5×10⁴/well) of mAb coated plates in RPMI containing 10% FCS and P/S in the presence of varying concentrations of agonists or antagonists of the invention (total volume 200 ul). Relevant protein buffer and medium alone are controls. After 48 hr. culture at 37 degrees C., plates are spun for 2 min. at 1000 rpm and 100 μl of supernatant is removed and stored −20 degrees C. for measurement of IL-2 (or other cytokines) if effect on proliferation is observed. Wells are supplemented with 100 ul of medium containing 0.5 uCi of ³H-thymidine and cultured at 37 degrees C. for 18-24 hr. Wells are harvested and incorporation of ³H-thymidine used as a measure of proliferation. Anti-CD3 alone is the positive control for proliferation. IL-2 (100 U/ml) is also used as a control which enhances proliferation. Control antibody which does not induce proliferation of T cells is used as the negative control for the effects of agonists or antagonists of the invention.

[1110] The studies described in this example tested activity of agonists or antagonists of the invention. However, one skilled in the art could easily modify the exemplified studies to test the activity of polynucleotides or polypeptides of the invention (e.g., gene therapy).

### Example 23

[1111] Effect of Agonists or Antagonists of the Invention on the Expression of MHC Class II, Costimulatory and Adhesion Molecules and Cell Differentiation of Monocytes and Monocyte-Derived Human Dendritic Cells

[1112] Dendritic cells are generated by the expansion of proliferating precursors found in the peripheral blood: adherent PBMC or elutriated monocytic fractions are cultured for 7-10 days with GM-CSF (50 ng/ml) and IL-4 (20 ng/ml). These dendritic cells have the characteristic phenotype of immature cells (expression of CD1, CD80, CD86, CD40 and MHC class II antigens). Treatment with activating factors, such as TNF-α, causes a rapid change in surface phenotype (increased expression of MHC class I and II, costimulatory and adhesion molecules, downregulation of FCγRII, upregulation of CD83). These changes correlate with increased antigen-presenting capacity and with functional maturation of the dendritic cells.

[1113] FACS analysis of surface antigens is performed as follows. Cells are treated 1-3 days with increasing concentrations of agonist or antagonist of the invention or LPS (positive control), washed with PBS containing 1% BSA and 0.02 mM sodium azide, and then incubated with 1:20 dilution of appropriate FITC- or PE-labeled monoclonal antibodies for 30 minutes at 4 degrees C. After an additional wash, the labeled cells are analyzed by flow cytometry on a FACScan (Becton Dickinson).

[1114] Effect on the production of cytokines. Cytokines generated by dendritic cells, in particular IL-12, are important in the initiation of T-cell dependent immune responses. IL-12 strongly influences the development of Th1 helper T-cell immune response, and induces cytotoxic T and NK cell function. An ELISA is used to measure the IL-12 release as follows. Dendritic cells (10⁶/ml) are treated with increasing concentrations of agonists or antagonists of the invention for 24 hours. LPS (100 ng/ml) is added to the cell culture as positive control. Supernatants from the cell cultures are then collected and analyzed for IL-12 content using commercial ELISA kit (e.g., R & D Systems (Minneapolis, Minn.)). The standard protocols provided with the kits are used.

[1115] Effect on the expression of MHC Class II, costimulatory and adhesion molecules. Three major families of cell surface antigens can be identified on monocytes: adhesion molecules, molecules involved in antigen presentation, and Fc receptor. Modulation of the expression of MHC class II antigens and other costimulatory molecules, such as B7 and ICAM-1, may result in changes in the antigen presenting capacity of monocytes and ability to induce T cell activation. Increased expression of Fc receptors may correlate with improved monocyte cytotoxic activity, cytokine release and phagocytosis.

[1116] FACS analysis is used to examine the surface antigens as follows. Monocytes are treated 1-5 days with increasing concentrations of agonists or antagonists of the invention or LPS (positive control), washed with PBS containing 1% BSA and 0.02 mM sodium azide, and then incubated with 1:20 dilution of appropriate FITC- or PE-labeled monoclonal antibodies for 30 minutes at 4 degrees C. After an additional wash, the labeled cells are analyzed by flow cytometry on a FACScan (Becton Dickinson).

[1117] Monocyte activation and/or increased survival. Assays for molecules that activate (or alternatively, inactivate) monocytes and/or increase monocyte survival (or alternatively, decrease monocyte survival) are known in the art and may routinely be applied to determine whether a molecule of the invention functions as an inhibitor or activator of monocytes. Agonists or antagonists of the invention can be screened using the three assays described below. For each of these assays, Peripheral blood mononuclear cells (PBMC) are purified from single donor leukopacks (American Red Cross, Baltimore, Md.) by centrifugation through a Histopaque gradient (Sigma). Monocytes are isolated from PBMC by counterflow centrifugal elutriation.

[1118] Monocyte Survival Assay. Human peripheral blood monocytes progressively lose viability when cultured in absence of serum or other stimuli. Their death results from internally regulated processes (apoptosis). Addition to the culture of activating factors, such as TNF-alpha dramatically improves cell survival and prevents DNA fragmentation. Propidium iodide (PI) staining is used to measure apoptosis as follows. Monocytes are cultured for 48 hours in polypropylene tubes in serum-free medium (positive control), in the presence of 100 ng/ml TNF-alpha (negative control), and in the presence of varying concentrations of the compound to be tested. Cells are suspended at a concentration of 2×10⁶/ml in PBS containing PI at a final concentration of 5 μg/ml, and then incubated at room temperature for 5 minutes before FACScan analysis. PI uptake has been demonstrated to correlate with DNA fragmentation in this experimental paradigm.

[1119] Effect on cytokine release. An important function of monocytes/macrophages is their regulatory activity on other cellular populations of the immune system through the release of cytokines after stimulation. An ELISA to measure cytokine release is performed as follows. Human monocytes are incubated at a density of 5×10⁵ cells/ml with increasing concentrations of agonists or antagonists of the invention and under the same conditions, but in the absence of agonists or antagonists. For IL-12 production, the cells are primed overnight with IFN (100 U/ml) in the presence of agonist or antagonist of the invention. LPS (10 ng/ml) is then added. Conditioned media are collected after 24 h and kept frozen until use. Measurement of TNF-alpha, IL-10, MCP-1 and IL-8 is then performed using a commercially available ELISA kit (e.g., R & D Systems (Minneapolis, Minn.)) and applying the standard protocols provided with the kit.

[1120] Oxidative burst. Purified monocytes are plated in 96-w plate at 2-1×10⁵ cell/well. Increasing concentrations of agonists or antagonists of the invention are added to the wells in a total volume of 0.2 ml culture medium (RPMI 1640+10% FCS, glutamine and antibiotics). After 3 days incubation, the plates are centrifuged and the medium is removed from the wells. To the macrophage monolayers, 0.2 ml per well of phenol red solution (140 mM NaCl, 10 mM potassium phosphate buffer pH 7.0, 5.5 mM dextrose, 0.56 mM phenol red and 19 U/ml of HRPO) is added, together with the stimulant (200 nM PMA). The plates are incubated at 37° C. for 2 hours and the reaction is stopped by adding 20 μl 1N NaOH per well. The absorbance is read at 610 nm. To calculate the amount of H₂O₂ produced by the macrophages, a standard curve of a H₂O₂ solution of known molarity is performed for each experiment.

[1121] The studies described in this example tested activity of agonists or antagonists of the invention. However, one skilled in the art could easily modify the exemplified studies to test the activity of polynucleotides or polypeptides of the invention (e.g., gene therapy).

### Example 24

[1122] Biological Effects of Agonists or Antagonists of the Invention Astrocyte and Neuronal Assays

[1123] Agonists or antagonists of the invention, expressed in Escherichia coli and purified as described above, can be tested for activity in promoting the survival, neurite outgrowth, or phenotypic differentiation of cortical neuronal cells and for inducing the proliferation of glial fibrillary acidic protein immunopositive cells, astrocytes. The selection of cortical cells for the bioassay is based on the prevalent expression of FGF-1 and FGF-2 in cortical structures and on the previously reported enhancement of cortical neuronal survival resulting from FGF-2 treatment. A thymidine incorporation assay, for example, can be used to elucidate an agonist or antagonist of the invention's activity on these cells.

[1124] Moreover, previous reports describing the biological effects of FGF-2 (basic FGF) on cortical or hippocampal neurons in vitro have demonstrated increases in both neuron survival and neurite outgrowth (Walicke et al., “Fibroblast growth factor promotes survival of dissociated hippocampal neurons and enhances neurite extension.” Proc. Natl Acad. Sci. USA 83:3012-3016. (1986), assay herein incorporated by reference in its entirety). However, reports from experiments done on PC-12 cells suggest that these two responses are not necessarily synonymous and may depend on not only which FGF is being tested but also on which receptor(s) are expressed on the target cells. Using the primary cortical neuronal culture paradigm, the ability of an agonist or antagonist of the invention to induce neurite outgrowth can be compared to the response achieved with FGF-2 using, for example, a thymidine incorporation assay.

[1125] Fibroblast and Endothelial Cell Assays

[1126] Human lung fibroblasts are obtained from Clonetics (San Diego, Calif.) and maintained in growth media from Clonetics. Dermal microvascular endothelial cells are obtained from Cell Applications (San Diego, Calif.). For proliferation assays, the human lung fibroblasts and dermal microvascular endothelial cells can be cultured at 5,000 cells/well in a 96-well plate for one day in growth medium. The cells are then incubated for one day in 0.1% BSA basal medium. After replacing the medium with fresh 0.1% BSA medium, the cells are incubated with the test proteins for 3 days. Alamar Blue (Alamar Biosciences, Sacramento, Calif.) is added to each well to a final concentration of 10%. The cells are incubated for 4 hr. Cell viability is measured by reading in a CytoFluor fluorescence reader. For the PGE₂ assays, the human lung fibroblasts are cultured at 5,000 cells/well in a 96-well plate for one day. After a medium change to 0.1% BSA basal medium, the cells are incubated with FGF-2 or agonists or antagonists of the invention with or without IL-1α for 24 hours. The supernatants are collected and assayed for PGE₂ by EIA kit (Cayman, Ann Arbor, Mich.). For the IL-6. assays, the human lung fibroblasts are cultured at 5,000 cells/well in a 96-well plate for one day. After a medium change to 0.1% BSA basal medium, the cells are incubated with FGF-2 or with or without agonists or antagonists of the invention IL-1α for 24 hours. The supernatants are collected and assayed for IL-6 by ELISA kit (Endogen, Cambridge, Mass.).

[1127] Human lung fibroblasts are cultured with FGF-2 or agonists or antagonists of the invention for 3 days in basal medium before the addition of Alamar Blue to assess effects on growth of the fibroblasts. FGF-2 should show a stimulation at 10-2500 ng/ml which can be used to compare stimulation with agonists or antagonists of the invention.

[1128] Parkinson Models

[1129] The loss of motor function in Parkinson's disease is attributed to a deficiency of striatal dopamine resulting from the degeneration of the nigrostriatal dopaminergic projection neurons. An animal model for Parkinson's that has been extensively characterized involves the systemic administration of 1-methyl-4 phenyl 1,2,3,6-tetrahydropyridine (MPTP). In the CNS, MPTP is taken-up by astrocytes and catabolized by monoamine oxidase B to 1-methyl-4-phenyl pyridine (MPP⁺) and released. Subsequently, MPP⁺ is actively accumulated in dopaminergic neurons by the high-affinity reuptake transporter for dopamine. MPP⁺ is then concentrated in mitochondria by the electrochemical gradient and selectively inhibits nicotidamide adenine disphosphate: ubiquinone oxidoreductionase (complex I), thereby interfering with electron transport and eventually generating oxygen radicals.

[1130] It has been demonstrated in tissue culture paradigms that FGF-2 (basic FGF) has trophic activity towards nigral dopaminergic neurons (Ferrari et al., Dev. Biol. 1989). Recently, Dr. Unsicker's group has demonstrated that administering FGF-2 in gel foam implants in the striatum results in the near complete protection of nigral dopaminergic neurons from the toxicity associated with MPTP exposure (Otto and Unsicker, J. Neuroscience, 1990).

[1131] Based on the data with FGF-2, agonists or antagonists of the invention can be evaluated to determine whether it has an action similar to that of FGF-2 in enhancing dopaminergic neuronal survival in vitro and it can also be tested in vivo for protection of dopaminergic neurons in the striatum from the damage associated with MPTP treatment. The potential effect of an agonist or antagonist of the invention is first examined in vitro in a dopaminergic neuronal cell culture paradigm. The cultures are prepared by dissecting the midbrain floor plate from gestation day 14 Wistar rat embryos. The tissue is dissociated with trypsin and seeded at a density of 200,000 cells/cm² on polyorthinine-laminin coated glass coverslips. The cells are maintained in Dulbecco's Modified Eagle's medium and F12 medium containing hormonal supplements (N1). The cultures are fixed with paraformaldehyde after 8 days in vitro and are processed for tyrosine hydroxylase, a specific marker for dopaminergic neurons, immunohistochemical staining. Dissociated cell cultures are prepared from embryonic rats. The culture medium is changed every third day and the factors are also added at that time.

[1132] Since the dopaminergic neurons are isolated from animals at gestation day 14, a developmental time which is past the stage when the dopaminergic precursor cells are proliferating, an increase in the number of tyrosine hydroxylase immunopositive neurons would represent an increase in the number of dopaminergic neurons surviving in vitro. Therefore, if an agonist or antagonist of the invention acts to prolong the survival of dopaminergic neurons, it would suggest that the agonist or antagonist may be involved in Parkinson's Disease.

[1133] The studies described in this example tested activity of agonists or antagonists of the invention. However, one skilled in the art could easily modify the exemplified studies to test the activity of polynucleotides or polypeptides of the invention (e.g., gene therapy).

### Example 25

[1134] The Effect of Agonists or Antagonists of the Invention on the Growth of Vascular Endothelial Cells

[1135] On day 1, human umbilical vein endothelial cells (HUVEC) are seeded at 2-5×10⁴ cells/35 mm dish density in M199 medium containing 4% fetal bovine serum (FBS), 16 units/ml heparin, and 50 units/ml endothelial cell growth supplements (ECGS, Biotechnique, Inc.). On day 2, the medium is replaced with M199 containing 10% FBS, 8 units/ml heparin. An agonist or antagonist of the invention, and positive controls, such as VEGF and basic FGF (bFGF) are added, at varying concentrations. On days 4 and 6, the medium is replaced. On day 8, cell number is determined with a Coulter Counter.

[1136] An increase in the number of HUVEC cells indicates that the compound of the invention may proliferate vascular endothelial cells, while a decrease in the number of HUVEC cells indicates that the compound of the invention inhibits vascular endothelial cells.

[1137] The studies described in this example tested activity of a polypeptide of the invention. However, one skilled in the art could easily modify the exemplified studies to test the activity of polynucleotides (e.g., gene therapy), agonists, and/or antagonists of the invention.

### Example 26

[1138] Rat Corneal Wound Healing Model

[1139] This animal model shows the effect of an agonist or antagonist of the invention on neovascularization. The experimental protocol includes:

[1140] a) Making a 1-1.5 mm long incision from the center of cornea into the stromal layer.

[1141] b) Inserting a spatula below the lip of the incision facing the outer comer of the eye.

[1142] c) Making a pocket (its base is 1-1.5 mm form the edge of the eye).

[1143] d) Positioning a pellet, containing 50 ng-5 ug of an agonist or antagonist of the invention, within the pocket.

[1144] e) Treatment with an agonist or antagonist of the invention can also be applied topically to the cornmeal wounds in a dosage range of 20 mg -500 mg (daily treatment for five days).

[1145] The studies described in this example tested activity of agonists or antagonists of the invention. However, one skilled in the art could easily modify the exemplified studies to test the activity of polynucleotides or polypeptides of the invention (e.g., gene therapy).

### Example 27

[1146] Diabetic Mouse and Glucocorticoid-Impaired Wound Healing Models

[1147] Diabetic db+/db+ Mouse Model

[1148] To demonstrate that an agonist or antagonist of the invention accelerates the healing process, the genetically diabetic mouse model of wound healing is used. The full thickness wound healing model in the db+/db+ mouse is a well characterized, clinically relevant and reproducible model of impaired wound healing. Healing of the diabetic wound is dependent on formation of granulation tissue and re-epithelialization rather than contraction (Gartner, M. H. et al., J. Surg. Res. 52:389 (1992); Greenhalgh, D. G. et al., Am. J. Pathol. 136:1235 (1990)).

[1149] The diabetic animals have many of the characteristic features observed in Type II diabetes mellitus. Homozygous (db+/db+) mice are obese in comparison to their normal heterozygous (db+/+m) littermates. Mutant diabetic (db+/db+) mice have a single autosomal recessive mutation on chromosome 4 (db+) (Coleman et al. Proc. Natl. Acad. Sci. USA 77:283-293 (1982)). Animals show polyphagia, polydipsia and polyuria. Mutant diabetic mice (db+/db+) have elevated blood glucose, increased or normal insulin levels, and suppressed cell-mediated immunity (Mandel et al., J. Immunol. 120:1375 (1978); Debray-Sachs, M. et al., Clin. Exp. Immunol. 51(1):1-7 (1983); Leiter et al., Am. J. of Pathol. 114:46-55 (1985)). Peripheral neuropathy, myocardial complications, and microvascular lesions, basement membrane thickening and glomerular filtration abnormalities have been described in these animals (Norido, F. et al., Exp. Neurot. 83(2):221-232 (1984); Robertson et al., Diabetes 29(1):60-67 (1980); Giacomelli et al., Lab Invest. 40(4):460-473 (1979); Coleman, D. L., Diabetes 31 (Suppl):1-6 (1982)). These homozygous diabetic mice develop hyperglycemia that is resistant to insulin analogous to human type II diabetes (Mandel et al., J. Immunol. 120:1375-1377 (1978)).

[1150] The characteristics observed in these animals suggests that healing in this model may be similar to the healing observed in human diabetes (Greenhalgh, et al., Am. J. of Pathol. 136:1235-1246 (1990)).

[1151] Genetically diabetic female C57BL/KsJ (db+/db+) mice and their non-diabetic (db+/+m) heterozygous littermates are used in this study (Jackson Laboratories). The animals are purchased at 6 weeks of age and are 8 weeks old at the beginning of the study. Animals are individually housed and received food and water ad libitum. All manipulations are performed using aseptic techniques. The experiments are conducted according to the rules and guidelines of Human Genome Sciences, Inc. Institutional Animal Care and Use Committee and the Guidelines for the Care and Use of Laboratory Animals.

[1152] Wounding protocol is performed according to previously reported methods (Tsuboi, R. and Rifkin, D. B., J. Exp. Med. 172:245-251 (1990)). Briefly, on the day of wounding, animals are anesthetized with an intraperitoneal injection of Avertin (0.01 mg/mL), 2,2,2-tribromoethanol and 2-methyl-2-butanol dissolved in deionized water. The dorsal region of the animal is shaved and the skin washed with 70% ethanol solution and iodine. The surgical area is dried with sterile gauze prior to wounding. An 8 mm fall-thickness wound is then created using a Keyes tissue punch. Immediately following wounding, the surrounding skin is gently stretched to eliminate wound expansion. The wounds are left open for the duration of the experiment. Application of the treatment is given topically for 5 consecutive days commencing on the day of wounding. Prior to treatment, wounds are gently cleansed with sterile saline and gauze sponges.

[1153] Wounds are visually examined and photographed at a fixed distance at the day of surgery and at two day intervals thereafter. Wound closure is determined by daily measurement on days 1-5 and on day 8. Wounds are measured horizontally and vertically using a calibrated Jameson caliper. Wounds are considered healed if granulation tissue is no longer visible and the wound is covered by a continuous epithelium.

[1154] An agonist or antagonist of the invention is administered using at a range different doses, from 4 mg to 500 mg per wound per day for 8 days in vehicle. Vehicle control groups received 50 mL of vehicle solution.

[1155] Animals are euthanized on day 8 with an intraperitoneal injection of sodium pentobarbital (300 mg/kg). The wounds and surrounding skin are then harvested for histology and immunohistochemistry. Tissue specimens are placed in 10% neutral buffered formalin in tissue cassettes between biopsy sponges for further processing.

[1156] Three groups of 10 animals each (5 diabetic and 5 non-diabetic controls) are evaluated: 1) Vehicle placebo control, 2) untreated group, and 3) treated group.

[1157] Wound closure is analyzed by measuring the area in the vertical and horizontal axis and obtaining the total square area of the wound. Contraction is then estimated by establishing the differences between the initial wound area (day 0) and that of post treatment (day 8). The wound area on day 1 is 64 mm², the corresponding size of the dermal punch. Calculations are made using the following formula:

[Open area on day 8]−[Open area on day 1]/[Open area on day 1]

[1158] Specimens are fixed in 10% buffered formalin and paraffin embedded blocks are sectioned perpendicular to the wound surface (5 mm) and cut using a Reichert-Jung microtome. Routine hematoxylin-eosin (H&E) staining is performed on cross-sections of bisected wounds. Histologic examination of the wounds are used to assess whether the healing process and the morphologic appearance of the repaired skin is altered by treatment with an agonist or antagonist of the invention. This assessment included verification of the presence of cell accumulation, inflammatory cells, capillaries, fibroblasts, re-epithelialization and epidermal maturity (Greenhalgh, D. G. et al., Am. J. Pathol. 136:1235 (1990)). A calibrated lens micrometer is used by a blinded observer.

[1159] Tissue sections are also stained immunohistochemically with a polyclonal rabbit anti-human keratin antibody using ABC Elite detection system. Human skin is used as a positive tissue control while non-immune IgG is used as a negative control. Keratinocyte growth is determined by evaluating the extent of reepithelialization of the wound using a calibrated lens micrometer.

[1160] Proliferating cell nuclear antigen/cyclin (PCNA) in skin specimens is demonstrated by using anti-PCNA antibody (1:50) with an ABC Elite detection system. Human colon cancer served as a positive tissue control and human brain tissue is used as a negative tissue control. Each specimen included a section with omission of the primary antibody and substitution with non-immune mouse IgG. Ranking of these sections is based on the extent of proliferation on a scale of 0-8, the lower side of the scale reflecting slight proliferation to the higher side reflecting intense proliferation.

[1161] Experimental data are analyzed using an unpaired t test. A p value of <0.05 is considered significant.

[1162] Steroid Impaired Rat Model

[1163] The inhibition of wound healing by steroids has been well documented in various in vitro and in vivo systems (Wahl, Glucocorticoids and Wound healing. In: Anti-Inflammatory Steroid Action: Basic and Clinical Aspects. 280-302 (1989); Wah let al., J. Immunol. 115: 476-481 (1975); Werb et al., J. Exp. Med. 147:1684-1694 (1978)). Glucocorticoids retard wound healing by inhibiting angiogenesis, decreasing vascular permeability (Ebert et al., An. Intern. Med. 37:701-705 (1952)), fibroblast proliferation, and collagen synthesis (Beck et al., Growth Factors. 5: 295-304 (1991); Haynes et al., J. Clin. Invest. 61: 703-797 (1978)) and producing a transient reduction of circulating monocytes (Haynes et al., J. Clin. Invest. 61: 703-797 (1978); Wahl, “Glucocorticoids and wound healing”, In: Antiinflammatory Steroid Action: Basic and Clinical Aspects, Academic Press, New York, pp. 280-302 (1989)). The systemic administration of steroids to impaired wound healing is a well establish phenomenon in rats (Beck et al., Growth Factors. 5: 295-304 (1991); Haynes et al., J. Clin. Invest. 61: 703-797 (1978); Wahl, “Glucocorticoids and wound healing”, In: Antiinflammatory Steroid Action: Basic and Clinical Aspects, Academic Press, New York, pp. 280-302 (1989); Pierce et al., Proc. Natl. Acad. Sci. USA 86: 2229-2233 (1989)).

[1164] To demonstrate that an agonist or antagonist of the invention can accelerate the healing process, the effects of multiple topical applications of the agonist or antagonist on full thickness excisional skin wounds in rats in which healing has been impaired by the systemic administration of methylprednisolone is assessed.

[1165] Young adult male Sprague Dawley rats weighing 250-300 g (Charles River Laboratories) are used in this example. The animals are purchased at 8 weeks of age and are 9 weeks old at the beginning of the study. The healing response of rats is impaired by the systemic administration of methylprednisolone (17 mg/kg/rat intramuscularly) at the time of wounding. Animals are individually housed and received food and water ad libitum. All manipulations are performed using aseptic techniques. This study is conducted according to the rules and guidelines of Human Genome Sciences, Inc. Institutional Animal Care and Use Committee and the Guidelines for the Care and Use of Laboratory Animals.

[1166] The wounding protocol is followed according to section A, above. On the day of wounding, animals are anesthetized with an intramuscular injection of ketamine (50 mg/kg) and xylazine (5 mg/kg). The dorsal region of the animal is shaved and the skin washed with 70% ethanol and iodine solutions. The surgical area is dried with sterile gauze prior to wounding. An 8 mm full-thickness wound is created using a Keyes tissue punch. The wounds are left open for the duration of the experiment. Applications of the testing materials are given topically once a day for 7 consecutive days commencing on the day of wounding and subsequent to methylprednisolone administration. Prior to treatment, wounds are gently cleansed with sterile saline and gauze sponges.

[1167] Wounds are visually examined and photographed at a fixed distance at the day of wounding and at the end of treatment. Wound closure is determined by daily measurement on days 1-5 and on day 8. Wounds are measured horizontally and vertically using a calibrated Jameson caliper. Wounds are considered healed if granulation tissue is no longer visible and the wound is covered by a continuous epithelium.

[1168] The agonist or antagonist of the invention is administered using at a range different doses, from 4 mg to 500 mg per wound per day for 8 days in vehicle. Vehicle control groups received 50 mL of vehicle solution.

[1169] Animals are euthanized on day 8 with an intraperitoneal injection of sodium pentobarbital (300 mg/kg). The wounds and surrounding skin are then harvested for histology. Tissue specimens are placed in 10% neutral buffered formalin in tissue cassettes between biopsy sponges for further processing.

[1170] Three groups of 10 animals each (5 with methylprednisolone and 5 without glucocorticoid) are evaluated: 1) Untreated group 2) Vehicle placebo control 3) treated groups.

[1171] Wound closure is analyzed by measuring the area in the vertical and horizontal axis and obtaining the total area of the wound. Closure is then estimated by establishing the differences between the initial wound area (day 0) and that of post treatment (day 8). The wound area on day 1 is 64 mm², the corresponding size of the dermal punch. Calculations are made using the following formula:

Open area on day 8]−[Open area on day 1]/[Open area on day 1]

[1172] Specimens are fixed in 10% buffered formalin and paraffin embedded blocks are sectioned perpendicular to the wound surface (5 mm) and cut using an Olympus microtome. Routine hematoxylin-eosin (H&E) staining is performed on cross-sections of bisected wounds. Histologic examination of the wounds allows assessment of whether the healing process and the morphologic appearance of the repaired skin is improved by treatment with an agonist or antagonist of the invention. A calibrated lens micrometer is used by a blinded observer to determine the distance of the wound gap.

[1173] Experimental data are analyzed using an unpaired t test. A p value of <0.05 is considered significant.

[1174] The studies described in this example tested activity of agonists or antagonists of the invention. However, one skilled in the art could easily modify the exemplified studies to test the activity of polynucleotides or polypeptides of the invention (e.g., gene therapy).

### Example 28

[1175] Lymphadema Animal Model

[1176] The purpose of this experimental approach is to create an appropriate and consistent lymphedema model for testing the therapeutic effects of an agonist or antagonist of the invention in lymphangiogenesis and re-establishment of the lymphatic circulatory system in the rat hind limb. Effectiveness is measured by swelling volume of the affected limb, quantification of the amount of lymphatic vasculature, total blood plasma protein, and histopathology. Acute lymphedema is observed for 7-10 days. Perhaps more importantly, the chronic progress of the edema is followed for up to 3-4 weeks.

[1177] Prior to beginning surgery, blood sample is drawn for protein concentration analysis. Male rats weighing approximately ˜350 g are dosed with Pentobarbital. Subsequently, the right legs are shaved from knee to hip. The shaved area is swabbed with gauze soaked in 70% EtOH. Blood is drawn for serum total protein testing. Circumference and volumetric measurements are made prior to injecting dye into paws after marking 2 measurement levels (0.5 cm above heel, at mid-pt of dorsal paw). The intradermal dorsum of both right and left paws are injected with 0.05 ml of 1% Evan's Blue. Circumference and volumetric measurements are then made following injection of dye into paws.

[1178] Using the knee joint as a landmark, a mid-leg inguinal incision is made circumferentially allowing the femoral vessels to be located. Forceps and hemostats are used to dissect and separate the skin flaps. After locating the femoral vessels, the lymphatic vessel that runs along side and underneath the vessel(s) is located. The main lymphatic vessels in this area are then electrically coagulated or suture ligated.

[1179] Using a microscope, muscles in back of the leg (near the semitendinosis and adductors) are bluntly dissected. The popliteal lymph node is then located. The 2 proximal and 2 distal lymphatic vessels and distal blood supply of the popliteal node are then ligated by suturing. The popliteal lymph node, and any accompanying adipose tissue, is then removed by cutting connective tissues.

[1180] Care is taken to control any mild bleeding resulting from this procedure. After lymphatics are occluded, the skin flaps are sealed by using liquid skin (Vetbond) (A J Buck). The separated skin edges are sealed to the underlying muscle tissue while leaving a gap of 0.5 cm around the leg. Skin also may be anchored by suturing to underlying muscle when necessary.

[1181] To avoid infection, animals are housed individually with mesh (no bedding). Recovering animals are checked daily through the optimal edematous peak, which typically occurred by day 5-7. The plateau edematous peak are then observed. To evaluate the intensity of the lymphedema, the circumference and volumes of 2 designated places on each paw before operation and daily for 7 days are measured. The effect of plasma proteins on lymphedema is determined and whether protein analysis is a useful testing perimeter is also investigated. The weights of both control and edematous limbs are evaluated at 2 places. Analysis is performed in a blind manner.

[1182] Circumference Measurements: Under brief gas anesthetic to prevent limb movement, a cloth tape is used to measure limb circumference. Measurements are done at the ankle bone and dorsal paw by 2 different people and those 2 readings are averaged. Readings are taken from both control and edematous limbs.

[1183] Volumetric Measurements: On the day of surgery, animals are anesthetized with Pentobarbital and are tested prior to surgery. For daily volumetrics animals are under brief halothane anesthetic (rapid immobilization and quick recovery), and both legs are shaved and equally marked using waterproof marker on legs. Legs are first dipped in water, then dipped into instrument to each marked level then measured by Buxco edema software(Chen/Victor). Data is recorded by one person, while the other is dipping the limb to marked area.

[1184] Blood-plasma protein measurements: Blood is drawn, spun, and serum separated prior to surgery and then at conclusion for total protein and Ca2⁺ comparison.

[1185] Limb Weight Comparison: After drawing blood, the animal is prepared for tissue collection. The limbs are amputated using a quillitine, then both experimental and control legs are cut at the ligature and weighed. A second weighing is done as the tibio-cacaneal joint is disarticulated and the foot is weighed.

[1186] Histological Preparations: The transverse muscle located behind the knee (popliteal) area is dissected and arranged in a metal mold, filled with freezeGel, dipped into cold methylbutane, placed into labeled sample bags at −80 EC until sectioning. Upon sectioning, the muscle is observed under fluorescent microscopy for lymphatics.

[1187] The studies described in this example tested activity of agonists or antagonists of the invention. However, one skilled in the art could easily modify the exemplified studies to test the activity of polynucleotides or polypeptides of the invention (e.g., gene therapy).

### Example 29

[1188] Suppression of TNF Alpha-Induced Adhesion Molecule Expression by an Agonist or Antagonist of the Invention

[1189] The recruitment of lymphocytes to areas of inflammation and angiogenesis involves specific receptor-ligand interactions between cell surface adhesion molecules (CAMs) on lymphocytes and the vascular endothelium. The adhesion process, in both normal and pathological settings, follows a multi-step cascade that involves intercellular adhesion molecule-1 (ICAM-1), vascular cell adhesion molecule-1 (VCAM-1), and endothelial leukocyte adhesion molecule-1 (E-selectin) expression on endothelial cells (EC). The expression of these molecules and others on the vascular endothelium determines the efficiency with which leukocytes may adhere to the local vasculature and extravasate into the local tissue during the development of an inflammatory response. The local concentration of cytokines and growth factor participate in the modulation of the expression of these CAMs.

[1190] Tumor necrosis factor alpha (TNF-a), a potent proinflammatory cytokine, is a stimulator of all three CAMs on endothelial cells and may be involved in a wide variety of inflammatory responses, often resulting in a pathological outcome.

[1191] The potential of an agonist or antagonist of the invention to mediate a suppression of TNF-a induced CAM expression can be examined. A modified ELISA assay which uses ECs as a solid phase absorbent is employed to measure the amount of CAM expression on TNF-a treated ECs when co-stimulated with a member of the FGF family of proteins.

[1192] To perform the experiment, human umbilical vein endothelial cell (HUVEC) cultures are obtained from pooled cord harvests and maintained in growth medium (EGM-2; Clonetics, San Diego, Calif.) supplemented with 10% FCS and 1% penicillin/streptomycin in a 37 degree C. humidified incubator containing 5% CO₂. HUVECs are seeded in 96-well plates at concentrations of 1×10⁴ cells/well in EGM medium at 37 degree C. for 18-24 hrs or until confluent. The monolayers are subsequently washed 3 times with a serum-free solution of RPMI-1640 supplemented with 100 U/ml penicillin and 100 mg/ml streptomycin, and treated with a given cytokine and/or growth factor(s) for 24 h at 37 degree C. Following incubation, the cells are then evaluated for CAM expression.

[1193] Human Umbilical Vein Endothelial cells (HUVECs) are grown in a standard 96 well plate to confluence. Growth medium is removed from the cells and replaced with 90 ul of 199 Medium (10% FBS). Samples for testing and positive or negative controls are added to the plate in triplicate (in 10 ul volumes). Plates are incubated at 37 degree C. for either 5 h (selectin and integrin expression) or 24 h (integrin expression only). Plates are aspirated to remove medium and 100 μl of 0.1% paraformaldehyde-PBS(with Ca++ and Mg++) is added to each well. Plates are held at 4° C. for 30 min.

[1194] Fixative is then removed from the wells and wells are washed 1× with PBS(+Ca,Mg)+0.5% BSA and drained. Do not allow the wells to dry. Add 10 μl of diluted primary antibody to the test and control wells. Anti-ICAM-1-Biotin, Anti-VCAM-1-Biotin and Anti-E-selectin-Biotin are used at a concentration of 10 μg/ml (1:10 dilution of 0.1 mg/ml stock antibody). Cells are incubated at 37° C. for 30 min. in a humidified environment. Wells are washed ×3 with PBS(+Ca,Mg)+0.5% BSA.

[1195] Then add 20 μl of diluted ExtrAvidin-Alkaline Phosphotase (1:5,000 dilution) to each well and incubated at 37° C. for 30 min. Wells are washed ×3 with PBS(+Ca,Mg)+0.5% BSA. 1 tablet of p-Nitrophenol Phosphate pNPP is dissolved in 5 ml of glycine buffer (pH 10.4). 100 μl of pNPP substrate in glycine buffer is added to each test well. Standard wells in triplicate are prepared from the working dilution of the ExtrAvidin-Alkaline Phosphotase in glycine buffer: 1:5,000 (10⁰)>10^{-0.05}>10⁻¹>10^{-1.5}. 5 μl of each dilution is added to triplicate wells and the resulting AP content in each well is 5.50 ng, 1.74 ng, 0.55 ng, 0.18 ng. 100 μl of pNNP reagent must then be added to each of the standard wells. The plate must be incubated at 37° C. for 4 h. A volume of 50 μl of 3M NaOH is added to all wells. The results are quantified on a plate reader at 405 nm. The background subtraction option is used on blank wells filled with glycine buffer only. The template is set up to indicate the concentration of AP-conjugate in each standard well [5.50 ng; 1.74 ng; 0.55 ng; 0.18 ng]. Results are indicated as amount of bound AP-conjugate in each sample.

[1196] The studies described in this example tested activity of agonists or antagonists of the invention. However, one skilled in the art could easily modify the exemplified studies to test the activity of polynucleotides or polypeptides of the invention (e.g., gene therapy).

### Example 30

[1197] Production of Polypeptide of the Invention For High-Throughput Screening Assays

[1198] The following protocol produces a supernatant containing polypeptide of the present invention to be tested. This supernatant can then be used in the Screening Assays described in Examples 32-41.

[1199] First, dilute Poly-D-Lysine (644 587 Boehringer-Mannheim) stock solution (1 mg/ml in PBS) 1:20 in PBS (w/o calcium or magnesium 17-516F Biowhittaker) for a working solution of 50 ug/ml. Add 200 ul of this solution to each well (24 well plates) and incubate at RT for 20 minutes. Be sure to distribute the solution over each well (note: a 12-channel pipetter may be used with tips on every other channel). Aspirate off the Poly-D-Lysine solution and rinse with 1 ml PBS (Phosphate Buffered Saline). The PBS should remain in the well until just prior to plating the cells and plates may be poly-lysine coated in advance for up to two weeks.

[1200] Plate 293T cells (do not carry cells past P+20) at 2×10⁵ cells/well in 0.5 ml DMEM(Dulbecco's Modified Eagle Medium)(with 4.5 G/L glucose and L-glutamine (12-604F Biowhittaker))/10% heat inactivated FBS(14-503F Biowhittaker)/1×Penstrep(17-602E Biowhittaker). Let the cells grow overnight.

[1201] The next day, mix together in a sterile solution basin: 300 ul Lipofectamine (18324-012 Gibco/BRL) and 5 ml Optimem I (31985070 Gibco/BRL)/96-well plate. With a small volume multi-channel pipetter, aliquot approximately 2 ug of an expression vector containing a polynucleotide insert, produced by the methods described in Examples 8-10, into an appropriately labeled 96-well round bottom plate. With a multi-channel pipetter, add 50 ul of the Lipofectamine/Optimem I mixture to each well. Pipette up and down gently to mix. Incubate at RT 15-45 minutes. After about 20 minutes, use a multi-channel pipetter to add 150 ul Optimem I to each well. As a control, one plate of vector DNA lacking an insert should be transfected with each set of transfections.

[1202] Preferably, the transfection should be performed by tag-teaming the following tasks. By tag-teaming, hands on time is cut in half, and the cells do not spend too much time on PBS. First, person A aspirates off the media from four 24-well plates of cells, and then person B rinses each well with 0.5-1 ml PBS. Person A then aspirates off PBS rinse, and person B, using a 12-channel pipetter with tips on every other channel, adds the 200 ul of DNA/Lipofectamine/Optimem I complex to the odd wells first, then to the even wells, to each row on the 24-well plates. Incubate at 37 degree C. for 6 hours.

[1203] While cells are incubating, prepare appropriate media, either 1%BSA in DMEM with 1×penstrep, or HGS CHO-5 media (116.6 mg/L of CaCl2 (anhyd); 0.00130 mg/L CuSO₄-5H₂O; 0.050 mg/L of Fe(NO₃)₃-9H₂O; 0.417 mg/L of FeSO₄-7H₂O; 311.80 mg/L of Kcl; 28.64 mg/L of MgCl₂; 48.84 mg/L of MgSO₄; 6995.50 mg/L of NaCl; 2400.0 mg/L of NaHCO₃; 62.50 mg/L of NaH₂PO₄—H₂O; 71.02 mg/L of Na₂HPO4; 0.4320 mg/L of ZnSO₄-7H₂O; 0.002 mg/L of Arachidonic Acid ; 1.022 mg/L of Cholesterol; 0.070 mg/L of DL-alpha-Tocopherol-Acetate; 0.0520 mg/L of Linoleic Acid; 0.010 mg/L of Linolenic Acid; 0.010 mg/L of Myristic Acid; 0.010 mg/L of Oleic Acid; 0.010 mg/L of Palmitric Acid; 0.010 mg/L of Palmitic Acid; 100 mg/L of Pluronic F-68; 0.010 mg/L of Stearic Acid; 2.20 mg/L of Tween 80; 4551 mg/L of D-Glucose; 130.85 mg/ml of L-Alanine; 147.50 mg/ml of L-Arginine-HCL; 7.50 mg/ml of L-Asparagine-H₂O; 6.65 mg/ml of L-Aspartic Acid; 29.56 mg/ml of L-Cystine-2HCL—H₂O; 31.29 mg/ml of L-Cystine-2HCL; 7.35 mg/ml of L-Glutamic Acid; 365.0 mg/ml of L-Glutamine; 18.75 mg/ml of Glycine; 52.48 mg/ml of L-Histidine-HCL—H₂O; 106.97 mg/ml of L-Isoleucine; 111.45 mg/ml of L-Leucine; 163.75 mg/ml of L-Lysine HCL; 32.34 mg/ml of L-Methionine; 68.48 mg/ml of L-Phenylalainine; 40.0 mg/ml of L-Proline; 26.25 mg/ml of L-Serine; 101.05 mg/ml of L-Threonine; 19.22 mg/ml of L-Tryptophan; 91.79 mg/ml of L-Tryrosine-2Na-2H₂O; and 99.65 mg/ml of L-Valine; 0.0035 mg/L of Biotin; 3.24 mg/L of D-Ca Pantothenate; 11.78 mg/L of Choline Chloride; 4.65 mg/L of Folic Acid; 15.60 mg/L of i-Inositol; 3.02 mg/L of Niacinamide; 3.00 mg/L of Pyridoxal HCL; 0.031 mg/L of Pyridoxine HCL; 0.319 mg/L of Riboflavin; 3.17 mg/L of Thiamine HCL; 0.365 mg/L of Thymidine; 0.680 mg/L of Vitamin B₁₂; 25 mM of HEPES Buffer; 2.39 mg/L of Na Hypoxanthine; 0.105 mg/L of Lipoic Acid; 0.081 mg/L of Sodium Putrescine-2HCL; 55.0 mg/L of Sodium Pyruvate; 0.0067 mg/L of Sodium Selenite; 2 uM of Ethanolamine; 0.122 mg/L of Ferric Citrate; 41.70 mg/L of Methyl-B-Cyclodextrin complexed with Linoleic Acid; 33.33 mg/L of Methyl-B-Cyclodextrin complexed with Oleic l. Acid; 10 mg/L of Methyl-B-Cyclodextrin complexed with Retinal Acetate. Adjust osmolarity to 327 mOsm) with 2 mm glutamine and 1×penstrep. (BSA (81-068-3 Bayer) 100 gm dissolved in 1 L DMEM for a 10% BSA stock solution). Filter the media and collect 50 ul for endotoxin assay in 15 ml polystyrene conical.

[1204] The transfection reaction is terminated, preferably by tag-teaming, at the end of the incubation period. Person A aspirates off the transfection media, while person B adds 1.5 ml appropriate media to each well. Incubate at 37 degree C. for 45 or 72 hours depending on the media used: 1% BSA for 45 hours or CHO-5 for 72 hours.

[1205] On day four, using a 300 ul multichannel pipetter, aliquot 600 ul in one 1 ml deep well plate and the remaining supernatant into a 2 ml deep well. The supernatants from each well can then be used in the assays described in Examples 32-39.

[1206] It is specifically understood that when activity is obtained in any of the assays described below using a supernatant, the activity originates from either the polypeptide of the present invention directly (e.g., as a secreted protein) or by polypeptide of the present invention inducing expression of other proteins, which are then secreted into the supernatant. Thus, the invention further provides a method of identifying the protein in the supernatant characterized by an activity in a particular assay.

### Example 31

[1207] Construction of GAS Reporter Construct

[1208] One signal transduction pathway involved in the differentiation and proliferation of cells is called the Jaks-STATs pathway. Activated proteins in the Jaks-STATs pathway bind to gamma activation site “GAS” elements or interferon-sensitive responsive element (“ISRE”), located in the promoter of many genes. The binding of a protein to these elements alter the expression of the associated gene.

[1209] GAS and ISRE elements are recognized by a class of transcription factors called Signal Transducers and Activators of Transcription, or “STATs.” There are six members of the STATs family. Stat1 and Stat3 are present in many cell types, as is Stat2 (as response to IFN-alpha is widespread). Stat4 is more restricted and is not in many cell types though it has been found in T helper class I, cells after treatment with IL-12. Stat5 was originally called mammary growth factor, but has been found at higher concentrations in other cells including myeloid cells. It can be activated in tissue culture cells by many cytokines.

[1210] The STATs are activated to translocate from the cytoplasm to the nucleus upon tyrosine phosphorylation by a set of kinases known as the Janus Kinase (“Jaks”) family. Jaks represent a distinct family of soluble tyrosine kinases and include Tyk2, Jak1, Jak2, and Jak3. These kinases display significant sequence similarity and are generally catalytically inactive in resting cells.

[1211] The Jaks are activated by a wide range of receptors summarized in the Table below. (Adapted from review by Schidler and Darnell, Ann. Rev. Biochem. 64:621-51 (1995)). A cytokine receptor family, capable of activating Jaks, is divided into two groups: (a) Class 1 includes receptors for IL-2, IL-3, IL-4, IL-6, IL-7, IL-9, IL-11, IL-12, IL-15, Epo, PRL, GH, G-CSF, GM-CSF, LIF, CNTF, and thrombopoietin; and (b) Class 2 includes IFN-a, IFN-g, and IL-10. The Class 1 receptors share a conserved cysteine motif (a set of four conserved cysteines and one tryptophan) and a WSXWS motif (a membrane proximal region encoding Trp—Ser—Xaa—Trp—Ser (SEQ ID NO: 2)).

[1212] Thus, on binding of a ligand to a receptor, Jaks are activated, which in turn activate STATs, which then translocate and bind to GAS elements. This entire process is encompassed in the Jaks-STATs signal transduction pathway. Therefore, activation of the Jaks-STATs pathway, reflected by the binding of the GAS or the ISRE element, can be used to indicate proteins involved in the proliferation and differentiation of cells. For example, growth factors and cytokines are known to activate the Jaks-STATs pathway (See Table below). Thus, by using GAS elements linked to reporter molecules, activators of the Jaks-STATs pathway can be identified.

| | JAKs | | | | | |
|---|---|---|---|---|---|---|
| Ligand | tyk2 | Jak1 | Jak2 | Jak3 | STATS | GAS (elements) or ISRE |

IFN family

| | | | | | | |
|---|---|---|---|---|---|---|
| IFN-a/B | + | + | − | − | 1,2,3 | ISRE |
| IFN-g | | + | + | − | 1 | GAS (IRF1 > Lys6 > IFP) |
| Il-10 | + | ? | ? | − | 1,3 | |
| gp130 family | | | | | | |
| IL-6 (Pleiotropic) | + | + | + | ? | 1,3 | GAS (IRF1 > Lys6 > IFP) |
| Il-11 (Pleiotropic) | ? | + | ? | ? | 1,3 | |
| OnM (Pleiotropic) | ? | + | + | ? | 1,3 | |
| LIF (Pleiotropic) | ? | + | + | ? | 1,3 | |
| CNTF (Pleiotropic) | −/+ | + | + | ? | 1,3 | |
| G-CSF (Pleiotropic) | ? | + | ? | ? | 1,3 | |
| IL-12 (Pleiotropic) | + | − | + | + | 1,3 | |
| g-C family | | | | | | |
| IL-2 (lymphocytes) | − | + | − | + | 1,3,5 | GAS |
| IL-4 (lymph/myeloid) | − | + | − | + | 6 | GAS (IRF1 = IFP >> Ly6)(IgH) |
| IL-7 (lymphocytes) | − | + | − | + | 5 | GAS |
| IL-9 (lymphocytes) | − | + | − | + | 5 | GAS |
| IL-13 (lymphocyte) | − | + | ? | ? | 6 | GAS |
| IL-15 | ? | + | ? | + | 5 | GAS |
| gp140 family | | | | | | |
| IL-3 (myeloid) | − | − | + | − | 5 | GAS (IRF1 > IFP >> Ly6) |
| IL-5 (myeloid) | − | − | + | − | 5 | GAS |
| GM-CSF (myeloid) | − | − | + | − | 5 | GAS |
| Growth hormone family | | | | | | |
| GH | ? | − | + | − | 5 | |
| PRL | ? | +/− | + | − | 1,3,5 | |
| EPO | ? | − | + | − | 5 | GAS (B − CAS > IRF1 = IFP >> Ly6) |
| Receptor Tyrosine Kinases | | | | | | |
| EGF | ? | + | + | − | 1,3 | GAS (IRF1) |
| PDGF | ? | + | + | − | 1,3 | |
| CSF-1 | ? | + | + | − | 1,3 | GAS (not IRF1) |

[1213] To construct a synthetic GAS containing promoter element, which is used in the Biological Assays described in Examples 32-33, a PCR based strategy is employed to generate a GAS-SV40 promoter sequence. The 5′ primer contains four tandem copies of the GAS binding site found in the IRF1 promoter and previously demonstrated to bind STATs upon induction with a range of cytokines (Rothman et al., Immunity 1:457-468 (1994).), although other GAS or ISRE elements can be used instead. The 5′ primer also contains 18 bp of sequence complementary to the SV40 early promoter sequence and is flanked with an XhoI site. The sequence of the 5′ primer is:

| | |
|---|---|
| 5′:GCGCCTCGAGATTTCCCCGAAATCTAGATTTCCCCGAAATGATTTCCCCGAAAT | (SEQ ID NO: 3) |
| GATTTCCCCGAAATATCTGCCATCTCAATTAG:3′ | |

[1214] The downstream primer is complementary to the SV40 promoter and is flanked with a Hind III site: 5′:GCGGCAAGCTTTTTGCAAAGCCTAGGC:3′ (SEQ ID NO: 4)

[1215] PCR amplification is performed using the SV40 promoter template present in the B-gal:promoter plasmid obtained from Clontech. The resulting PCR fragment is digested with XhoI/Hind III and subcloned into BLSK2-. (Stratagene.) Sequencing with forward and reverse primers confirms that the insert contains the following sequence:

| | |
|---|---|
| 5′:CTCGAGATTTCCCCGAAATCTAGATTTCCCCGAAATGATTTCCCCGAAATGATT | (SEQ ID NO: 5) |
| TCCCCGAAATATCTGCCATCTCAATTAGTCAGCAACCATAGTCCCGCCCCTAACT | |
| CCGCCCATCCCGCCCCTAACTCCGCCCAGTTCCGCCCATTCTCCGCCCCATGGCTG | |
| ACTAATTTTTTTTATTTATGCAGAGGCCGAGGCCGCCTCGGCCTCTGAGCTATTCC | |
| AGAAGTAGTGAGGAGGCTTTTTTGGAGGCCTAGGCTTTTGCAAAAAGCTT:3′ | |

[1216] With this GAS promoter element linked to the SV40 promoter, a GAS:SEAP2 reporter construct is next engineered. Here, the reporter molecule is a secreted alkaline phosphatase, or “SEAP.” Clearly, however, any reporter molecule can be instead of SEAP, in this or in any of the other Examples. Well known reporter molecules that can be used instead of SEAP include chloramphenicol acetyltransferase (CAT), luciferase, alkaline phosphatase, B-galactosidase, green fluorescent protein (GFP), or any protein detectable by an antibody.

[1217] The above sequence confirmed synthetic GAS-SV40 promoter element is subcloned into the pSEAP-Promoter vector obtained from Clontech using HindIII and XhoI, effectively replacing the SV40 promoter with the amplified GAS:SV40 promoter element, to create the GAS-SEAP vector. However, this vector does not contain a neomycin resistance gene, and therefore, is not preferred for mammalian expression systems.

[1218] Thus, in order to generate mammalian stable cell lines expressing the GAS-SEAP reporter, the GAS-SEAP cassette is removed from the GAS-SEAP vector using SalI and NotI, and inserted into a backbone vector containing the neomycin resistance gene, such as pGFP-1 (Clontech), using these restriction sites in the multiple cloning site, to create the GAS-SEAP/Neo vector. Once this vector is transfected into mammalian cells, this vector can then be used as a reporter molecule for GAS binding as described in Examples 32-33.

[1219] Other constructs can be made using the above description and replacing GAS with a different promoter sequence. For example, construction of reporter molecules containing EGR and NF-KB promoter sequences are described in Examples 34 and 35. However, many other promoters can be substituted using the protocols described in these Examples. For instance, SRE, IL-2, NFAT, or Osteocalcin promoters can be substituted, alone or in combination (e.g., GAS/NF-KB/EGR, GAS/NF-KB, I1-2/NFAT, or NF-KB/GAS). Similarly, other cell lines can be used to test reporter construct activity, such as HELA (epithelial), HUVEC (endothelial), Reh (B-cell), Saos-2 (osteoblast), HUVAC (aortic), or Cardiomyocyte.

### Example 32

[1220] High-Throughput Screening Assay for T-cell Activity

[1221] The following protocol is used to assess T-cell activity by identifying factors, and determining whether supernate containing a polypeptide of the invention proliferates and/or differentiates T-cells. T-cell activity is assessed using the GAS/SEAP/Neo construct produced in Example 31. Thus, factors that increase SEAP activity indicate the ability to activate the Jaks-STATS signal transduction pathway. The T-cell used in this assay is Jurkat T-cells (ATCC Accession No. TIB-152), although Molt-3 cells (ATCC Accession No. CRL-1552) and Molt-4 cells (ATCC Accession No. CRL-1582) cells can also be used.

[1222] Jurkat T-cells are lymphoblastic CD4+Th1 helper cells. In order to generate stable cell lines, approximately 2 million Jurkat cells are transfected with the GAS-SEAP/neo vector using DMRIE-C (Life Technologies)(transfection procedure described below). The transfected cells are seeded to a density of approximately 20,000 cells per well and transfectants resistant to 1 mg/ml genticin selected. Resistant colonies are expanded and then tested for their response to increasing concentrations of interferon gamma. The dose response of a selected clone is demonstrated.

[1223] Specifically, the following protocol will yield sufficient cells for 75 wells containing 200 ul of cells. Thus, it is either scaled up, or performed in multiple to generate sufficient cells for multiple 96 well plates. Jurkat cells are maintained in RPMI+10% serum with 1% Pen-Strep. Combine 2.5 mls of OPTI-MEM (Life Technologies) with 10 ug of plasmid DNA in a T25 flask. Add 2.5 ml OPTI-MEM containing 50 ul of DMRIE-C and incubate at room temperature for 15-45 mins.

[1224] During the incubation period, count cell concentration, spin down the required number of cells (10⁷ per transfection), and resuspend in OPTI-MEM to a final concentration of 10⁷ cells/ml. Then add 1 ml of 1×10⁷ cells in OPTI-MEM to T25 flask and incubate at 37 degree C. for 6 hrs. After the incubation, add 10 ml of RPMI+15% serum.

[1225] The Jurkat:GAS-SEAP stable reporter lines are maintained in RPMI+10% serum, 1 mg/ml Genticin, and 1% Pen-Strep. These cells are treated with supernatants containing polypeptide of the present invention or polypeptide of the present invention induced polypeptides as produced by the protocol described in Example 30.

[1226] On the day of treatment with the supernatant, the cells should be washed and resuspended in fresh RPMI+10% serum to a density of 500,000 cells per ml. The exact number of cells required will depend on the number of supernatants being screened. For one 96 well plate, approximately 10 million cells (for 10 plates, 100 million cells) are required.

[1227] Transfer the cells to a triangular reservoir boat, in order to dispense the cells into a 96 well dish, using a 12 channel pipette. Using a 12 channel pipette, transfer 200 ul of cells into each well (therefore adding 100,000 cells per well).

[1228] After all the plates have been seeded, 50 ul of the supernatants are transferred directly from the 96 well plate containing the supernatants into each well using a 12 channel pipette. In addition, a dose of exogenous interferon gamma (0.1, 1.0, 10 ng) is added to wells H9, H10, and H 11 to serve as additional positive controls for the assay.

[1229] The 96 well dishes containing Jurkat cells treated with supernatants are placed in an incubator for 48 hrs (note: this time is variable between 48-72 hrs). 35 ul samples from each well are then transferred to an opaque 96 well plate using a 12 channel pipette. The opaque plates should be covered (using sellophene covers) and stored at −20 degree C. until SEAP assays are performed according to Example 36. The plates containing the remaining treated cells are placed at 4 degree C. and serve as a source of material for repeating the assay on a specific well if desired.

[1230] As a positive control, 100 Unit/ml interferon gamma can be used which is known to activate Jurkat T cells. Over 30 fold induction is typically observed in the positive control wells.

[1231] The above protocol may be used in the generation of both transient, as well as, stable transfected cells, which would be apparent to those of skill in the art.

### Example 33

[1232] High-Throughput Screening Assay Identifying Myeloid Activity

[1233] The following protocol is used to assess myeloid activity of polypeptide of the present invention by determining whether polypeptide of the present invention proliferates and/or differentiates myeloid cells. Myeloid cell activity is assessed using the GAS/SEAP/Neo construct produced in Example 31. Thus, factors that increase SEAP activity indicate the ability to activate the Jaks-STATS signal transduction pathway. The myeloid cell used in this assay is U937, a pre-monocyte cell line, although TF-1, HL60, or KG1 can be used.

[1234] To transiently transfect U937 cells with the GAS/SEAP/Neo construct produced in Example 31, a DEAE-Dextran method (Kharbanda et. al., 1994, Cell Growth & Differentiation, 5:259-265) is used. First, harvest 2×10⁷ U937 cells and wash with PBS. The U937 cells are usually grown in RPMI 1640 medium containing 10% heat-inactivated fetal bovine serum (FBS) supplemented with 100 units/ml penicillin and 100 mg/ml streptomycin.

[1235] Next, suspend the cells in 1 ml of 20 mM Tris-HCl (pH 7.4) buffer containing 0.5 mg/ml DEAE-Dextran, 8 ug GAS-SEAP2 plasmid DNA, 140 mM NaCl, 5 mM KCl, 375 uM Na₂HPO₄.7H₂O, 1 mM MgCl₂, and 675 uM CaCl₂. Incubate at 37 degrees C. for 45 min.

[1236] Wash the cells with RPMI 1640 medium containing 10% FBS and then resuspend in 10 ml complete medium and incubate at 37 degree C. for 36 hr.

[1237] The GAS-SEAP/U937 stable cells are obtained by growing the cells in 400 ug/ml G418. The G418-free medium is used for routine growth but every one to two months, the cells should be re-grown in 400 ug/ml G418 for couple of passages.

[1238] These cells are tested by harvesting 1×10⁸ cells (this is enough for ten 96-well plates assay) and wash with PBS. Suspend the cells in 200 ml above described growth medium, with a final density of 5×10⁵ cells/ml. Plate 200 ul cells per well in the 96-well plate (or 1×10⁵ cells/well).

[1239] Add 50 ul of the supernatant prepared by the protocol described in Example 30. Incubate at 37 degree C. for 48 to 72 hr. As a positive control, 100 Unit/ml interferon gamma can be used which is known to activate U937 cells. Over 30 fold induction is typically observed in the positive control wells. SEAP assay the supernatant according to the protocol described in Example 36.

### Example 34

[1240] High-Throughput Screening Assay Identifying Neuronal Activity

[1241] When cells undergo differentiation and proliferation, a group of genes are activated through many different signal transduction pathways. One of these genes, EGR1 (early growth response gene 1), is induced in various tissues and cell types upon activation. The promoter of EGR1 is responsible for such induction. Using the EGR1 promoter linked to reporter molecules, activation of cells can be assessed by polypeptide of the present invention.

[1242] Particularly, the following protocol is used to assess neuronal activity in PC12 cell lines. PC12 cells (rat phenochromocytoma cells) are known to proliferate and/or differentiate by activation with a number of mitogens, such as TPA (tetradecanoyl phorbol acetate), NGF (nerve growth factor), and EGF (epidermal growth factor). The EGR1 gene expression is activated during this treatment. Thus, by stably transfecting PC12 cells with a construct containing an EGR promoter linked to SEAP reporter, activation of PC12 cells by polypeptide of the present invention can be assessed.

[1243] The EGR/SEAP reporter construct can be assembled by the following protocol. The EGR-1 promoter sequence (−633 to +1) (Sakamoto K et al., Oncogene 6:867-871 (1991)) can be PCR amplified from human genomic DNA using the following primers:

| | |
|---|---|
| 5′ GCGCTCGAGGGATGACAGCGATAGAACCCCGG-3′ | (SEQ ID NO: 6) |
| 5′ GCGAAGCTTCGCGACTCCCCGGATCCGCCTC-3′ | (SEQ ID NO:7) |

[1244] Using the GAS:SEAP/Neo vector produced in Example 31, EGR1 amplified product can then be inserted into this vector. Linearize the GAS:SEAP/Neo vector using restriction enzymes XhoI/HindIII, removing the GAS/SV40 stuffer. Restrict the EGR1 amplified product with these same enzymes. Ligate the vector and the EGR1 promoter.

[1245] To prepare 96 well-plates for cell culture, two mls of a coating solution (1:30 dilution of collagen type I (Upstate Biotech Inc. Cat #08-115) in 30% ethanol (filter sterilized)) is added per one 10 cm plate or 50 ml per well of the 96-well plate, and allowed to air dry for 2 hr.

[1246] PC12 cells are routinely grown in RPMI-1640 medium (Bio Whittaker) containing 10% horse serum (JRH BIOSCIENCES, Cat. #12449-78P), 5% heat-inactivated fetal bovine serum (FBS) supplemented with 100 units/ml penicillin and 100 ug/ml streptomycin on a precoated 10 cm tissue culture dish. One to four split is done every three to four days. Cells are removed from the plates by scraping and resuspended with pipetting up and down for more than 15 times.

[1247] Transfect the EGR/SEAP/Neo construct into PC12 using the Lipofectamine protocol described in Example 30. EGR-SEAP/PC12 stable cells are obtained by growing the cells in 300 ug/ml G418. The G418-free medium is used for routine growth but every one to two months, the cells should be re-grown in 300 ug/ml G418 for couple of passages.

[1248] To assay for neuronal activity, a 10 cm plate with cells around 70 to 80% confluent is screened by removing the old medium. Wash the cells once with PBS (Phosphate buffered saline). Then starve the cells in low serum medium (RPMI-1640 containing 1% horse serum and 0.5% FBS with antibiotics) overnight.

[1249] The next morning, remove the medium and wash the cells with PBS. Scrape off the cells from the plate, suspend the cells well in 2 ml low serum medium. Count the cell number and add more low serum medium to reach final cell density as 5×10⁵ cells/ml.

[1250] Add 200 ul of the cell suspension to each well of 96-well plate (equivalent to 1×10⁵ cells/well). Add 50 ul supernatant produced by Example 30, 37 degree C. for 48 to 72 hr. As a positive control, a growth factor known to activate PC12 cells through EGR can be used, such as 50 ng/ul of Neuronal Growth Factor (NGF). Over fifty-fold induction of SEAP is typically seen in the positive control wells. SEAP assay the supernatant according to Example 36.

### Example 35

[1251] High-Throughput Screening Assay for T-cell Activity

[1252] NF-KB (Nuclear Factor KB) is a transcription factor activated by a wide variety of agents including the inflammatory cytokines IL-1 and TNF, CD30 and CD40, lymphotoxin-alpha and lymphotoxin-beta, by exposure to LPS or thrombin, and by expression of certain viral gene products. As a transcription factor, NF-KB regulates the expression of genes involved in immune cell activation, control of apoptosis (NF-KB appears to shield cells from apoptosis), B and T-cell development, anti-viral and antimicrobial responses, and multiple stress responses.

[1253] In non-stimulated conditions, NF-KB is retained in the cytoplasm with I-KB (Inhibitor KB). However, upon stimulation, I-KB is phosphorylated and degraded, causing NF-KB to shuttle to the nucleus, thereby activating transcription of target genes. Target genes activated by NF-KB include IL-2, IL-6, GM-CSF, ICAM-1 and class 1 MHC.

[1254] Due to its central role and ability to respond to a range of stimuli, reporter constructs utilizing the NF-KB promoter element are used to screen the supernatants produced in Example 30. Activators or inhibitors of NF-KB would be useful in treating, preventing, and/or diagnosing diseases. For example, inhibitors of NF-KB could be used to treat those diseases related to the acute or chronic activation of NF-KB, such as rheumatoid arthritis.

[1255] To construct a vector containing the NF-KB promoter element, a PCR based strategy is employed. The upstream primer contains four tandem copies of the NF-KB binding site (GGGGACTTTCCC) (SEQ ID NO: 8), 18 bp of sequence complementary to the 5′ end of the SV40 early promoter sequence, and is flanked with an XhoI site:

| | |
|---|---|
| 5′:GCGGCCTCGAGGGGACTTTCCCGGGGACTTTCCGGGGACTTTCCGGGACTTTC | (SEQ ID NO: 9) |
| CATCCTGCCATCTCAATTAG:3′ | |

[1256] The downstream primer is complementary to the 3′ end of the SV40 promoter and is flanked with a Hind III site:

[1257] 5′:GCGGCAAGCTTTTTGCAAAGCCTAGGC:3′ (SEQ ID NO: 4)

[1258] PCR amplification is performed using the SV40 promoter template present in the pB-gal:promoter plasmid obtained from Clontech. The resulting PCR fragment is digested with XhoI and Hind III and subcloned into BLSK2-. (Stratagene) Sequencing with the T7 and T3 primers confirms the insert contains the following sequence:

| | |
|---|---|
| 5′:CTCGAGGGGACTTTCCCGGGGACTTTCCGGGGACTTTCCGGGACTTTCCATCTG | (SEQ ID NO:10) |
| CCATCTCAATTAGTCAGCAACCATAGTCCCGCCCCTAACTCCGCCCATCCCGCCC | |
| CTAACTCCGCCCAGTTCCGCCCATTCTCCGCCCCATGGCTGACTAATTTTTTTTAT | |
| TTATGCAGAGGCCGAGGCCGCCTCGGCCTCTGAGCTATTCCAGAAGTAGTGAGG | |
| AGGCTTTTTTGGAGGCCTAGGCTTTTGCAAAAAGCTT:3′ | |

[1259] Next, replace the SV40 minimal promoter element present in the pSEAP2-promoter plasmid (Clontech) with this NF-KB/SV40 fragment using XhoI and HindIII. However, this vector does not contain a neomycin resistance gene, and therefore, is not preferred for mammalian expression systems.

[1260] In order to generate stable mammalian cell lines, the NF-KB/SV40/SEAP cassette is removed from the above NF-KB/SEAP vector using restriction enzymes SalI and NotI, and inserted into a vector containing neomycin resistance. Particularly, the NF-KB/SV40/SEAP cassette was inserted into pGFP-1 (Clontech), replacing the GFP gene, after restricting pGFP-1 with SalI and NotI.

[1261] Once NF-KB/SV40/SEAP/Neo vector is created, stable Jurkat T-cells are created and maintained according to the protocol described in Example 32. Similarly, the method for assaying supernatants with these stable Jurkat T-cells is also described in Example 32. As a positive control, exogenous TNF alpha (0.1, 1, 10 ng) is added to wells H9, H10, and H11, with a 5-10 fold activation typically observed.

### Example 36

[1262] Assay for SEAP Activity

[1263] As a reporter molecule for the assays described in Examples 32-35, SEAP activity is assayed using the Tropix Phospho-light Kit (Cat. BP-400) according to the following general procedure. The Tropix Phospho-light Kit supplies the Dilution, Assay, and Reaction Buffers used below.

[1264] Prime a dispenser with the 2.5×Dilution Buffer and dispense 15 ul of 2.5×dilution buffer into Optiplates containing 35 ul of a supernatant. Seal the plates with a plastic sealer and incubate at 65 degree C. for 30 min. Separate the Optiplates to avoid uneven heating.

[1265] Cool the samples to room temperature for 15 minutes. Empty the dispenser and prime with the Assay Buffer. Add 50 ml Assay Buffer and incubate at room temperature 5 min. Empty the dispenser and prime with the Reaction Buffer (see the Table below). Add 50 ul Reaction Buffer and incubate at room temperature for 20 minutes. Since the intensity of the chemiluminescent signal is time dependent, and it takes about 10 minutes to read 5 plates on a luminometer, thus one should treat 5 plates at each time and start the second set 10 minutes later.

[1266] Read the relative light unit in the luminometer. Set H12 as blank, and print the results. An increase in chemiluminescence indicates reporter activity.

Reaction Buffer Formulation:

| # of plates | Rxn buffer diluent (ml) | CSPD (ml) |
|---|---|---|
| 10 | 60 | 3 |
| 11 | 65 | 3.25 |
| 12 | 70 | 3.5 |
| 13 | 75 | 3.75 |
| 14 | 80 | 4 |
| 15 | 85 | 4.25 |
| 16 | 90 | 4.5 |
| 17 | 95 | 4.75 |
| 18 | 100 | 5 |
| 19 | 105 | 5.25 |
| 20 | 110 | 5.5 |
| 21 | 115 | 5.75 |
| 22 | 120 | 6 |
| 23 | 125 | 6.25 |
| 24 | 130 | 6.5 |
| 25 | 135 | 6.75 |
| 26 | 140 | 7 |
| 27 | 145 | 7.25 |
| 28 | 150 | 7.5 |
| 29 | 155 | 7.75 |
| 30 | 160 | 8 |
| 31 | 165 | 8.25 |
| 32 | 170 | 8.5 |
| 33 | 175 | 8.75 |
| 34 | 180 | 9 |
| 35 | 185 | 9.25 |
| 36 | 190 | 9.5 |
| 37 | 195 | 9.75 |
| 38 | 200 | 10 |
| 39 | 205 | 10.25 |
| 40 | 210 | 10.5 |
| 41 | 215 | 10.75 |
| 42 | 220 | 11 |
| 43 | 225 | 11.25 |
| 44 | 230 | 11.5 |
| 45 | 235 | 11.75 |
| 46 | 240 | 12 |
| 47 | 245 | 12.25 |
| 48 | 250 | 12.5 |
| 49 | 255 | 12.75 |
| 50 | 260 | 13 |

### Example 37

[1267] High-Throughput Screening Assay Identifying Changes in Small Molecule Concentration and Membrane Permeability

[1268] Binding of a ligand to a receptor is known to alter intracellular levels of small molecules, such as calcium, potassium, sodium, and pH, as well as alter membrane potential. These alterations can be measured in an assay to identify supernatants which bind to receptors of a particular cell. Although the following protocol describes an assay for calcium, this protocol can easily be modified to detect changes in potassium, sodium, pH, membrane potential, or any other small molecule which is detectable by a fluorescent probe.

[1269] The following assay uses Fluorometric Imaging Plate Reader (“FLIPR”) to measure changes in fluorescent molecules (Molecular Probes) that bind small molecules. Clearly, any fluorescent molecule detecting a small molecule can be used instead of the calcium fluorescent molecule, fluo-4 (Molecular Probes, Inc.; catalog no. F-14202), used here.

[1270] For adherent cells, seed the cells at 10,000-20,000 cells/well in a Co-star black 96-well plate with clear bottom. The plate is incubated in a CO₂ incubator for 20 hours. The adherent cells are washed two times in Biotek washer with 200 ul of HBSS (Hank's Balanced Salt Solution) leaving 100 ul of buffer after the final wash.

[1271] A stock solution of 1 mg/ml fluo-4 is made in 10% pluronic acid DMSO. To load the cells with fluo-4, 50 ul of 12 ug/ml fluo-4 is added to each well. The plate is incubated at 37 degrees C. in a CO₂ incubator for 60 min. The plate is washed four times in the Biotek washer with HBSS leaving 100 ul of buffer.

[1272] For non-adherent cells, the cells are spun down from culture media. Cells are re-suspended to 2-5×10⁶ cells/ml with HBSS in a 50-ml conical tube. 4 ul of 1 mg/ml fluo-4 solution in 10% pluronic acid DMSO is added to each ml of cell suspension. The tube is then placed in a 37 degrees C. water bath for 30-60 min. The cells are washed twice with HBSS, resuspended to 1×10⁶ cells/ml, and dispensed into a microplate, 100 ul/well. The plate is centrifuged at 1000 rpm for 5 min. The plate is then washed once in Denley Cell Wash with 200 ul, followed by an aspiration step to 100 ul final volume.

[1273] For a non-cell based assay, each well contains a fluorescent molecule, such as fluo-4. The supernatant is added to the well, and a change in fluorescence is detected.

[1274] To measure the fluorescence of intracellular calcium, the FLIPR is set for the following parameters: (1) System gain is 300-800 mW; (2) Exposure time is 0.4 second; (3) Camera F/stop is F/2; (4) Excitation is 488 nm; (5) Emission is 530 nm; and (6) Sample addition is 50 ul. Increased emission at 530 nm indicates an extracellular signaling event caused by the a molecule, either polypeptide of the present invention or a molecule induced by polypeptide of the present invention, which has resulted in an increase in the intracellular Ca++ concentration.

### Example 38

[1275] High-Throughput Screening Assay Identifying Tyrosine Kinase Activity

[1276] The Protein Tyrosine Kinases (PTK) represent a diverse group of transmembrane and cytoplasmic kinases. Within the Receptor Protein Tyrosine Kinase RPTK) group are receptors for a range of mitogenic and metabolic growth factors including the PDGF, FGF, EGF, NGF, HGF and Insulin receptor subfamilies. In addition there are a large family of RPTKs for which the corresponding ligand is unknown. Ligands for RPTKs include mainly -secreted small proteins, but also membrane-bound and extracellular matrix proteins.

[1277] Activation of RPTK by ligands involves ligand-mediated receptor dimerization, resulting in transphosphorylation of the receptor subunits and activation of the cytoplasmic tyrosine kinases. The cytoplasmic tyrosine kinases include receptor associated tyrosine kinases of the src-family (e.g., src, yes, lck, lyn, fyn) and non-receptor linked and cytosolic protein tyrosine kinases, such as the Jak family, members of which mediate signal transduction triggered by the cytokine superfamily of receptors (e.g., the Interleukins, Interferons, GM-CSF, and Leptin).

[1278] Because of the wide range of known factors capable of stimulating tyrosine kinase activity, identifying whether polypeptide of the present invention or a molecule induced by polypeptide of the present invention is capable of activating tyrosine kinase signal transduction pathways is of interest. Therefore, the following protocol is designed to identify such molecules capable of activating the tyrosine kinase signal transduction pathways.

[1279] Seed target cells (e.g., primary keratinocytes) at a density of approximately 25,000 cells per well in a 96 well Loprodyne Silent Screen Plates purchased from Nalge Nunc (Naperville, Ill.). The plates are sterilized with two 30 minute rinses with 100% ethanol, rinsed with water and dried overnight. Some plates are coated for 2 hr with 100 ml of cell culture grade type I collagen (50 mg/ml), gelatin (2%) or polylysine (50 mg/ml), all of which can be purchased from Sigma Chemicals (St. Louis, Mo.) or 10% Matrigel purchased from Becton Dickinson (Bedford, Mass.), or calf serum, rinsed with PBS and stored at 4 degree C. Cell growth on these plates is assayed by seeding 5,000 cells/well in growth medium and indirect quantitation of cell number through use of alamarBlue as described by the manufacturer Alamar Biosciences, Inc. (Sacramento, Calif.) after 48 hr. Falcon plate covers #3071 from Becton Dickinson (Bedford, Mass.) are used to cover the Loprodyne Silent Screen Plates. Falcon Microtest III cell culture plates can also be used in some proliferation experiments.

[1280] To prepare extracts, A431 cells are seeded onto the nylon membranes of Loprodyne plates (20,000/200 ml/well) and cultured overnight in complete medium. Cells are quiesced by incubation in serum-free basal medium for 24 hr. After 5-20 minutes treatment with EGF (60 ng/ml) or 50 ul of the supernatant produced in Example 30, the medium was removed and 100 ml of extraction buffer ((20 mM HEPES pH 7.5, 0.15 M NaCl, 1% Triton X-100, 0.1% SDS, 2 mM Na3VO4, 2 mM Na4P207 and a cocktail of protease inhibitors (#1836170) obtained from Boeheringer Mannheim (Indianapolis, Ind.)) is added to each well and the plate is shaken on a rotating shaker for 5 minutes at 4° C. The plate is then placed in a vacuum transfer manifold and the extract filtered through the 0.45 mm membrane bottoms of each well using house vacuum. Extracts are collected in a 96-well catch/assay plate in the bottom of the vacuum manifold and immediately placed on ice. To obtain extracts clarified by centrifugation, the content of each well, after detergent solubilization for 5 minutes, is removed and centrifuged for 15 minutes at 4 degree C. at 16,000×g.

[1281] Test the filtered extracts for levels of tyrosine kinase activity. Although many methods of detecting tyrosine kinase activity are known, one method is described here.

[1282] Generally, the tyrosine kinase activity of a supernatant is evaluated by determining its ability to phosphorylate a tyrosine residue on a specific substrate (a biotinylated peptide). Biotinylated peptides that can be used for this purpose include PSK1 (corresponding to amino acids 6-20 of the cell division kinase cdc2-p34) and PSK2 (corresponding to amino acids 1-17 of gastrin). Both peptides are substrates for a range of tyrosine kinases and are available from Boehringer Mannheim.

[1283] The tyrosine kinase reaction is set up by adding the following components in order. First, add 10 ul of 5 uM Biotinylated Peptide, then 10 ul ATP/Mg₂₊(5mM ATP/50 mM MgCl₂), then 10 ul of 5×Assay Buffer (40 mM imidazole hydrochloride, pH7.3, 40 mM beta-glycerophosphate, 1 mM EGTA, 100 mM MgCl₂, 5 mM MnCl₂, 0.5 mg/ml BSA), then 5 ul of Sodium Vanadate (1 mM), and then 5 ul of water. Mix the components gently and preincubate the reaction mix at 30 degree C. for 2 min. Initial the reaction by adding 10 ul of the control enzyme or the filtered supernatant.

[1284] The tyrosine kinase assay reaction is then terminated by adding 10 ul of 120 mm EDTA and place the reactions on ice.

[1285] Tyrosine kinase activity is determined by transferring 50 ul aliquot of reaction mixture to a microtiter plate (MTP) module and incubating at 37 degree C. for 20 min. This allows the streptavidin coated 96 well plate to associate with the biotinylated peptide. Wash the MTP module with 300 ul/well of PBS four times. Next add 75 ul of anti-phospotyrosine antibody conjugated to horse radish peroxidase(anti-P—Tyr—POD(0.5 u/ml)) to each well and incubate at 37 degree C. for one hour. Wash the well as above.

[1286] Next add 100 ul of peroxidase substrate solution (Boehringer Mannheim) and incubate at room temperature for at least 5 mins (up to 30 min). Measure the absorbance of the sample at 405 nm by using ELISA reader. The level of bound peroxidase activity is quantitated using an ELISA reader and reflects the level of tyrosine kinase activity.

### Example 39

[1287] High-Throughput Screening Assay Identifying Phosphorylation Activity

[1288] As a potential alternative and/or complement to the assay of protein tyrosine kinase activity described in Example 38, an assay which detects activation (phosphorylation) of major intracellular signal transduction intermediates can also be used. For example, as described below one particular assay can detect tyrosine phosphorylation of the Erk-1 and Erk-2 kinases. However, phosphorylation of other molecules, such as Raf, JNK, p38 MAP, Map kinase kinase (MEK), MEK kinase, Src, Muscle specific kinase (MuSK), IRAK, Tec, and Janus, as well as any other phosphoserine, phosphotyrosine, or phosphothreonine molecule, can be detected by substituting these molecules for Erk-1 or Erk-2 in the following assay.

[1289] Specifically, assay plates are made by coating the wells of a 96-well ELISA plate with 0.1 ml of protein G (1 ug/ml) for 2 hr at room temp, (RT). The plates are then rinsed with PBS and blocked with 3% BSA/PBS for 1 hr at RT. The protein G plates are then treated with 2 commercial monoclonal antibodies (100 ng/well) against Erk-1 and Erk-2 (1 hr at RT) (Santa Cruz Biotechnology). (To detect other molecules, this step can easily be modified by substituting a monoclonal antibody detecting any of the above described molecules.) After 3-5 rinses with PBS, the plates are stored at 4 degree C. until use.

[1290] A431 cells are seeded at 20,000/well in a 96-well Loprodyne filterplate and cultured overnight in growth medium. The cells are then starved for 48 hr in basal medium (DMEM) and then treated with EGF (6 ng/well) or 50 ul of the supernatants obtained in Example 30 for 5-20 minutes. The cells are then solubilized and extracts filtered directly into the assay plate.

[1291] After incubation with the extract for 1 hr at RT, the wells are again rinsed. As a positive control, a commercial preparation of MAP kinase (10 ng/well) is used in place of A431 extract. Plates are then treated with a commercial polyclonal (rabbit) antibody (1 ug/ml) which specifically recognizes the phosphorylated epitope of the Erk-1 and Erk-2 kinases (1 hr at RT). This antibody is biotinylated by standard procedures. The bound polyclonal antibody is then quantitated by successive incubations with Europium-streptavidin and Europium fluorescence enhancing reagent in the Wallac DELFIA instrument (time-resolved fluorescence). An increased fluorescent signal over background indicates a phosphorylation by polypeptide of the present invention or a molecule induced by polypeptide of the present invention.

### Example 40

[1292] Assay for the Stimulation of Bone Marrow CD34+ Cell Proliferation

[1293] This assay is based on the ability of human CD34+ to proliferate in the presence of hematopoietic growth factors and evaluates the ability of isolated polypeptides expressed in mammalian cells to stimulate proliferation of CD34+ cells.

[1294] It has been previously shown that most mature precursors will respond to only a single signal. More immature precursors require at least two signals to respond. Therefore, to test the effect of polypeptides on hematopoietic activity of a wide range of progenitor cells, the assay contains a given polypeptide in the presence or absence of other hematopoietic growth factors. Isolated cells are cultured for 5 days in the presence of Stem Cell Factor (SCF) in combination with tested sample. SCF alone has a very limited effect on the proliferation of bone marrow (BM) cells, acting in such conditions only as a “survival” factor. However, combined with any factor exhibiting stimulatory effect on these cells (e.g., IL-3), SCF will cause a synergistic effect. Therefore, if the tested polypeptide has a stimulatory effect on hematopoietic progenitors, such activity can be easily detected. Since normal BM cells have a low level of cycling cells, it is likely that any inhibitory effect of a given polypeptide, or agonists or antagonists thereof, might not be detected. Accordingly, assays for an inhibitory effect on progenitors is preferably tested in cells that are first subjected to in vitro stimulation with SCF+IL+3, and then contacted with the compound that is being evaluated for inhibition of such induced proliferation.

[1295] Briefly, CD34+ cells are isolated using methods known in the art. The cells are thawed and resuspended in medium (QBSF 60 serum-free medium with 1% L-glutamine (500 ml) Quality Biological, Inc., Gaithersburg, Md. Cat #160-204-101). After several gentle centrifugation steps at 200×g, cells are allowed to rest for one hour. The cell count is adjusted to 2.5×10⁵ cells/ml. During this time, 100 μl of sterile water is added to the peripheral wells of a 96-well plate. The cytokines that can be tested with a given polypeptide in this assay is rhSCF (R&D Systems, Minneapolis, Minn., Cat #255-SC) at 50 ng/ml alone and in combination with rhSCF and rhIL-3 (R&D Systems, Minneapolis, Minn., Cat #203-ML) at 30 ng/ml. After one hour, 10 μl of prepared cytokines, 50 μl of the supernatants prepared in Example 30 (supernatants at 1:2 dilution=50 μl) and 20 μl of diluted cells are added to the media which is already present in the wells to allow for a final total volume of 100 μl. The plates are then placed in a 37° C./5% CO₂ incubator for five days.

[1296] Eighteen hours before the assay is harvested, 0.5 μCi/well of [3H] Thymidine is added in a 10 μl volume to each well to determine the proliferation rate. The experiment is terminated by harvesting the cells from each 96-well plate to a filtermat using the Tomtec Harvester 96. After harvesting, the filtermats are dried, trimmed and placed into OmniFilter assemblies consisting of one OmniFilter plate and one OmniFilter Tray. 60 μl Microscint is added to each well and the plate sealed with TopSeal-A press-on sealing film A bar code 15 sticker is affixed to the first plate for counting. The sealed plates are then loaded and the level of radioactivity determined via the Packard Top Count and the printed data collected for analysis. The level of radioactivity reflects the amount of cell proliferation.

[1297] The studies described in this example test the activity of a given polypeptide to stimulate bone marrow CD34+ cell proliferation. One skilled in the art could easily modify the exemplified studies to test the activity of polynucleotides (e.g., gene therapy), antibodies, agonists, and/or antagonists and fragments and variants thereof. As a nonlimiting example, potential antagonists tested in this assay would be expected to inhibit cell proliferation in the presence of cytokines and/or to increase the inhibition of cell proliferation in the presence of cytokines and a given polypeptide. In contrast, potential agonists tested in this assay would be expected to enhance cell proliferation and/or to decrease the inhibition of cell proliferation in the presence of cytokines and a given polypeptide.

[1298] The ability of a gene to stimulate the proliferation of bone marrow CD34+ cells indicates that polynucleotides and polypeptides corresponding to the gene are useful for the diagnosis and treatment of disorders affecting the immune system and hematopoiesis. Representative uses are described in the “Immune Activity” and “Infectious Disease” sections above, and elsewhere herein.

### Example 41

[1299] Assay for Extracellular Matrix Enhanced Cell Response (EMECR)

[1300] The objective of the Extracellular Matrix Enhanced Cell Response (EMECR) assay is to identify gene products (e.g., isolated polypeptides) that act on the hematopoietic stem cells in the context of the extracellular matrix (ECM) induced signal.

[1301] Cells respond to the regulatory factors in the context of signal(s) received from the surrounding microenvironment. For example, fibroblasts, and endothelial and epithelial stem cells fail to replicate in the absence of signals from the ECM. Hematopoietic stem cells can undergo self-renewal in the bone marrow, but not in in vitro suspension culture. The ability of stem cells to undergo self-renewal in vitro is dependent upon their interaction with the stromal cells and the ECM protein fibronectin (ffi). Adhesion of cells to fn is mediated by the α₅.β₁ and α₄.β₁ integrin receptors, which are expressed by human and mouse hematopoietic stem cells. The factor(s) which integrate with the ECM environment and are responsible for stimulating stem cell self-renewal havea not yet been identified. Discovery of such factors should be of great interest in gene therapy and bone marrow transplant applications

[1302] Briefly, polystyrene, non tissue culture treated, 96-well plates are coated with fn fragment at a coating concentration of 0.2 μg/cm². Mouse bone marrow cells are plated (1,000 cells/well ) in 0.2 ml of serum-free medium. Cells cultured in the presence of IL-3 ( 5 ng/ml )+SCF ( 50 ng/ml ) would serve as the positive control, conditions under which little self-renewal but pronounced differentiation of the stem cells is to be expected. Gene products of the invention (e.g., including, but not limited to, polynucleotides and polypeptides of the present invention, and supernatants produced in Example 30), are tested with appropriate negative controls in the presence and absence of SCF (5.0 ng/ml), where test factor supernatants represent 10% of the total assay volume. The plated cells are then allowed to grow by incubating in a low oxygen environment (5% CO₂, 7% O2, and 88% N₂) tissue culture incubator for 7 days. The number of proliferating cells within the wells is then quantitated by measuring thymidine incorporation into cellular DNA. Verification of the positive hits in the assay will require phenotypic characterization of the cells, which can be accomplished by scaling up of the culture system and using appropriate antibody reagents against cell surface antigens and FACScan.

[1303] One skilled in the art could easily modify the exemplified studies to test the activity of polynucleotides (e.g., gene therapy), antibodies, agonists, and/or antagonists and fragments and variants thereof.

[1304] If a particular polypeptide of the present invention is found to be a stimulator of hematopoietic progenitors, polynucleotides and polypeptides corresponding to the gene encoding said polypeptide may be useful for the diagnosis and treatment of disorders affecting the immune system and hematopoiesis. Representative uses are described in the “Immune Activity” and “Infectious Disease” sections above, and elsewhere herein. The gene product may also be useful in the expansion of stem cells and committed progenitors of various blood lineages, and in the differentiation and/or proliferation of various cell types.

[1305] Additionally, the polynucleotides and/or polypeptides of the gene of interest and/or agonists and/or antagonists thereof, may also be employed to inhibit the proliferation and differentiation of hematopoietic cells and therefore may be employed to protect bone marrow stem cells from chemotherapeutic agents during chemotherapy. This antiproliferative effect may allow administration of higher doses of chemotherapeutic agents and, therefore, more effective chemotherapeutic treatment.

[1306] Moreover, polynucleotides and polypeptides corresponding to the gene of interest may also be useful for the treatment and diagnosis of hematopoietic related disorders such as, for example, anemia, pancytopenia, leukopenia, thrombocytopenia or leukemia since stromal cells are important in the production of cells of hematopoietic lineages. The uses include bone marrow cell ex-vivo culture, bone marrow transplantation, bone marrow reconstitution, radiotherapy or chemotherapy of neoplasia.

### Example 42

[1307] Human Dermal Fibroblast and Aortic Smooth Muscle Cell Proliferation

[1308] The polypeptide of interest is added to cultures of normal human dermal fibroblasts (NHDF) and human aortic smooth muscle cells (AOSMC) and two co-assays are performed with each sample. The first assay examines the effect of the polypeptide of interest on the proliferation of normal human dermal fibroblasts (NHDF) or aortic smooth muscle cells (AoSMC). Aberrant growth of fibroblasts or smooth muscle cells is a part of several pathological processes, including fibrosis, and restenosis. The second assay examines IL6 production by both NHDF and SMC. IL6 production is an indication of functional activation. Activated cells will have increased production of a number of cytokines and other factors, which can result in a proinflammatory or immunomodulatory outcome. Assays are run with and without co-TNFa stimulation, in order to check for costimulatory or inhibitory activity.

[1309] Briefly, on day 1, 96-well black plates are set up with 1000 cells/well (NHDF) or 2000 cells/well (AoSMC) in 100 μl culture media. NHDF culture media contains: Clonetics FB basal media, 1 μmg/ml hFGF, 5 mg/ml insulin, 50 mg/ml gentamycin, 2% FBS, while AoSMC culture media contains Clonetics SM basal media, 0.5 μg/ml hEGF, 5 mg/ml insulin, 1 μg/ml hFGF, 50 mg/ml gentamycin, 50 μg/ml Amphotericin B, 5% FBS. After incubation at 37° C. for at least 4-5 hours culture media is aspirated and replaced with growth arrest media. Growth arrest media for NHDF contains fibroblast basal media, 50 mg/ml gentamycin, 2% FBS, while growth arrest media for AoSMC contains SM basal media, 50 mg/ml gentamycin, 50 μg/ml Amphotericin B, 0.4% FBS. Incubate at 37 ° C. until day 2.

[1310] On day 2, serial dilutions and templates of the polypeptide of interest are designed such that they always include media controls and known-protein controls. For both stimulation and inhibition experiments, proteins are diluted in growth arrest media. For inhibition experiments, TNFa is added to a final concentration of 2 ng/ml (NHDF) or 5 ng/ml (AoSMC). Add ⅓ vol media containing controls or polypeptides of the present invention and incubate at 37 degrees C./5% CO₂ until day 5.

[1311] Transfer 60 μl from each well to another labeled 96-well plate, cover with a plate-sealer, and store at 4 degrees C. until Day 6 (for IL6 ELISA). To the remaining 100 μl in the cell culture plate, aseptically add Alamar Blue in an amount equal to 10% of the culture volume (10 μl). Return plates to incubator for 3 to 4 hours. Then measure fluorescence with excitation at 530 nm and emission at 590 nm using the CytoFluor. This yields the growth stimulation/inhibition data.

[1312] On day 5, the IL6 ELISA is performed by coating a 96 well plate with 50-100 ul/well of Anti-Human IL6 Monoclonal antibody diluted in PBS, pH 7.4, incubate ON at room temperature.

[1313] On day 6, empty the plates into the sink and blot on paper towels. Prepare Assay Buffer containing PBS with 4% BSA. Block the plates with 200 μl/well of Pierce Super Block blocking buffer in PBS for 1-2 hr and then wash plates with wash buffer (PBS, 0.05% Tween-20). Blot plates on paper towels. Then add 50 μl/well of diluted Anti-Human IL-6 Monoclonal, Biotin-labeled antibody at 0.50 mg/ml. Make dilutions of IL-6 stock in media (30, 10, 3, 1, 0.3, 0 ng/ml). Add duplicate samples to top row of plate. Cover the plates and incubate for 2 hours at RT on shaker.

[1314] Plates are washed with wash buffer and blotted on paper towels. Dilute EU-labeled Streptavidin 1:1000 in Assay buffer, and add 100 μl/well. Cover the plate and incubate 1 h at RT. Plates are again washed with wash buffer and blotted on paper towels.

[1315] Add 100 μl/well of Enhancement Solution. Shake for 5 minutes. Read the plate on the Wallac DELFIA Fluorometer. Readings from triplicate samples in each assay were tabulated and averaged.

[1316] A positive result in this assay suggests AoSMC cell proliferation and that the polypeptide of the present invention may be involved in dermal fibroblast proliferation and/or smooth muscle cell proliferation. A positive result also suggests many potential uses of polypeptides, polynucleotides, agonists and/or antagonists of the polynucleotide/polypeptide of the present invention which gives a positive result. For example, inflammation and immune responses, wound healing, and angiogenesis, as detailed throughout this specification. Particularly, polypeptides of the present invention and polynucleotides of the present invention may be used in wound healing and dermal regeneration, as well as the promotion of vasculogenesis, both of the blood vessels and lymphatics. The growth of vessels can be used in the treatment of, for example, cardiovascular diseases. Additionally, antagonists of polypeptides and polynucleotides of the invention may be useful in treating diseases, disorders, and/or conditions which involve angiogenesis by acting as an anti-vascular agent (e.g., anti-angiogenesis). These diseases, disorders, and/or conditions are known in the art and/or are described herein, such as, for example, malignancies, solid tumors, benign tumors, for example hemangiomas, acoustic neuromas, neurofibromas, trachomas, and pyogenic granulomas; artheroscleric plaques; ocular angiogenic diseases, for example, diabetic retinopathy, retinopathy of prematurity, macular degeneration, corneal graft rejection, neovascular glaucoma, retrolental fibroplasia, rubeosis, retinoblastoma, uvietis and Pterygia (abnormal blood vessel growth) of the eye; rheumatoid arthritis; psoriasis; delayed wound healing; endometriosis; vasculogenesis; granulations; hypertrophic scars (keloids); nonunion fractures; scleroderma; trachoma; vascular adhesions; myocardial angiogenesis; coronary collaterals; cerebral collaterals; arteriovenous malformations; ischemic limb angiogenesis; Osler-Webber Syndrome; plaque neovascularization; telangiectasia; hemophiliac joints; angiofibroma; fibromuscular dysplasia; wound granulation; Crohn's disease; and atherosclerosis. Moreover, antagonists of polypeptides and polynucleotides of the invention may be useful in treating anti-hyperproliferative diseases and/or anti-inflammatory known in the art and/or described herein.

[1317] One skilled in the art could easily modify the exemplified studies to test the activity of polynucleotides (e.g., gene therapy), antibodies, agonists, and/or antagonists and fragments and variants thereof.

### Example 43

[1318] Cellular Adhesion Molecule (CAM) Expression on Endothelial Cells

[1319] The recruitment of lymphocytes to areas of inflammation and angiogenesis involves specific receptor-ligand interactions between cell surface adhesion molecules (CAMs) on lymphocytes and the vascular endothelium. The adhesion process, in both normal and pathological settings, follows a multi-step cascade that involves intercellular adhesion molecule-1 (ICAM-1), vascular cell adhesion molecule-1 (VCAM-1), and endothelial leukocyte adhesion molecule-1 (E-selectin) expression on endothelial cells (EC). The expression of these molecules and others on the vascular endothelium determines the efficiency with which leukocytes may adhere to the local vasculature and extravasate into the local tissue during the development of an inflammatory response. The local concentration of cytokines and growth factor participate in the modulation of the expression of these CAMs.

[1320] Briefly, endothelial cells (e.g., Human Umbilical Vein Endothelial cells (HUVECs)) are grown in a standard 96 well plate to confluence, growth medium is removed from the cells and replaced with 100 μl of 199 Medium (10% fetal bovine serum (FBS)). Samples for testing and positive or negative controls are added to the plate in triplicate (in 10 μl volumes). Plates are then incubated at 37° C. for either 5 h (selectin and integrin expression) or 24 h (integrin expression only). Plates are aspirated to remove medium and 100 μl of 0.1% paraformaldehyde-PBS (with Ca++ and Mg++) is added to each well. Plates are held at 4° C. for 30 min. Fixative is removed from the wells and wells are washed 1× with PBS(+Ca,Mg)+0.5% BSA and drained. 10 μl of diluted primary antibody is added to the test and control wells. Anti-ICAM-1-Biotin, Anti-VCAM-1-Biotin and Anti-E-selectin-Biotin are used at a concentration of 10 μg/ml (1:10 dilution of 0.1 mg/ml stock antibody). Cells are incubated at 37° C. for 30 min. in a humidified environment. Wells are washed three times with PBS(+Ca,Mg)+0.5% BSA. 20 μl of diluted ExtrAvidin-Alkaline Phosphatase (1:5,000 dilution, referred to herein as the working dilution) are added to each well and incubated at 37° C. for 30 min. Wells are washed three times with PBS(+Ca,Mg)+0.5% BSA. Dissolve 1 tablet of p-Nitrophenol Phosphate pNPP per 5 ml of glycine buffer (pH 10.4). 100 μl of pNPP substrate in glycine buffer is added to each test well. Standard wells in triplicate are prepared from the working dilution of the ExtrAvidin-Alkaline Phosphotase in glycine buffer: 1:5,000 (10⁰)>10^{-0.5}>10⁻¹>10^{-1.5}0.5 μl of each dilutio and the resulting AP content in each well is 5.50 ng, 1.74 ng, 0.55 ng, 0.18 ng. 100 μl of pNNP reagent is then added to each of the standard wells. The plate is incubated at 37° C. for 4 h. A volume of 50 μl of 3M NaOH is added to all wells. The plate is read on a plate reader at 405 nm using the background subtraction option on blank wells filled with glycine buffer only. Additionally, the template is set up to indicate the concentration of AP-conjugate in each standard well [5.50 ng; 1.74 ng; 0.55 ng; 0.18 ng]. Results are indicated as amount of bound AP-conjugate in each sample.

### Example 44

[1321] Alamar Blue Endothelial Cells Proliferation Assay

[1322] This assay may be used to quantitatively determine protein mediated inhibition of bFGF-induced proliferation of Bovine Lymphatic Endothelial Cells (LECs), Bovine Aortic Endothelial Cells (BAECs) or Human Microvascular Uterine Myometrial Cells (UTMECs). This assay incorporates a fluorometric growth indicator based on detection of metabolic activity. A standard Alamar Blue Proliferation Assay is prepared in EGM-2MV with 10 ng/ml of bFGF added as a source of endothelial cell stimulation. This assay may be used with a variety of endothelial cells with slight changes in growth medium and cell concentration. Dilutions of the protein batches to be tested are diluted as appropriate. Serum-free medium (GIBCO SFM) without bFGF is used as a non-stimulated control and Angiostatin or TSP-1 are included as a known inhibitory controls.

[1323] Briefly, LEC, BAECs or UTMECs are seeded in growth media at a density of 5000 to 2000 cells/well in a 96 well plate and placed at 37 degrees C. overnight. After the overnight incubation of the cells, the growth media is removed and replaced with GIBCO EC-SFM. The cells are treated with the appropriate dilutions of the protein of interest or control protein sample(s) (prepared in SFM ) in triplicate wells with additional bFGF to a concentration of 10 ng/ ml. Once the cells have been treated with the samples, the plate(s) is/are placed back in the 37° C. incubator for three days. After three days 10 ml of stock alamar blue (Biosource Cat #DAL1100) is added to each well and the plate(s) is/are placed back in the 37° C. incubator for four hours. The plate(s) are then read at 530 nm excitation and 590 nm emission using the CytoFluor fluorescence reader. Direct output is recorded in relative fluorescence units.

[1324] Alamar blue is an oxidation-reduction indicator that both fluoresces and changes color in response to chemical reduction of growth medium resulting from cell growth. As cells grow in culture, innate metabolic activity results in a chemical reduction of the immediate surrounding environment. Reduction related to growth causes the indicator to change from oxidized (non-fluorescent blue) form to reduced (fluorescent red) form (i.e., stimulated proliferation will produce a stronger signal and inhibited proliferation will produce a weaker signal and the total signal is proportional to the total number of cells as well as their metabolic activity). The background level of activity is observed with the starvation medium alone. This is compared to the output observed from the positive control samples (bFGF in growth medium) and protein dilutions.

### Example 45

[1325] Detection of Inhibition of a Mixed Lymphocyte Reaction

[1326] This assay can be used to detect and evaluate inhibition of a Mixed Lymphocyte Reaction (MLR) by gene products (e.g., isolated polypeptides). Inhibition of a MLR may be due to a direct effect on cell proliferation and viability, modulation of costimulatory molecules on interacting cells, modulation of adhesiveness between lymphocytes and accessory cells, or modulation of cytokine production by accessory cells. Multiple cells may be targeted by these polypeptides since the peripheral blood mononuclear fraction used in this assay includes T, B and natural killer lymphocytes, as well as monocytes and dendritic cells.

[1327] Polypeptides of interest found to inhibit the MLR may find application in diseases associated with lymphocyte and monocyte activation or proliferation. These include, but are not limited to, diseases such as asthma, arthritis, diabetes, inflammatory skin conditions, psoriasis, eczema, systemic lupus erythematosus, multiple sclerosis, glomerulonephritis, inflammatory bowel disease, crohn's disease, ulcerative colitis, arteriosclerosis, cirrhosis, graft vs. host disease, host vs. graft disease, hepatitis, leukemia and lymphoma.

[1328] Briefly, PBMCs from human donors are purified by density gradient centrifugation using Lymphocyte Separation Medium (LSM®, density 1.0770 g/ml, Organon Teknika Corporation, West Chester, Pa.). PBMCs from two donors are adjusted to 2×10⁶ cells/ml in RPMI-1640 (Life Technologies, Grand Island, N.Y.) supplemented with 10% FCS and 2 mM glutamine. PBMCs from a third donor is adjusted to 2×10⁵ cells/ml. Fifty microliters of PBMCs from each donor is added to wells of a 96-well round bottom microtiter plate. Dilutions of test materials (50 μl) is added in triplicate to microtiter wells. Test samples (of the protein of interest) are added for final dilution of 1:4; rhuIL-2 (R&D Systems, Minneapolis, Minn., catalog number 202-IL) is added to a final concentration of 1 μg/ml; anti-CD4 mAb (R&D Systems, clone 34930.11, catalog number MAB379) is added to a final concentration of 10 μg/ml. Cells are cultured for 7-8 days at 37° C. in 5% CO₂, and 1 μC of [³H] thymidine is added to wells for the last 16 hrs of culture. Cells are harvested and thymidine incorporation determined using a Packard TopCount. Data is expressed as the mean and standard deviation of triplicate determinations.

[1329] Samples of the protein of interest are screened in separate experiments and compared to the negative control treatment, anti-CD4 mAb, which inhibits proliferation of lymphocytes and the positive control treatment, IL-2 (either as recombinant material or supernatant), which enhances proliferation of lymphocytes.

[1330] One skilled in the art could easily modify the exemplified studies to test the activity of polynucleotides (e.g., gene therapy), antibodies, agonists, and/or antagonists and fragments and variants thereof.

### Example 46

[1331] Assays for Protease Activity

[1332] The following assay may be used to assess protease activity of the polypeptides of the invention.

[1333] Gelatin and casein zymography are performed essentially as described (Heusen et al., Anal. Biochem., 102:196-202 (1980); Wilson et al., Journal of Urology, 149:653-658 (1993)). Samples are run on 10% polyacryamide/0.1% SDS gels containing 1% gelain orcasein, soaked in 2.5% triton at room temperature for 1 hour, and in 0.1M glycine, pH 8.3 at 37° C. 5 to 16 hours. After staining in amido black areas of proteolysis apear as clear areas agains the blue-black background. Trypsin (Sigma T8642) is used as a positive control.

[1334] Protease activity is also determined by monitoring the cleavage of n-a-benzoyl-L-arginine ethyl ester (BAEE) (Sigma B-4500. Reactions are set up in (25 mMNaPO₄, 1 mM EDTA, and 1 mM BAEE), pH 7.5. Samples are added and the change in adsorbance at 260 nm is monitored on the Beckman DU-6 spectrophotometer in the time-drive mode. Trypsin is used as a positive control.

[1335] Additional assays based upon the release of acid-soluble peptides from casein or hemoglobin measured as adsorbance at 280 nm or calorimetrically using the Folin method are performed as described in Bergmeyer, et al., Methods of Enzymatic Analysis, 5 (1984). Other assays involve the solubilization of chromogenic substrates (Ward, Applied Science, 251-317 (1983)).

### Example 47

[1336] Identifying Serine Protease Substrate Specificity

[1337] Methods known in the art or described herein may be used to determine the substrate specificity of the polypeptides of the present invention having serine protease activity. A preferred method of determining substrate specificity is by the use of positional scanning synthetic combinatorial libraries as described in GB 2 324 529 (incorporated herein in its entirety).

### Example 48

[1338] Ligand Binding Assays

[1339] The following assay may be used to assess ligand binding activity of the polypeptides of the invention.

[1340] Ligand binding assays provide a direct method for ascertaining receptor pharmacology and are adaptable to a high throughput format. The purified ligand for a polypeptide is radiolabeled to high specific activity (50-2000 Ci/mmol) for binding studies. A determination is then made that the process of radiolabeling does not diminish the activity of the ligand towards its polypeptide. Assay conditions for buffers, ions, pH and other modulators such as nucleotides are optimized to establish a workable signal to noise ratio for both membrane and whole cell polypeptide sources. For these assays, specific polypeptide binding is defined as total associated radioactivity minus the radioactivity measured in the presence of an excess of unlabeled competing ligand. Where possible, more than one competing ligand is used to define residual nonspecific binding.

### Example 49

[1341] Functional Assay in Xenopus Oocytes

[1342] Capped RNA transcripts from linearized plasmid templates encoding the polypeptides of the invention are synthesized in vitro with RNA polymerases in accordance with standard procedures. In vitro transcripts are suspended in water at a final concentration of 0.2 mg/mi. Ovarian lobes are removed from adult female toads, Stage V defolliculated oocytes are obtained, and RNA transcripts (10 ng/oocytc) are injected in a 50 nl bolus using a microinjection apparatus. Two electrode voltage clamps are used to measure the currents from individual Xenopus oocytes in response polypeptides and polypeptide agonist exposure. Recordings are made in Ca2+ free Barth's medium at room temperature. The Xenopus system can be used to screen known ligands and tissue/cell extracts for activating ligands.

### Example 50

[1343] Microphysiometric Assays

[1344] Activation of a wide variety of secondary messenger systems results in extrusion of small amounts of acid from a cell. The acid formed is largely as a result of the increased metabolic activity required to fuel the intracellular signaling process. The pH changes in the media surrounding the cell are very small but are detectable by the CYTOSENSOR microphysiometer (Molecular Devices Ltd., Menlo Park, Calif.). The CYTOSENSOR is thus capable of detecting the activation of polypeptide which is coupled to an energy utilizing intracellular signaling pathway.

### Example 51

[1345] Extract/Cell Supernatant Screening

[1346] A large number of mammalian receptors exist for which there remains, as yet, no cognate activating ligand (agonist). Thus, active ligands for these receptors may not be included within the ligands banks as identified to date. Accordingly, the polypeptides of the invention can also be functionally screened (using calcium, cAMP, microphysiometer, oocyte electrophysiology, etc., functional screens) against tissue extracts to identify its natural ligands. Extracts that produce positive functional responses can be sequentially subfractionated until an activating ligand is isolated and identified.

### Example 52

[1347] Calcium and cAMP Functional Assays

[1348] Seven transmembrane receptors which are expressed in HEK 293 cells have been shown to be coupled functionally to activation of PLC and calcium mobilization and/or cAMP stimulation or inhibition. Basal calcium levels in the HEK 293 cells in receptor-transfected or vector control cells were observed to be in the normal, 100 nM to 200 nM, range. HEK 293 cells expressing recombinant receptors are loaded with fura 2 and in a single day >150 selected ligands or tissue/cell extracts are evaluated for agonist induced calcium mobilization. Similarly, HEK 293 cells expressing recombinant receptors are evaluated for the stimulation or inhibition of cAMP production using standard cAMP quantitation assays. Agonists presenting a calcium transient or cAMP fluctuation are tested in vector control cells to determine if the response is unique to the transfected cells expressing receptor.

### Example 53

[1349] ATP-Binding Aassay

[1350] The following assay may be used to assess ATP-binding activity of polypeptides of the invention.

[1351] ATP-binding activity of the polypeptides of the invention may be detected using the ATP-binding assay described in U.S. Pat. No. 5,858,719, which is herein incorporated by reference in its entirety. Briefly, ATP-binding to polypeptides of the invention is measured via photoaffinity labeling with 8-azido-ATP in a competition assay. Reaction mixtures containing 1 mg/ml of the ABC transport protein of the present invention are incubated with varying concentrations of ATP, or the non-hydrolyzable ATP analog adenyl-5′-imidodiphosphate for 10 minutes at 4° C. A mixture of 8-azido-ATP (Sigma Chem. Corp., St. Louis, Mo..) plus 8-azido-ATP (³²P-ATP) (5 mCi/μmol, ICN, Irvine Calif.) is added to a final concentration of 100 μM and 0.5 ml aliquots are placed in the wells of a porcelain spot plate on ice. The plate is irradiated using a short wave 254 nm UV lamp at a distance of 2.5 cm from the plate for two one-minute intervals with a one-minute cooling interval in between. The reaction is stopped by addition of dithiothreitol to a final concentration of 2 mM. The incubations are subjected to SDS-PAGE electrophoresis, dried, and autoradiographed. Protein bands corresponding to the particular polypeptides of the invention are excised, and the radioactivity quantified. A decrease in radioactivity with increasing ATP or adenly-5′-imidodiphosphate provides a measure of ATP affinity to the polypeptides.

### Example 54

[1352] Small Molecule Screening

[1353] This invention is particularly useful for screening therapeutic compounds by using the polypeptides of the invention, or binding fragments thereof, in any of a variety of drug screening techniques. The polypeptide or fragment employed in such a test may be affixed to a solid support, expressed on a cell surface, free in solution, or located intracellularly. One method of drug screening utilizes eukaryotic or prokaryotic host cells which are stably transformed with recombinant nucleic acids expressing the polypeptide or fragment. Drugs are screened against such transformed cells in competitive binding assays. One may measure, for example, the formulation of complexes between the agent being tested and polypeptide of the invention.

[1354] Thus, the present invention provides methods of screening for drugs or any other agents which affect activities mediated by the polypeptides of the invention. These methods comprise contacting such an agent with a polypeptide of the invention or fragment thereof and assaying for the presence of a complex between the agent and the polypeptide or fragment thereof, by methods well known in the art. In such a competitive binding assay, the agents to screen are typically labeled. Following incubation, free agent is separated from that present in bound form, and the amount of free or uncomplexed label is a measure of the ability of a particular agent to bind to the polypeptides of the invention.

[1355] Another technique for drug screening provides high throughput screening for compounds having suitable binding affinity to the polypeptides of the invention, and is described in great detail in European Patent Application 84/03564, published on Sep. 13, 1984, which is herein incorporated by reference in its entirety. Briefly stated, large numbers of different small molecule test compounds are synthesized on a solid substrate, such as plastic pins or some other surface. The test compounds are reacted with polypeptides of the invention and washed. Bound polypeptides are then detected by methods well known in the art. Purified polypeptides are coated directly onto plates for use in the aforementioned drug screening techniques. In addition, non-neutralizing antibodies may be used to capture the peptide and immobilize it on the solid support.

[1356] This invention also contemplates the use of competitive drug screening assays in which neutralizing antibodies capable of binding polypeptides of the invention specifically compete with a test compound for binding to the polypeptides or fragments thereof. In this manner, the antibodies are used to detect the presence of any peptide which shares one or more antigenic epitopes with a polypeptide of the invention.

### Example 55

[1357] Phosphorylation Assay

[1358] In order to assay for phosphorylation activity of the polypeptides of the invention, a phosphorylation assay as described in U.S. Pat. No. 5,958,405 (which is herein incorporated by reference) is utilized. Briefly, phosphorylation activity may be measured by phosphorylation of a protein substrate using gamma-labeled ³²P-ATP and quantitation of the incorporated radioactivity using a gamma radioisotope counter. The polypeptides of the invention are incubated with the protein substrate, ³²P-ATP, and a kinase buffer. The ³²P incorporated into the substrate is then separated from free ³²P-ATP by electrophoresis, and the incorporated ³²P is counted and compared to a negative control. Radioactivity counts above the negative control are indicative of phosphorylation activity of the polypeptides of the invention.

### Example 56

[1359] Detection of Phosphorylation Activity (Activation) of the Polypeptides of the Invention in the Presence of Polypeptide Ligands

[1360] Methods known in the art or described herein may be used to determine the phosphorylation activity of the polypeptides of the invention. A preferred method of determining phosphorylation activity is by the use of the tyrosine phosphorylation assay as described in U.S. Pat. No. 5,817,471 (incorporated herein by reference).

### Example 57

[1361] Identification of Signal Transduction Proteins that Interact with Polypeptides of the Present Invention

[1362] The purified polypeptides of the invention are research tools for the identification, characterization and purification of additional signal transduction pathway proteins or receptor proteins. Briefly, labeled polypeptides of the invention are useful as reagents for the purification of molecules with which it interacts. In one embodiment of affinity purification, polypeptides of the invention are covalently coupled to a chromatography column. Cell-free extract derived from putative target cells, such as carcinoma tissues, is passed over the column, and molecules with appropriate affinity bind to the polypeptides of the invention. The protein complex is recovered from the column, dissociated, and the recovered molecule subjected to N-terminal protein sequencing. This amino acid sequence is then used to identify the captured molecule or to design degenerate oligonucleotide probes for cloning the relevant gene from an appropriate cDNA library.

### Example 58

[1363] IL-6 Bioassay

[1364] To test the proliferative effects of the polypeptides of the invention, the IL-6 Bioassay as described by Marz et al. is utilized (Proc. Natl. Acad. Sci., U.S.A., 95:3251-56 (1998), which is herein incorporated by reference). Briefly, IL-6 dependent B9 murine cells are washed three times in IL-6 free medium and plated at a concentration of 5,000 cells per well in 50 μl, and 50 μl of the IL-6-like polypeptide is added. After 68 hrs. at 37° C., the number of viable cells is measured by adding the tetrazolium salt thiazolyl blue (MTT) and incubating for a further 4 hrs. at 37° C. B9 cells are lysed by SDS and optical density is measured at 570 nm. Controls containing IL-6 (positive) and no cytokine (negative) are utilized. Enhanced proliferation in the test sample(s) relative to the negative control is indicative of proliferative effects mediated by polypeptides of the invention.

### Example 59

[1365] Support of Chicken Embryo Neuron Survival

[1366] To test whether sympathetic neuronal cell viability is supported by polypeptides of the invention, the chicken embryo neuronal survival assay of Senaldi et al is utilized (Proc. Natl. Acad. Sci., U.S.A., 96:11458-63 (1998), which is herein incorporated by reference). Briefly, motor and sympathetic neurons are isolated from chicken embryos, resuspended in L15 medium (with 10% FCS, glucose, sodium selenite, progesterone, conalbumin, putrescine, and insulin; Life Technologies, Rockville, Md.) and Dulbecco's modified Eagles medium [with 10% FCS, glutamine, penicillin, and 25 mM Hepes buffer (pH 7.2); Life Technologies, Rockville, Md.], respectively, and incubated at 37° C. in 5% CO₂ in the presence of different concentrations of the purified IL-6-like polypeptide, as well as a negative control lacking any cytokine. After 3 days, neuron survival is determined by evaluation of cellular morphology, and through the use of the calorimetric assay of Mosmann (Mosmann, T., J. Immunol Methods, 65:55-63 (1983)). Enhanced neuronal cell viability as compared to the controls lacking cytokine is indicative of the ability of the inventive purified IL-6-like polypeptide(s) to enhance the survival of neuronal cells.

### Example 60

[1367] Assay for Phosphatase Activity

[1368] The following assay may be used to assess serine/threonine phosphatase (PTPase) activity of the polypeptides of the invention.

[1369] In order to assay for serine/threonine phosphatase (PTPase) activity, assays can be utilized which are widely known to those skilled in the art. For example, the serine/threonine phosphatase (PSPase) activity is measured using a PSPase assay kit from New England Biolabs, Inc. Myelin basic protein (MyBP), a substrate for PSPase, is phosphorylated on serine and threonine residues with cAMP-dependent Protein Kinase in the presence of [³²P]ATP. Protein serine/threonine phosphatase activity is then determined by measuring the release of inorganic phosphate from 32P-labeled MyBP.

### Example 61

[1370] Interaction of Serine/Threonine Phosphatases with Other Proteins

[1371] The polypeptides of the invention with serine/threonine phosphatase activity as determined in Example 60 are research tools for the identification, characterization and purification of additional interacting proteins or receptor proteins, or other signal transduction pathway proteins. Briefly, labeled polypeptide(s) of the invention is useful as a reagent for the purification of molecules with which it interacts. In one embodiment of affinity purification, polypeptide of the invention is covalently coupled to a chromatography column. Cell-free extract derived from putative target cells, such as neural or liver cells, is passed over the column, and molecules with appropriate affinity bind to the polypeptides of the invention. The polypeptides of the invention-complex is recovered from the column, dissociated, and the recovered molecule subjected to N-terminal protein sequencing. This amino acid sequence is then used to identify the captured molecule or to design degenerate oligonucleotide probes for cloning the relevant gene from an appropriate cDNA library.

### Example 62

[1372] Assaying for Heparanase Activity

[1373] In order to assay for heparanase activity of the polypeptides of the invention, the heparanase assay described by Vlodavsky et al is utilized (Vlodavsky, I., et al., Nat. Med., 5:793-802 (1999)). Briefly, cell lysates, conditioned media or intact cells (1×10⁶ cells per 35-mm dish) are incubated for 18 hrs at 37° C., pH 6.2-6.6, with ³⁵S-labeled ECM or soluble ECM derived peak I proteoglycans. The incubation medium is centrifuged and the supernatant is analyzed by gel filtration on a Sepharose CL-6B column (0.9×30 cm). Fractions are eluted with PBS and their radioactivity is measured. Degradation fragments of heparan sulfate side chains are eluted from Sepharose 6B at 0.5<Kₐᵥ<0.8 (peak II). Each experiment is done at least three times. Degradation fragments corresponding to “peak II,” as described by Vlodavsky et al., is indicative of the activity of the polypeptides of the invention in cleaving heparan sulfate.

### Example 63

[1374] Immobilization of Biomolecules

[1375] This example provides a method for the stabilization of polypeptides of the invention in non-host cell lipid bilayer constucts (see, e.g., Bieri et al., Nature Biotech 17:1105-1108 (1999), hereby incorporated by reference in its entirety herein) which can be adapted for the study of polypeptides of the invention in the various functional assays described above. Briefly, carbohydrate-specific chemistry for biotinylation is used to confine a biotin tag to the extracellular domain of the polypeptides of the invention, thus allowing uniform orientation upon immobilization. A 50 uM solution of polypeptides of the invention in washed membranes is incubated with 20 mM NaIO4 and 1.5 mg/ml (4 mM) BACH or 2 mg/ml (7.5 mM) biotin-hydrazide for 1 hr at room temperature (reaction volume, 150 ul). Then the sample is dialyzed (Pierce Slidealizer Cassett, 10 kDa cutoff; Pierce Chemical Co., Rockford Ill.) at 4 C. first for 5 h, exchanging the buffer after each hour, and finally for 12 h against 500 ml buffer R (0.15 M NaCl, 1 mM MgCl2, 10 mM sodium phosphate, pH7). Just before addition into a cuvette, the sample is diluted 1:5 in buffer ROG50 (Buffer R supplemented with 50 mM octylglucoside).

### Example 64

[1376] TAQMAN

[1377] Quantitative PCR (QPCR). Total RNA from cells in culture are extracted by Trizol separation as recommended by the supplier (LifeTechnologies). (Total RNA is treated with DNase I (Life Technologies) to remove any contaminating genomic DNA before reverse transcription.) Total RNA (50 ng) is used in a one-step, 50 ul, RT-QPCR, consisting of Taqman Buffer A (Perkin-Elmer; 50 mM KCl/10 mM Tris, pH 8.3), 5.5 mM MgCl₂, 240 μM each dNTP, 0.4 units RNase inhibitor(Promega), 8% glycerol, 0.012% Tween-20, 0.05% gelatin, 0.3 uM primers, 0.1 uM probe, 0.025 units Amplitaq Gold (Perkin-Elmer) and 2.5 units Superscript II reverse transcriptase (Life Technologies). As a control for genomic contamination, parallel reactions are setup without reverse transcriptase. The relative abundance of (unknown) and 18S RNAs are assessed by using the Applied Biosystems Prism 7700 Sequence Detection System (Livak, K. J., Flood, S. J., Marmaro, J., Giusti, W. & Deetz, K. (1995) PCR Methods Appl. 4, 357-362). Reactions are carried out at 48° C. for 30 min, 95° C. for 10 min, followed by 40 cycles of 95° C. for 15s, 60° C. for 1 min. Reactions are performed in triplicate.

[1378] Primers (f & r) and FRET probes sets are designed using Primer Express Software (Perkin-Elmer). Probes are labeled at the 5′-end with the reporter dye 6-FAM and on the 3′-end with the quencher dye TAMRA (Biosource International, Camarillo, Calif. or Perkin-Elmer).

### Example 65

[1379] Assays for Metalloproteinase Activity

[1380] Metalloproteinases (EC 3.4.24.-) are peptide hydrolases which use metal ions, such as Zn²⁺, as the catalytic mechanism. Metalloproteinase activity of polypeptides of the present invention can be assayed according to the following methods.

[1381] Proteolysis of alpha-2-macroglobulin

[1382] To confirm protease activity, purified polypeptides of the invention are mixed with the substrate alpha-2-macroglobulin (0.2 unit/ml; Boehringer Mannheim, Germany) in 1×assay buffer (50 mM HEPES, pH 7.5, 0.2 M NaCl, 10 mM CaCl₂, 25 μM ZnCl₂ and 0.05% Brij-35) and incubated at 37° C. for 1-5 days. Trypsin is used as positive control. Negative controls contain only alpha-2-macroglobulin in assay buffer. The samples are collected and boiled in SDS-PAGE sample buffer containing 5% 2-mercaptoethanol for 5-min, then loaded onto 8% SDS-polyacrylamide gel. After electrophoresis the proteins are visualized by silver staining. Proteolysis is evident by the appearance of lower molecular weight bands as compared to the negative control.

[1383] Inhibition of alpha-2-macroglobulin Proteolysis by Inhibitors of Metalloproteinases

[1384] Known metalloproteinase inhibitors (metal chelators (EDTA, EGTA, AND HgCl₂), peptide metalloproteinase inhibitors (TIMP-1 and TIMP-2), and commercial small molecule MMP inhibitors) are used to characterize the proteolytic activity of polypeptides of the invention. The three synthetic MMP inhibitors used are: MMP inhibitor I, [IC₅₀=1.0 μM against MMP-1 and MMP-8; IC₅₀=30 μM against MMP-9; IC₅₀=150 μM against MMP-3]; MMP-3 (stromelysin-1) inhibitor I [IC₅₀=5 μM against MMP-3], and MMP-3 inhibitor II [K₁=130 nM against MMP-3]; inhibitors available through Calbiochem, catalog #444250, 444218, and 444225, respectively). Briefly, different concentrations of the small molecule MMP inhibitors are mixed with purified polypeptides of the invention (50μg/ml) in 22.9 μl of 1×HEPES buffer (50 mM HEPES, pH 7.5, 0.2 M NaCl, 10 mM CaCl₂, 25 μM ZnCl₂ and 0.05% Brij-35) and incubated at room temperature (24° C.) for 2-hr, then 7.1 μl of substrate alpha-2-macroglobulin (0.2 unit/ml) is added and incubated at 37° C. for 20-hr. The reactions are stopped by adding 4×sample buffer and boiled immediately for 5 minutes. After SDS-PAGE, the protein bands are visualized by silver stain.

[1385] Synthetic Fluorogenic Peptide Substrates Cleavage Assay

[1386] The substrate specificity for polypeptides of the invention with demonstrated metalloproteinase activity can be determined using synthetic fluorogenic peptide substrates (purchased from BACHEM Bioscience Inc). Test substrates include, M-1985, M-2225, M-2105, M-2110, and M-2255. The first four are MMP substrates and the last one is a substrate of tumor necrosis factor-α (TNF-α) converting enzyme (TACE). All the substrates are prepared in 1:1 dimethyl sulfoxide (DMSO) and water. The stock solutions are 50-500 μM. Fluorescent assays are performed by using a Perkin Elmer LS 50B luminescence spectrometer equipped with a constant temperature water bath. The excitation λ is 328 nm and the emission λ is 393 nm. Briefly, the assay is carried out by incubating 176 μl 1×HEPES buffer (0.2 M NaCl, 10 mM CaCl₂, 0.05% Brij-35 and 50 mM HEPES, pH 7.5) with 4 μl of substrate solution (50 μM) at 25° C. for 15 minutes, and then adding 20 μl of a purified polypeptide of the invention into the assay cuvett. The final concentration of substrate is 1 μM. Initial hydrolysis rates are monitored for 30-min.

### Example 66

[1387] Characterization of the cDNA Contained in a Deposited Plasmid

[1388] The size of the cDNA insert contained in a deposited plasmid may be routinely determined using techniques known in the art, such as PCR amplification using synthetic primers hybridizable to the 3′ and 5′ ends of the cDNA sequence. For example, two primers of 17-30 nucleotides derived from each end of the cDNA (i.e., hybridizable to the absolute 5′ nucleotide or the 3′ nucleotide end of the sequence of SEQ ID NO:X, respectively) are synthesized and used to amplify the cDNA using the deposited cDNA plasmid as a template. The polymerase chain reaction is carried out under routine conditions, for instance, in 25 ul of reaction mixture with 0.5 ug of the above cDNA template. A convenient reaction mixture is 1.5-5 mM MgCl₂, 0.01% (w/v) gelatin, 20 uM each of dATP, dCTP, dGTP, dTTP, 25 pmol of each primer and 0.25 Unit of Taq polymerase. Thirty five cycles of PCR (denaturation at 94 degree C. for 1 min; annealing at 55 degree C. for 1 min; elongation at 72 degree C. for 1 min) are performed with a Perkin-Elmer Cetus automated thermal cycler. The amplified product is analyzed by agarose gel electrophoresis. The PCR product is verified to be the selected sequence by subcloning and sequencing the DNA product.

[1389] Use of the above methodologies and/or other methodologies known in the art generates fragments from the clone corresponding to the approximate fragments described in Table 8, below. Accordingly, Table 8 provides a physical characterization of certain clones encompassed by the invention. The first column provides the unique clone identifier, “Clone ID NO:Z”, for cDNA clones of the invention, as described in Table 1A. The second column provides the approximate size of the cDNA insert contained in the corresponding cDNA clone.

TABLE 8

| | cDNA |
|---|---|
| Clone ID | Insert |
| NO: Z | Size: |
| H6EDR51 | 2300 |
| HAPRA41 | 1300 |
| HCEQD04 | 700 |
| HDPSU4B | 2900 |
| HFKKZ94 | 1300 |
| HHFMM10 | 1900 |
| HHPSP89 | 2300 |
| HLYDV62 | 800 |
| HMCFB47 | 900 |
| HMSOI20 | 2400 |
| HPMFE91 | 1900 |
| HSMBA19 | 2300 |
| HTPDS90 | 1900 |
| HTPHM71 | 2000 |
| HUUAR12 | 1800 |
| HWLFB60 | 2800 |
| HEGBK63 | 700 |
| HFPER82 | 600 |
| HDPMO62 | 1100 |
| HDPUY72 | 3100 |
| HDTJF87 | 900 |
| HE8TB94 | 1900 |
| HE8UB55 | 3400 |
| HEGBB59 | 2500 |
| HEOQH90 | 2700 |
| HFKHA18 | 1000 |
| HMWJD68 | 1300 |
| HSHAV32 | 2600 |
| HTPHE33 | 1700 |
| HWLGG31 | 2100 |
| HAGDN53 | 1700 |
| HBGSJ13 | 800 |
| HCFMT57 | 2200 |
| HDMAV01 | 1800 |
| HE6GF02 | 600 |
| HEOPL36 | 2100 |
| HNSAA28 | 1600 |
| HOGEQ43 | 3700 |
| HOUDH19 | 400 |
| HSFAM09 | 500 |
| HSVAW49 | 900 |
| HWHHB69 | 2900 |
| HWLFH94 | 1200 |
| HCEML27 | 900 |
| HFKLA09 | 2100 |
| hagdr21 | 300 |
| HTLIT05 | 900 |
| HAPNV33 | 800 |
| HUVGG63 | 2300 |
| HAGAX57 | 1300 |
| HAUBV06 | 1100 |
| HDQGM08 | 900 |
| HOUDS09 | 1700 |
| HTEKY82 | 500 |
| HOHCE47 | 2100 |
| HTEKT33 | 1700 |
| HTEMV66 | 800 |
| HUJAD24 | 1700 |
| HAGFO25 | 800 |
| HAGAE09 | 800 |
| HBJLB53 | 2000 |
| HDPDC84 | 3300 |
| HDPWU07 | 3300 |
| HELGY64 | 2700 |
| HFIYW31 | 1300 |
| HGBAS76 | 1700 |
| HHEBB62 | 500 |
| HHEHU73 | 1000 |
| HHEMA11 | 600 |
| HHSED84 | 800 |
| HIBCC94 | 1300 |
| HLYDC50 | 900 |
| HMADD49 | 2200 |
| HMSHU26 | 1100 |
| HRDBH04 | 1500 |
| HSICR69 | 1700 |
| HTGEL46 | 1600 |
| HTLDU61 | 1100 |
| HTOFT34 | 1500 |
| HTTDH46 | 1200 |
| HTTIO05 | 2600 |
| HWLQX76 | 500 |
| HATDD09 | 1300 |
| HPWCJ63 | 1500 |
| HFPBD28 | 300 |

### Example 67

[1390] Interaction Trap/Two Hybrid System to Identify Interacting Proteins

[1391] The yeast two hybrid system as described in Current Protocols in Molecular Biology, John Wiley and Sons, N.Y. (1996), chapter 19, which is herein incorporated by reference in its entirety, among other assays known in the art, may be employed to assay for the interaction of signal transduction pathway components of the present invention with other proteins. Briefly, expression vectors for generating two types of fusion proteins are generated: one fusion protein contains the LexA DNA binding domain fused to signal transduction pathway component of interest and the other type of fusion protein contains the B42 trancriptional activation domain fused to an protein X, a potential interactor. The EGY48 [MATalpha, leu2, trp1 ura3 his3 LEU2::pLexop6-LEU2 (ΔUAS LEU2)] yeast strain (in which the chromosomal LEU2 gene is under the control of Lex-A operators) is successively transformed with the pSH18-34 lacZ reporter plasmid (in which lacZ expression is under the control of Lex-A operators), a Lex-A-signal transduction pathway component fusion protein vector, and a B-42-fusion protein expression vector library . The LacZ vector contains the URA3 gene; the Lex-A fusion protein vector contains the HIS3 gene, and the B42 expression vector contains the TRP1 gene; the B42 fusion protein is also under the control of the yeast galactose inducible promoter, the GAL1 promoter. At least two separate colonies from plates containing glucose but lacking uracil, histidine, and tryptophan are selected randomly for each coexpressing strain and used to inoculate liquid media containing galactose to induce expression of the B42 fusion, but not uracil, histidine, or tryptophan. Cultures are assayed for β-galactosidase (β-gal), as β-gal expression is an indicator of interaction between the signal transduction pathway component of interest and the protein fused to the B42 transcriptional activation domain.

[1392] It will be clear that the invention may be practiced otherwise than as particularly described in the foregoing description and examples. Numerous modifications and variations of the present invention are possible in light of the above teachings and, therefore, are within the scope of the appended claims.

[1393] The entire disclosure of each document cited (including patents, patent applications, journal articles, abstracts, laboratory manuals, books, or other disclosures) in the Background of the Invention, Detailed Description, and Examples is hereby incorporated herein by reference. In addition, the CD-R copy of the sequence listing submitted herewith and the corresponding computer readable form are both incorporated herein by reference in their entireties. The specification and sequence listing of each of the following U.S. applications are herein incorporated by reference in their entirety: application Ser. No. 60/179,065, filed on Jan. 31, 2000; application Ser. No. 60/180,628, filed on Feb. 4, 2000; application Ser. No. 60/214,886, filed on Jun. 28, 2000; application Ser. No. 60/217,487, filed on Jul. 11, 2000; application Ser. No. 60/225,758, filed on Aug. 14, 2000; application Ser. No. 60/220,963, filed on Jul. 26, 2000; application Ser. No. 60/217,496, filed on Jul. 11, 2000; application Ser. No. 60/225,447, filed on Aug. 14, 2000; application Ser. No. 60/218,290, filed on Jul. 14, 2000; application Ser. No. 60/225,757, filed on Aug. 14, 2000; application Ser. No. 60/226,868, filed on Aug. 22, 2000; application Ser. No. 60/216,647, filed on Jul. 7, 2000; application Ser. No. 60/225,267, filed on Aug. 14, 2000; application Ser. No. 60/216,880, filed on Jul. 7, 2000; application Ser. No. 60/225,270, filed on Aug. 14, 2000; application Ser. No. 60/251,869, filed on Dec. 8, 2000; application Ser. No. 60/235,834, filed on Sep. 27, 2000; application Ser. No. 60/234,274, filed on Sep. 21, 2000; application Ser. No. 60/234,223, filed on Sep. 21, 2000; application Ser. No. 60/228,924, filed on Aug. 30, 2000; application Ser. No. 60/224,518, filed on Aug. 14, 2000; application Ser. No. 60/236,369, filed on Sep. 29, 2000; application Ser. No. 60/224,519, filed on Aug. 14, 2000; application Ser. No. 60/220,964, filed on Jul. 26, 2000; application Ser. No. 60/241,809, filed Oct. on 20, 2000; application Ser. No. 60/249,299, filed on Nov. 17, 2000; application Ser. No. 60/236,327, filed on Sep. 29, 2000; application Ser. No. 60/241,785, filed on Oct. 20, 2000; application Ser. No. 60/244,617, filed on Nov. 1, 2000; application Ser. No. 60/225,268, filed on Aug. 14, 2000; application Ser. No. 60/236,368, filed on Sep. 29, 2000; application Ser. No. 60/251,856, filed on Dec. 8, 2000; application Ser. No. 60/251,868, filed on Dec. 8, 2000; application Ser. No. 60/229,344, filed on Sep. 1, 2000; Application No. 60/234,997, filed on Sep. 25, 2000; Application No. 60/229,343, filed on Sep. 1, 2000; application Ser. No. 60/229,345, filed on Sep. 1, 2000; application Ser. No. 60/229,287, filed on Sep. 1, 2000; application Ser. No. 60/229,513, filed on Sep. 5, 2000; application Ser. No. 60/231,413, filed on Sep. 8, 2000; application Ser. No. 60/229,509, filed on Sep. 5, 2000; application Ser. No. 60/236,367, filed on Sep. 29, 2000; application Ser. No. 60/237,039, filed on Oct. 2, 2000; application Ser. No. 60/237,038, filed on Oct. 2, 2000; application Ser. No. 60/236,370, filed on Sep. 29, 2000; application Ser. No. 60/236,802, filed on Oct. 2, 2000; application Ser. No. 60/237,037, filed on Oct. 2, 2000; application Ser. No. 60/237,040, filed on Oct. 2, 2000; application Ser. No. 60/240,960, filed on Oct. 20, 2000; application Ser. No. 60/239,935, filed on Oct. 13, 2000; application Ser. No. 60/239,937, filed on Oct. 13, 2000; application Ser. No. 60/241,787, filed on Oct. 20, 2000; application Ser. No. 60/246,474, filed on Nov. 8, 2000; application Ser. No. 60/246,532, filed on Nov. 8, 2000; application Ser. No. 60/249,216, filed on Nov. 17, 2000; application Ser. No. 60/249,210, filed on Nov. 17, 2000; application Ser. No. 60/226,681, filed on Aug. 22, 2000; application Ser. No. 60/225,759, filed on Aug. 14, 2000; application Ser. No. 60/225,213, filed on Aug. 14, 2000; application Ser. No. 60/227,182, filed on Aug. 22, 2000; application Ser. No. 60/225,214, filed on Aug. 14, 2000; application Ser. No. 60/235,836, filed on Sep. 27, 2000; application Ser. No. 60/230,438, filed on Sep. 6, 2000; application Ser. No. 60/215,135, filed on Jun. 30, 2000; application Ser. No. 60/225,266, filed on Aug. 14, 2000; application Ser. No.60/249,218, filed on Nov. 17, 2000; application Ser. No. 60/249,208, filed on Nov. 17, 2000; application Ser. No. 60/249,213, filed on Nov. 17, 2000; application Ser. No. 60/249,212, filed on Nov. 17, 2000; application Ser. No. 60/249,207, filed on Nov. 17, 2000; application Ser. No. 60/249,245, filed on Nov. 17, 2000; application Ser. No. 60/249,244, filed on Nov. 17, 2000; application Ser. No. 60/249,217, filed on Nov. 17, 2000; application Ser. No. 60/249,211, filed on Nov. 17, 2000; application Ser. No. 60/249,215, filed on Nov. 17, 2000; application Ser. No. 60/249,264, filed on Nov. 17, 2000; application Ser. No. 60/249,214, filed on Nov. 17, 2000; application Ser. No. 60/249,297, filed on Nov. 17, 2000; application Ser. No. 60/232,400, filed on Sep. 14, 2000; application Ser. No. 60/231,242, filed on Sep. 8, 2000; application Ser. No. 60/232,081, filed on Sep. 8, 2000; application Ser. No. 60/232,080, filed on Sep. 8, 2000; application Ser. No. 60/231,414, filed on Sep. 8, 2000; application Ser. No. 60/231,244, filed on Sep. 8, 2000; application Ser. No. 60/233,064, filed on Sep. 14, 2000; application Ser. No. 60/233,063, filed on Sep. 14, 2000; application Ser. No. 60/232,397, filed on Sep. 14, 2000; application Ser. No. 60/232,399, filed on Sep. 14, 2000; application Ser. No. 60/232,401, filed on Sep. 14, 2000; application Ser. No. 60/241,808, filed on Oct. 20, 2000; application Ser. No. 60/241,826, filed on Oct. 20, 2000; application Ser. No. 60/241,786, filed on Oct. 20, 2000; application Ser. No. 60/241,221, filed on Oct. 20, 2000; application Ser. No. 60/246,475, filed on Nov. 8, 2000; application Ser. No. 60/231,243, filed on Sep. 8, 2000; application Ser. No. 60/233,065, filed on Sep. 14, 2000; application Ser. No. 60/232,398, filed on Sep. 14, 2000; application Ser. No. 60/234,998, filed on Sep. 25, 2000; application Ser. No. 60/246,477, filed on Nov. 8, 2000; application Ser. No. 60/246,528, filed on Nov. 8, 2000; application Ser. No. 60/246,525, filed on Nov. 8, 2000; application Ser. No. 60/246,476, filed on Nov. 8, 2000; application Ser. No. 60/246,526, filed on Nov. 8, 2000; application Ser. No. PT172, filed on Nov. 17, 2000; application Ser. No. 60/246,527, filed on Nov. 8, 2000; application Ser. No. 60/246,523, filed on Nov. 8, 2000; application Ser. No. 60/246,524, filed on Nov. 8, 2000; application Ser. No. 60/246,478, filed on Nov. 8, 2000; application Ser. No. 60/246,609, filed on Nov. 8, 2000; application Ser. No. 60/246,613, filed on Nov. 8, 2000; application Ser. No. 60/249,300, filed on Nov. 17, 2000; application Ser. No. 60/249,265, filed on Nov. 17, 2000; application Ser. No. 60/246,610, filed on Nov. 8, 2000; application Ser. No. 60/246,611, filed on Nov. 8, 2000; application Ser. No. 60/230,437, filed on Sep. 6, 2000; application Ser. No. 60/251,990, filed on Dec. 8, 2000; application Ser. No. 60/251,988, filed on Dec. 5, 2000; application Ser. No. 60/251,030, filed on Dec. 5, 2000; application Ser. No. 60/251,479, filed on Dec. 6, 2000; application Ser. No. PJ005, filed on Dec. 5, 2000; application Ser. No. PJ006, filed on Dec. 1, 2000; application Ser. No. 60/251,989, filed on Dec. 8, 2000; application Ser. No. 60/250,391, filed on Dec. 1, 2000; and application Ser. No. 60/254,097, filed on Dec. 11, 2000.

[1394] Moreover, the microfiche copy and the corresponding computer readable form of the Sequence Listing of U.S. application Ser. No. 60/179,065, and the hard copy of and the corresponding computer readable form of the Sequence Listing of U.S. application Ser. No. 60/180,628 are also incorporated herein by reference in their entireties.

What is claimed is:

1. An isolated nucleic acid molecule comprising a polynucleotide having a nucleotide sequence at least 95% identical to a sequence selected from the group consisting of:
(a) a polynucleotide fragment of SEQ ID NO:X or a polynucleotide fragment of the cDNA sequence contained in Clone ID NO:Z, which is hybridizable to SEQ ID NO:X;
(b) a polynucleotide encoding a polypeptide fragment of SEQ ID NO:Y or a polypeptide fragment encoded by the cDNA sequence contained in cDNA Clone ID NO:Z, which is hybridizable to SEQ ID NO:X;
(c) a polynucleotide encoding a polypeptide fragment of a polypeptide encoded by SEQ ID NO:X or a polypeptide fragment encoded by the cDNA sequence contained in cDNA Clone ID NO:Z, which is hybridizable to SEQ ID NO:X;
(d) a polynucleotide encoding a polypeptide domain of SEQ ID NO:Y or a polypeptide domain encoded by the cDNA sequence contained in cDNA Clone ID NO:Z, which is hybridizable to SEQ ID NO:X;
(e) a polynucleotide encoding a polypeptide epitope of SEQ ID NO:Y or a polypeptide epitope encoded by the cDNA sequence contained in cDNA Clone ID NO:Z, which is hybridizable to SEQ ID NO:X;
(f) a polynucleotide encoding a polypeptide of SEQ ID NO:Y or the cDNA sequence contained in cDNA Clone ID NO:Z, which is hybridizable to SEQ ID NO:X, having biological activity;
(g) a polynucleotide which is a variant of SEQ ID NO:X;
(h) a polynucleotide which is an allelic variant of SEQ ID NO:X;
(i) a polynucleotide which encodes a species homologue of the SEQ ID NO:Y;
(j) a polynucleotide capable of hybridizing under stringent conditions to any one of the polynucleotides specified in (a)-(i), wherein said polynucleotide does not hybridize under stringent conditions to a nucleic acid molecule having a nucleotide sequence of only A residues or of only T residues.

2. The isolated nucleic acid molecule of claim 1, wherein the polynucleotide fragment comprises a nucleotide sequence encoding a protein.

3. The isolated nucleic acid molecule of claim 1, wherein the polynucleotide fragment comprises a nucleotide sequence encoding the sequence identified as SEQ ID NO:Y or the polypeptide encoded by the cDNA sequence contained in cDNA Clone ID NO:Z, which is hybridizable to SEQ ID NO:X.

4. The isolated nucleic acid molecule of claim 1, wherein the polynucleotide fragment comprises the entire nucleotide sequence of SEQ ID NO:X or the cDNA sequence contained in cDNA Clone ID NO:Z, which is hybridizable to SEQ ID NO:X.

5. The isolated nucleic acid molecule of claim 2, wherein the nucleotide sequence comprises sequential nucleotide deletions from either the C-terminus or the N-terminus.

6. The isolated nucleic acid molecule of claim 3, wherein the nucleotide sequence comprises sequential nucleotide deletions from either the C-terminus or the N-terminus.

7. A recombinant vector comprising the isolated nucleic acid molecule of claim 1.

8. A method of making a recombinant host cell comprising the isolated nucleic acid molecule of claim 1.

9. A recombinant host cell produced by the method of claim 8.

10. The recombinant host cell of claim 9 comprising vector sequences.

11. An isolated polypeptide comprising an amino acid sequence at least 90% identical to a sequence selected from the group consisting of:
(a) a polypeptide fragment of SEQ ID NO:Y or the encoded sequence contained in cDNA Clone ID NO:Z;
(b) a polypeptide fragment of SEQ ID NO:Y or the encoded sequence contained in cDNA Clone ID NO:Z, having biological activity;
(c) a polypeptide domain of SEQ ID NO:Y or the encoded sequence contained in cDNA Clone ID NO:Z;
(d) a polypeptide epitope of SEQ ID NO:Y or the encoded sequence contained in cDNA Clone ID NO:Z;
(e) a full length protein of SEQ ID NO:Y or the encoded sequence contained in cDNA Clone ID NO:Z;
(f) a variant of SEQ ID NO:Y;
(g) an allelic variant of SEQ ID NO:Y; or
(h) a species homologue of the SEQ ID NO:Y.

12. The isolated polypeptide of claim 11, wherein the full length protein comprises sequential amino acid deletions from either the C-terminus or the N-terminus.

13. An isolated antibody that binds specifically to the isolated polypeptide of claim 11.

14. A recombinant host cell that expresses the isolated polypeptide of claim 11.

15. A method of making an isolated polypeptide comprising:
(a) culturing the recombinant host cell of claim 14 under conditions such that said polypeptide is expressed; and
(b) recovering said polypeptide.

16. The polypeptide produced by claim 15.

17. A method for preventing, treating, or ameliorating a medical condition, comprising administering to a mammalian subject a therapeutically effective amount of the polynucleotide of claim 1.

18. A method of diagnosing a pathological condition or a susceptibility to a pathological condition in a subject comprising:
(a) determining the presence or absence of a mutation in the polynucleotide of claim 1; and
(b) diagnosing a pathological condition or a susceptibility to a pathological condition based on the presence or absence of said mutation.

19. A method of diagnosing a pathological condition or a susceptibility to a pathological condition in a subject comprising:
(a) determining the presence or amount of expression of the polypeptide of claim 11 in a biological sample; and
(b) diagnosing a pathological condition or a susceptibility to a pathological condition based on the presence or amount of expression of the polypeptide.

20. A method for identifying a binding partner to the polypeptide of claim 11 comprising:
(a) contacting the polypeptide of claim 11 with a binding partner; and
(b) determining whether the binding partner effects an activity of the polypeptide.

21. The gene corresponding to the cDNA sequence of SEQ ID NO:Y.

22. A method of identifying an activity in a biological assay, wherein the method comprises:
(a) expressing SEQ ID NO:X in a cell;
(b) isolating the supernatant;
(c) detecting an activity in a biological assay; and identifying the protein in the supernatant having the activity.

23. The product produced by the method of claim 20.

24. A method for preventing, treating, or ameliorating a medical condition, comprising administering to a mammalian subject a therapeutically effective amount of the polypeptide of claim 11.

The application's sequence listing, which the Patent Office published only in electronic form, follows.

SEQUENCE LISTING (1510 sequences)

SEQ ID NO: 1 - DNA, 733 bp, Homo sapiens
gggatccggagcccaaatcttctgacaaaactcacacatgcccaccgtgcccagcacctgaattcgagggtgcaccgtcagtcttcctcttccccccaaaacccaaggacaccctcatgatctcccggactcctgaggtcacatgcgtggtggtggacgtaagccacgaagaccctgaggtcaagttcaactggtacgtggacggcgtggaggtgcataatgccaagacaaagccgcgggaggagcagtacaacagcacgtaccgtgtggtcagcgtcctcaccgtcctgcaccaggactggctgaatggcaaggagtacaagtgcaaggtctccaacaaagccctcccaacccccatcgagaaaaccatctccaaagccaaagggcagccccgagaaccacaggtgtacaccctgcccccatcccgggatgagctgaccaagaaccaggtcagcctgacctgcctggtcaaaggcttctatccaagcgacatcgccgtggagtgggagagcaatgggcagccggagaacaactacaagaccacgcctcccgtgctggactccgacggctccttcttcctctacagcaagctcaccgtggacaagagcaggtggcagcaggggaacgtcttctcatgctccgtgatgcatgaggctctgcacaaccactacacgcagaagagcctctccctgtctccgggtaaatgagtgcgacggccgcgactctagaggat

SEQ ID NO: 2 - protein, 5 aa, Homo sapiens
  Site (3): Xaa equals any of the twenty naturally ocurring L-amino acids
WSXWS

SEQ ID NO: 3 - DNA, 86 bp, Artificial Sequence
  Primer_Bind: Synthetic sequence with 4 tandem copies of the GAS binding site found in the IRF1 promoter (Rothman et al., Immunity 1:457-468 (1994)), 18 nucleotides complementary to the SV40 early promoter, and a Xho I restriction site.
gcgcctcgagatttccccgaaatctagatttccccgaaatgatttccccgaaatgatttccccgaaatatctgccatctcaattag

SEQ ID NO: 4 - DNA, 27 bp, Artificial Sequence
  Primer_Bind: Synthetic sequence complementary to the SV40 promter; includes a Hind III restriction site.
gcggcaagctttttgcaaagcctaggc

SEQ ID NO: 5 - DNA, 271 bp, Artificial Sequence
  Protein_Bind: Synthetic promoter for use in biological assays; includes GAS binding sites found in the IRF1 promoter (Rothman et al., Immunity 1:457-468 (1994)).
ctcgagatttccccgaaatctagatttccccgaaatgatttccccgaaatgatttccccgaaatatctgccatctcaattagtcagcaaccatagtcccgcccctaactccgcccatcccgcccctaactccgcccagttccgcccattctccgccccatggctgactaattttttttatttatgcagaggccgaggccgcctcggcctctgagctattccagaagtagtgaggaggcttttttggaggcctaggcttttgcaaaaagctt

SEQ ID NO: 6 - DNA, 32 bp, Artificial Sequence
  Primer_Bind: Synthetic primer complementary to human genomic EGR-1 promoter sequence (Sakamoto et al., Oncogene 6:867-871 (1991)); includes a Xho I restriction site.
gcgctcgagggatgacagcgatagaaccccgg

SEQ ID NO: 7 - DNA, 31 bp, Artificial Sequence
  Primer_Bind: Synthetic primer complementary to human genomic EGR-1 promoter sequence (Sakamoto et al., Oncogene 6:867-871 (1991)); includes a Hind III restriction site.
gcgaagcttcgcgactccccggatccgcctc

SEQ ID NO: 8 - DNA, 12 bp, Homo sapiens
ggggactttccc

SEQ ID NO: 9 - DNA, 73 bp, Artificial Sequence
  Primer_Bind: Synthetic primer with 4 tandem copies of the NF-KB binding site (GGGGACTTTCCC), 18 nucleotides complementary to the 5' end of the SV40 early promoter sequence, and a XhoI restriction site.
gcggcctcgaggggactttcccggggactttccggggactttccgggactttccatcctgccatctcaattag

SEQ ID NO: 10 - DNA, 256 bp, Artificial Sequence
  Protein_Bind: Synthetic promoter for use in biological assays; includes NF-KB binding sites.
ctcgaggggactttcccggggactttccggggactttccgggactttccatctgccatctcaattagtcagcaaccatagtcccgcccctaactccgcccatcccgcccctaactccgcccagttccgcccattctccgccccatggctgactaattttttttatttatgcagaggccgaggccgcctcggcctctgagctattccagaagtagtgaggaggcttttttggaggcctaggcttttgcaaaaagctt

SEQ ID NO: 11 - DNA, 4746 bp, Homo sapiens
cccagctggaggaagcggcggcggcggccacgatgagtgcgggcgacgcagtgtgcaccggctggctcgttaagtcgccccccgagaggaagctacagcgctacgcctggcgcaagcgctggtttgtcctccggcgaggccgcatgagcggcaaccccgatgtcttggagtactacaggaacaagcactccagcaagcccatccgggtgatagacctcagcgagtgtgcagtgtggaagcatgtgggccccagctttgttcggaaggaatttcagaataatttcgtgttcattgtcaagactacttcccgtacattctacctggtggccaaaactgagcaagaaatgcaggtgtgggtgcacagcatcagtcaggtctgcaaccttggccacctggaggatggtgcagattccatggagagcctctcttacacgccctcctccctgcagccatcctctgccagctcccttcttaccgcccatgctgccagctcctctttgccaagagatgacccaaacactaatgccgtagccactgaggaaaccagaagtgagtcagagcttctcttccttccagattatctggttttgtccaactgcgagactggaagactgcaccataccagtctacccaccagatgtgatagctggtcaaactcagaccgttcattggaacaggcttcatttgatgatgtttttgttgactgcctgcagccgctcccctccagtcatttggtccacccctcatgccatggcagtggagctcaggaggtgccatcctcgaggcctcaggctgccctgatctggagtagagaaatcaatgggccacccagggaccacttgtcttcttcaccattgctggaaagttccttaagttccaccattcaggtagataaaaatcaaggttccttaccctgtggagcaaaagaactagacattatgtccaacactccacctccccgcccccctaagccaagccatctgtctgaacggcgccaagaggagtggagtacacacagtggtagcaagaagccagaatgcactctggttccaagaagaatctccctctctggtttagacaacatgagaacctggaaagctgatgtagaaggccaatccttaagacaccgagacaagcggcttagtttgaatttgccatgcaggttctccccgatgtaccccacagcttcagccagtatcgaagacagctatgtgcccatgagcccccaggctggtgcctctggtcttggaccccactgcagccctgatgactacattccaatgaactcaggaagcatctcaagcccgttgcctgagctgcctgcaaacctggaacctcccccagtgaatagagatctcaagcctcagaggaaatcacggccacctcctctggacctgagaaacctctcgatcatccgggaacatgcatctcttaccaggacccgcactgtgccttgcagtcgaaccagctttctctctccagaaagaaatggtattaattctgcaagattttttgctaatcctgtttccagagaagacgaagaaagctacatcgaaatggaggagcaccgaacagccagttccctgagcagtggtgcccttacgtggacaaagaaattcagcctagattatttggccctggacttcaattcagcatcaccagcccccatgcagcagaaacttctcctttcagaagaacaaagagtagactatgtccaagtggatgagcagaagacacaggctctccagagcacaaaacaggagtggacggatgaaaggcaatccaaagtatgagaggtgcgggcttgtgccatgtgtgaaacagggaagcttggggctcagtttgagttttttcttttttttttttttttgtccactaaaaacacactgatggtcaacacaggtcaaaaccaagagagaatgtgtagttttcaaggtcttggccagaacctttaggaaagaagacctgtttatacattgaaggaagaaaagaaggaagcagttgccttccggagggggctctgagagaatctagcctcccctctgtcctattggagcaaagattggagtgagtgttgccaccaacaggattttatcgtttgactccaatacctgaaattctgacttctctcctgtgcttcaatgagaatgataaattatcctagcaaaggggcctctggagaccatcttgttccagcctctgaagacagttgaggagatcaagcccagcaatggtggcagaatcttactccacagacttcagcagactagtcatttcaatacccaaagaaagacaagtgacaggggcaatggatctcaggctctgagataagtatatcagatgacactggtggctctaaggatattgcaattaagcagctacctgtagccaggtattctgctgctcttggccttttcccacgcatcgtctcgtgtcttctccgaaagaccttggaagataggcctggaagagactgttgatgccactttgaagaaaagaacactgagaactagaggagggaacactttgcccaagattactcacaaagccaagacccagagtccagcttagagaatagagttgttcaggctgccaattgcaagctcattcctctacctcatacttcctctgaggattttgacaaaatggattaattgggtgagccttggagacatgtgggaaacacctgcagacacaaaatgagtagtcatcctgtctccctttcaatagggatctgaacaggtgttttgatacttgaaagatgtgcatgtcaagtgagggtttctttctgcgatgttcaactggaactctcccatcagtagttacaattagaaatacctactgatggttagtctgaaggccattctcatggtcacctatacagtgtgtttccctgtgagctagcagacacaatgaccaggaaaaaacctatgaattccattcttaggtttcccagccaattgctcccttctgctttagaagtgactaggtactgagagtacaaacactcccactttataatgaaggcgtcatgtcaccccttcctttacaggtcctggggtccaggagacccagaatgaaggtgtcagttgggcatgaagtgttatttagtgtccattcttgatccttctgagcacctacagctggaaactaagcagatactggtcctgcattctgactgagattgtgtcttctttatgaggatagatcaaattggcagtcaggcccatgatagtcagtgcagttggggcagttgtagactttgctacaggatttcagggtttccaatcaccccacaggtaagtgaatgccaaagtcttcttttttcagaccatacaagaagtcattttgattttcaaagaagccgttttgattttcaaagaagcaggttctggtgacattattttcttccttggacaaagtggggggaaatttctaagtattttaactgagttcagggtccttagtgagcctggacagagcaaggagagggctccccactccctaagccccacagccagttctgcatcaccacacacagccagagcctgtgaggagctgccttcttccccatgtgacttgcaaagagtctcaggcaagaaaccagggcttcaaactgctagttcccatggagggtagttccctcgtgtggagcacttgtgttaggatcactgattatctgacaaaggctggtgcagaaaaaaaattgtaggcccaagtgtcaagaaccacaccagattggagatagaaaagaatagctgaaattatgtcagtggtgaaatgtcactccattgacccaccgaaaaaagaaaagaaatctgtttctaccaaacatttccagaaacgtatttatagcatgaagaaacacacatgggtagtgtgacctgtttggatgtgattacttaaaaatggaatgctctgaataggcactctctacattaaaggtatggaaggcgataggggtcagaattttaaaaatttaattttgaaaaaggtgactcacccctcatttccagagtgtaggcaattatgtcctgctttgataaaactgctagaggatggctatgcaaaagcataacgattcaaggaaacaaagtacaggtagtttttgagctgacagcagcaaaggcaccataagtcaaaatattggttttggtggagatgatcgatgtgtgtgtgtgagagagagctatgtttctaaccaagggcctaatgtttgttacagaaatgatcccagagacctacaagatgtgggaatcagcataacagggcaatgcagcaattaaccccacatcgttttctgtagttcctttttgtttcattttcttctgtctcacctcgttagaaaattcctcccagtcaggggtcgtccagtgcaggacgggggacccaagggtctcaagcctgcaagtccagaaggtgacaaacccaggagcactgggagttaagctttccttggggagggaagagccttgatgtccagcacacagcctggctataaagacacgaagcgacctacccactgtacagtccacttcacaggatcagctgaatcatgacctttaaaagttccgagttgaaactgaaggctctcctcagacctggctttttcctcagtccctgttcataccatctctgcacccacaatcacactgatttttcaaattcattttgtttttgctgtttcatttctggcattaataaaagtcttataaggaaaaaaaaaaaaaaaaaaaaaaaaaaaaa

SEQ ID NO: 12 - DNA, 2314 bp, Homo sapiens
ggcacgagctcgtgccgaattcggcacgagggcgcctcagccatggccctgcgcaaggaactgctcaagtccatctggtacgcctttaccgcgctggacgtggagaagagtggcaaagtctccaagtcccagctcaaggtgctgtcccacaacctgtacacggtcctgcacatcccccatgaccccgtggccctggaggaacacttccgagatgatgatgacggccctgtgtccagccagggatacatgccctacctcaacaagtacatcctggacaaggtggaggagggggcttttgttaaagagcactttgatgagctgtgctggacgctgacggccaagaagaactatcgggcagatagcaacgggaacagtatgctctccaatcaggatgccttccgcctctggtgcctcttcaacttcctgtctgaggacaagtaccctctgatcatggttcctgatgaggtggaatacctgctgaaaaaggtactcagcagcatgagcttggaggtgagcttgggtgagctggaggagcttctggcccaggaggcccaggtggcccagaccaccggggggctcagcgtctggcagttcctggagctcttcaattcgggccgctgcctgcggggcgtgggccgggacaccctcagcatggccatccacgaggtctaccaggagctcatccaagatgtcctgaagcagggctacctgtggaagcgagggcacctgagaaggaactgggccgaacgctggttccagctgcagcccagctgcctctgctactttgggagtgaagagtgcaaagagaaaaggggcattatcccgctggatgcacactgctgcgtggaggtgctgccagaccgcgacggaaagcgctgcatgttctgtgtgaagacagccacccgcacgtatgagatgagcgcctcagacacgcgccagcgccaggagtggacagctgccatccagatggcgatccggctgcaggccgaggggaagacgtccctacacaaggacctgaagcagaaacggcgcgagcagcgggagcagcgggagcggcgccgggcggccaaggaagaggagctgctgcggctgcagcagctgcaggaggagaaggagcggaagctgcaggagctggagctgctgcaggaggcgcagcggcaggccgagcggctgctgcaggaggaggaggaacggcgccgcagccagcaccgcgagctgcagcaggcgctcgagggccaactgcgcgaggcggagcaggcccgggcctccatgcaggctgagatggagctgaaggaggaggaggctgcccggcagcggcagcgcatcaaggagctggaggagatgcagcagcggttgcaggaggccctgcaactagaggtgaaagctcggcgagatgaagaatctgtgcgaatcgctcagaccagactgctggaagaggaggaagagaagctgaagcagttgatgcagctgaaggaggagcaggagcgctacatcgaacgggcgcagcaggagaaggaagagctgcagcaggagatggcacagcagagccgctccctgcagcaggcccagcagcagctggaggaggtgcggcagaaccggcagagggctgacgaggatgtggaggctgcccagagaaaactgcgccaggccagcaccaacgtgaaacactggaatgtccagatgaaccggctgatgcatccaattgagcctggagataagcgtccggtcaccagcagctccttctcaggcttccagccccctctgcttgcccaccgtgactcctccctaaagcgcctgacccgctggggatcccagggcaacaggaccccctcgcccaacagcaatgagcagcagaagtccctcaatggtggggatgaggctcctgccccggcttccacccctcaggaagataaactggatccagcaccagaaaattagcctctcttagccccttgttcttcccaatgtcatatccaccaggacctggccacagctggcctgtgggtgatcccagctcttactaggagagggagctgaggtcctggtgccaggggcccaggccctccaaccataaacagtccaggatggaacctggttcacccttcataccagctccaagccccagaccatgggagctgtctgggatgttgatccttgagaacttggccctgtgctttagacccaaggacccgattcctgggctaggaaagagagaacaagcaagccggggctacctgcccccaggtggccaccaagttgtggaagcacatttctaaataaaaactgctcttagaatgaaaaaaaaaaaaaaaaa

SEQ ID NO: 13 - DNA, 1278 bp, Homo sapiens
ggcacgagcgatgagcagctcttatgagtcgtatgatgaagaggaggaggatgggaaggggaagaaaacccggcaccagtggccctccgaggaggcctccatggacctggtcaaggacgccaaaatctgcgccttcctgctgcggaagaagcggttcggccagtggaccaagttgctctgcgtcatcaaagacaccaaactgctgtgctataaaagttccaaggaccagcagcctcagatggaactgccactccaaggctgtaacattacgtacatcccgaaagacagcaaaaagaagaagcacgagctgaagattactcagcagggcacggacccgcttgttctcgccgtccagagcaaggaacaggccgagcagtggctgaaggtgatcaaagaagcctacagtggttgtagtggccccgtggattcagagtgtcctcctccaccaagctccccggtgcacaaggcagaactggagaagaaactgtcttcagagagacccagctcagatggggagggtgttgtggaaaatggaattaccacatgtaatggaaaggagcaagtgaagaggaagaaaagttccaaatcagaggccaagggcactgtgtcgaaagtcactgggaaaaaaatcaccaagatcatcagtctgggaaagaaaaagccgtccacagacgagcagacctcctcagctgaggaagatgttcccacctgcggctatctgaacgtgctctccaacagccgctggcgagagcgctggtgccgagtgaaagataacaagctcattttccacaaggacaggaccgacctgaagacccatattgtgtctattccgctccgtggctgcgaggtgatcccgggtttggattctaaacatcctctgacgttccggctgctgcgcaacggccaggaggttgcagtattggaggcatcttcttctgaagacatgggcaggtggattgggattttactcgcagagacgggatcgtccacagacccggaggctctgcactatgactacattgatgtggagatgtctgcaagtgtcattcagacagccaaacagaccttctgtttcatgaacaggcgtgttatatctgctaacccatatctagggggcacctccaacggctatgcccaccccagcgggacggcacttcattatgacgatgtcccgtgcatcaacggctcgctcaagggtaaaaagccccccgtggcgtctaatggggtcacaggaaaagggaagactctgagcagtcagccaaaaaaaaaaaaaaaaaa

SEQ ID NO: 14 - DNA, 353 bp, Homo sapiens
  SITE (56): n equals a,t,g, or c
  SITE (233): n equals a,t,g, or c
gttcgctggcaagtgagtcgccctcaggaacagagggcacctacctggattccagngcaagctacatcatgtacatggatgagtcatttgctaaccctcagtttgtccatctgtaaaacaggagtaaagattcccttcctaacagggttagagtggggacaaggtgagggagtagaatgtgcggagacgtccaaacttagctgtacattggaatcatctgaggatctttgaanagtatcagggcttgcctcctgccctcagacattctgatttaattgttacaggagtgtggcctggtatcggaagttctcaaagctcctgccggcataacggtttgaagccaggactgctgg

SEQ ID NO: 15 - DNA, 2174 bp, Homo sapiens
  SITE (24): n equals a,t,g, or c
  SITE (176): n equals a,t,g, or c
  SITE (1323): n equals a,t,g, or c
  SITE (1900): n equals a,t,g, or c
  SITE (1968): n equals a,t,g, or c
attcggcacgatgagatcctacancccgaggagattaagctgcaggaggccatgttcgagctggtcacttccgaggcgtcctactacaagagtctgaacctgctcgtgtcccacttcatggagaacgagcggataaggaagatcctgcacccgtccgaggcgcacatcctcttctncaacgtcctggactgctggctgtcagtgagcggttcctcctgggagctggagcaccggatggaggagaacatcgtcatctctgacgtgtgtgacatcgtgtaccgttatgcggccgaccacttctctgtctacatcacctacgtcagcaatcagacctaccaggagcggacctataagcagctgctccaggagaaggcagctttccgggagctgatcgcgcataggagctcgaccccaagtgcagggggctgcccttctcctccttcctcatcctgcctttccagaggatcacacgcctcaagctgttggtccagaacatcctgaagagggtagaagagaggtctgagcgggagtgcactgctttggatgctcacaaggagctggaaatggtggtraaggcatgcaacgagggcgtcaggaaaatgagccgcacggaacagatgatcagcattcagaagaagatggakttcaagatcaaktcggtgcccatcatytcccaytcccgytggytgytgaagcagggtgagytgcagcagwtktmaggccccaagacytcccggaccctgaggaccaagaagctcttccacgaaatttacctcttcctgttcaacgacctgctggtgatctgccggcagattccaggagacaagtaccaggtatttgactcagctccgcggggactgctgcgtgtggaggagctggaggaccagggccagacgctggccaacgtgttcatcctgcggctgctggagaacgcaratgaccgggaggccacctacatgctaaaggcgtcctctcagagtgagatgaagcgttggatgacctcactggcccccaacaggaggaccaagtttgtttcgttcacatcccggctgctggactgcccccaggtccagtgcgtgcacccatacgtggctcagcagccagacgagctgacgctggagctcgccgacatcctcaacatcctggacaagactgacgacgggtggatctttggcgagcgtctgcacgaccaggagagaggctggttccccagctccatgactgaggagatcttgaatcccaagatccggtcccagaacctcaaggaatgtttccgtgtccacaagatggatgaccctcagcgcagcagaacaaggaccgcangaagctgggcagccggaatcggcaatgacccccacccagggggccagcgggagcagggcctgcatgagaccccgacagaaggtggggggggggctctgggaagcacaggccagcacctccccaggtggcaggatctggcttggggtgcccggccctcatccctgcccacgcatrrgtgctcatgtgtcttggccccttgctygcaaactggataaagggtgcccaagcctctcctgatgcatttgtaaacaagaaggtttcagcagtattacaccacctccctcatgcctccgagggggtggaagggggtgggcacactccagggccccccatgcccctggcccccagggactggaagaggctcccaacccagagtgtccctgtgggaggcaggcagaaggtgacaattgacacgatttcctgcacgcgtcctcctctaccttggaagcagttagaatctaccaggcacagatgaggccgcccttgcctgacggagcttgatgagcagcccttggtctccggttccaggactgagagcccagctgcctctgcccacccttccccaggcctctgccancctctggctgcacggtcaggccctgccccatggcaggcctgccagagcttggctggggacccctcccncctctggctccctgatgggctggatgtaacttgtgtcttctagccscttaaggagcccaggtgttttaaggaatgaattggtcactgcatcttgtatcgattatggttctgagaaaagcaaatatcacttttggctgcattaaaagaagcatcatatataaaataaaraaaaaaaaaaaaaaaaaactcggggggggggcccggta

SEQ ID NO: 16 - DNA, 3789 bp, Homo sapiens
taacccctcactaaagggaacaaaagctggagctccaccgcggtggcggccgctctagaactagtggatcccccgggctgcaggaattcggcacgagccgcctggccgggcgtagacgcggtggcagagccgcgcggcgctggaagcgagtggcggacggcgggacctcggcggactcgcatggaggaggagggtgtgaaggaarccggtgagaagcctcggggagcacagatggtggacaaggctggctggatcaagaagagcagtgggggcctcctgggtttctggaaagaccgatatctgctcctctgccaggcccagctgctggtctatgagaatgaggatgatcagaagtgtgtggagactgtggagctgggcagctatgagaagtgccaggaccttcgtgccctcctcaagcgaaaacaccgctttatcctgctgcgatccccagggaacaaggtcagcgacatcaaattccaggcacccaccggggaggagaaggaatcctggatcaaagccctcaatgaagggattaaccgaggcaaaaacaaggctttcgatgaggtaaaggtggacaagagctgcgccctggagcatgtgacacgggaccgggtgcgagggggccagcgacgccggccaccaacgagagtccacctgaaggaggtgkytcwtkyaktttctgacggtcttctgcgcctggatcttgatgttccggacagtgggccaccagtgtttgcccccagcaatcatgtcagtgaagcccaacctcgggagacaccccggcccctcatgcctcctaccaagcctttcctagcacctgagaccaccagccctggtgacagggtggagacccctgtgggggagagagccccaacccctgtctcakcaagctctgaggtctcccctgagagccaagaggactcagagaccccagcasaggaggacagtggctctgagcagcctcccaacagcgtcctgcctgacaaactgaaggtgagctgggagaaccccagcccccaggaggcccctgctgcagagagtgcagaaccgtcccaggcaccctgttctgagacttctgaggctgcccccagggagggkgggaagccccctacacccccwcycaagatcttatcagagaaactgaaagcctccatgggtgagatgcaggcttytgggccacctgctccaggcacagtgcaggtctcagtgaatggcatggatgacagtcctgagcctgccaagccctctcaggctgagggcaccccaggaactcctccaaaggatgcaacaacatccacagcactgcccccctgggacctgccacctcagttccatccccgctgctcctcccttggggacttgcttggggaaggcccgcggcatcccttgcagcccagggaacggctatatcgggcccagctggaggtgaaggtggcctcggaacagacggagaaactgttgaacaaggtgctgggcagtgagccggcccctgttagtgccgaaacattgctcagccaggctgtggagcagctgaggcaggccacccaggtcctgcaggaaatgagagatttgggagagctgagccaggaagcacctgggctaagggagaagcggaaggagctggtgaccctctacaggagaagtgcaccctagggccttctgggccagaggcaccatcccttctggccatccatcaagtccatcaaggcccagccctgctgagaaatgtgcttctgcttctacagcaatggctgcaggagggccattgggcatgtcagggtttggccatgacccgaagagactcctggcgtccttcctactctgctctggccagtggtgccaggtgccacccagggctactgcctggctatctggcctggcctctgggctggggctggggctgggagcacacacgctgggacctatgtgtttgtgtggtcgttccaaactgccccagggctttgggggcggcacttggggtttctgggaatgacatcatctctgttccccatccccagtagtttacattcctgacttctgaatacagcacagctgagccccctgcagctcccatctccagctattcctaggcaaagagcctcatggctaaggcagcctcaaagccagcccctcctcccacctattctgagtagctgcagaggccttgggtccaggctctaggttcatccctcagttggggggaacgtaggacccagctggagcctcttgagggagatgagaggcctctttgtgaggaggacattagctgtgtggcctctctctctttggccctgtttccttttttgcaaaacaaggacattttctgcagccccttcctctcagtgagctatgattggagggcttaggtctggaggattcaagagtggaagaggaatttaaggggtcccctagtctagtctctgcccctggatagtgtccagccttgtatatttctgaagaggtggatcccagagtggctctgatgtccacattagaaaaacttacttgtaatgatcatgtcagccttcagaagagaatccccaccaacttctgtgcctcctcagatggggatttatctggatctctgtggttccttctcagccgaaacaggtccagtatcccagtcatttcttcaaatgctgataggggtatgttggaatccgaagccacttccccgccttcaagccccagatgggctgctctcctgtaactttctaggagaagagacattttcttctttccctttcctggtccatccctgcaccctggtcctctcccagcctctcccccacattgtccctgactctaggggcacatccagtctccatcgtgctgcagcagctggactgagggcagagcctgtaggtgcagaggccctggctcccgaggtccagccactctccctggggcctctggggtgagagcagcttccgataggacctgcccagatttctgcatgtgcacttttgtttactgaaagagagaaaggggggggtcacagcaacatgccctggcctttctgcyctgttccccaaccccactgaggcctgctgcacaggtcaatgccttcgttatcgttattgtactgtcactttgttcttgaggtagtagtcaaggatcaggaggggcagatgtcttctctgggctgcgtggggccggagcagaggtgagcagcaatgcactggttcgggagcccccatcagcctccttgtgcaaactgggcccccatgccacagtctggctttccctccatctgccccaggacaagagcaagaaggacatcagttgcccagtcatgtgatcccctgccatcttgccttaggaacagccttcccccaccagcagccatggctggctggggctttagccaagccacctactgccaggaattggagcctcagttccctcctgtgtcaagtagctaactgcagcagctggactgagggcagagtctgtgggtgcagagaccctgcatgtaggtcacaggttgaggcccagccactctccctggggcctggtgggtaggcaagtagctctggggccacctcaagtgaccaaatgctattaatttccatcctttagcaggctgggccctaggcaggaagctggcttctgggagaggagtgagaacgtgcagggcctgcctagcttgcgtgcttgaggaaggtggcattccgtgcttgcctccttgaggagggtggcattctgtgtcttctgcttatgaagcgcctttcttaaagtttggcaataaatccatttttatggaaaaaaaaaaaaaaaaaaaaaaaa

SEQ ID NO: 17 - DNA, 639 bp, Homo sapiens
ggcacgagtgggagccttttccttcggagcagcagccctgtccggcatctgtcttgagctcccagcaaggaaagtccatcagcttgataatggaggagaacaatgactccacggagaacccccaacaaggccaagggcggcagaatgccatcaagtgtgggtggctgaggaagcaaggaggctttgtcaagacttggcatactcgctggtttgtgctcaagggggatcagctctattatttcaaagatgaagatgaaaccaagcccttggaatatttgacaacgtctggagacagtgtctggcttgtcacagttggggaagataccacagatatctcgtgggtagaagccggggtgcagttaaatatcctatgaagcatataatgctgttctctacaacaaagaattgtctgacgttgctgaagttaagaaactctggaccaaggtttttggcctgaacagaggaaagaatgatgctaccagtaacagaatgagggcgctgctagtgcagtatagtttgcaaaaaggaaaccagagttctgtctttttgaagtgcctatcagattttcaaggccaatgtcaaatattacaatatcataaagtaaaaataagattaaagtttaaaaaaaaaaaaaaaaaa

SEQ ID NO: 18 - DNA, 2947 bp, Homo sapiens
  SITE (383): n equals a,t,g, or c
gagattctttcgaaaaggagctttgcttcccatgacgcagagggaagtgtcaactgggatatttctggtaaaactgaaagcaagaaaagcagggtgctagcccctgtggsactgagggtggagkctgggggagtttgggtgccatcctccagtgacagatggatggacctttcatctaagagaaaggaggagacacgttggcaaatcagcctcaagcctaagattgcttgtgaagcaatcataaggaggaacaaaaacagacacaaaaacagagggaaagagtgaaaagacaagaagggcgcaaactgtgacagactcaccgcttcactaactactcacttaaactggaagcaaaatgtccctaaaattgccaaggaactggngatttcaacctgaaagtggaggctgcgaaaatagctcggtcaaggagtgtgatgactggcgagcagatggctgccttccatccatcgtccacccccaacccgctggagaggcccatcaagatgggctggctgaagaagcagaggtccatcgtgaagaactggcagcagaggtactttgtgctgagggcgcagcagctctactactacaaggatgaagaggacacgaagccccagggstgcatgtatctaccaggatgtacaatcaaggagatcgccacaaacccagaagaagctgggaagtttgtctttgaaatcattccagcctcatgggaccagaatcgcatgggacaggactcctatgtcctcatggccagctctcaggcggagatggaggagtgggttaaattcctcaggagagttgctggcacaccctgtggagcagtgtttggccagcgcttggatgagactgtggcctatgaacagaaattcggcccccatctggtgcccatcctggtggagaaatgtgcagagttcatcctggagcacggccggaatgaagagggcatcttycgtctgcctgggcaggacaacctggtgaagcagctgagagacgcttttgatgctggggagcggccctcctttgacagagacacagatgtgcacactgtggcttccctgttaaagctctacctccgagacctcccagagcccgtggttccctggagccagtacgaagggttcctgctctgtgggcagctcacgaatgcggatgaggcaaaggctcagcaggagttgatgaagcagctctccatccttcctcgtgacaactatagtctcctgagctacatctgcaggttcctacatgaaatacagctgaactgtgctgttaacaagatgagtgtggacaacctggctactgtgattggtgtgaatctcatcaggtcgaaggtcgaagccytgccgtgatcatgagagggactcctcagatccaaagagtgatgactatgatgatcagagaccatgaagtcctcttccccaagtccaaggatatacccctgtcaccccctgcccagaaaaatgaccccaagaaagctccagtggcccgaagctctgtaggctgggatgccactgaagacctccgaatttctaggacagacagcttcagtagcatgacaagcgactctgatacaaccagccccaccggacagcagccgagcgatgcgtttccggagacagcagcaaagtacccagggaaaagccaggagactggaaaatgcaatctcgtaaaaggactcaaacactccctaaccggaaatgtttcttgacatcagcttttcagggtgccaacagcagcaaaatggagatctttaaaaatgaattctggtcgccttcctcagaggctaaggcaggggaagggcacaggagaacgatgtctcaagacttgcgccaactttctgactcccaacggacttccacctacgataacgtcccttccctgccagggtcccctggggaggaagccagtgcactctcttcccaagcctgtgactccaagggagatactcttgccagtccaaactctgaaactgggcctggaaaaaagaactctggagaagaggaaattgattctttgcagagkatggtccaagagctacgaaaggaaatagaaacacagaagcaaatgtatgaggaacagattaaaaaccttgagaaggaaaattatgacgtttgggctaaagtggtgaggctcaatgaagaactggagaaggaaaagaagaagtctgcagccctagagatcagcctccgcaacatggagcgctcccgggaggatgttgagaagaggaacaaggccttggaagaagaagtcaaggaatttgtcaaatccatgaaggaacccaagaccgaggcttaagggtcccaggagtactgcagggacagccccagagaggcccaactctggcccctttctcagtgctatctgatgacggggaaacaaaattattctctgagagggaaaggacatttgagggaaacatcaaatttccccataaataaatgaatggagtttgcaggaaggtgagggtgagcagagatgtgtgtggacatctctgaccatccatcgctgtattcaaatggattgttctattccattctggtctcaggcatgaccacgtccagtgaagacatttgaggcagcacatctcaggacccaggcaatagactggccccaactcaggctggactaaggtgtgattaattctttgttttttgtgtggaacagctcaccttgtcagacagcctcagggcatctctgagacacaggggcagaaaatgacattcatcttttgagtcctcatccatggagtgctgtgtttggggggctgcatctgctgaagcgagaaccccattctgccaccccaccaggatgcccattctccaggacttctccaacttactattagactaaaccagaacaagcaacaaactgtatttatgcaagcaaaattgatgagaaaattatattcaaataaagcaaaaattaaaaaaaaaaaaaaaaaaaaaaa

SEQ ID NO: 19 - DNA, 2451 bp, Homo sapiens
  SITE (2440): n equals a,t,g, or c
cagagccatagcaggctgctgtctcacagagcgagaaggtgtcaggagcagcccagttgtgtctctctctctacctctgtgaagggcgcgaatgggcagagcagaacttctagaagggaagatgagcacccaggatccctcagatctgtggagcagatccgatggagaggctgagctgctccaggacttggggtggtatcacggcaacctcacacgccatgctgctgaagctcttctcctctcaaatggatgtgacggcagctaccttctgagggacagcaatgagaccaccgggctgtactctctctctgtgagggccaaagattctgttaaacactttcatgttgaatatactggatattcatttaaatttggctttaatgaattctcatctttgaaggattttgtcaagcattttgcaaatcagcctttgattggaagcgagacaggcactctgatggttctaaaacatccctacccaagaaaagtggaagaaccctccatttatgaatctgtccgggttcacacagcaatgcagacaggaagaacagaagatgaccttgtgcccacagcaccttctctgggcaccaaagaaggttacctcaccaaacagggaggcctggtcaagacctggaaaacaagatggtttactctgcacaggaatgaactgaaatacttcaaagaccagatgtcaccagaaccaattcggatcctagacctaacagaatgttcagctgtacaattcgattattcacaagaaagggtaaactgtttttgtttggtatttccattcaggacattttatctctgtgcaaagaccggagtagaagctgatgagtggatcaagatattacgctggaaattgtcacaaataagaaaacagctcaaccaaggggaaggcacgatccgatctcggtcgttcatctttaaatagatctttcttgccaaggaatgctctggcccaggagcaaggtggaatgtttccctgacgctgtgatctgcagcaggcttcaaatgaaaaccgactaaggattttctttcaaaaacaaatcagaagcagatgctgattgggacccatataccacgttgctgactcacgttgctgcccttccatgatgttgccatctccttgagaacactgaagcaatcaccattctgatagaaagtgcttaaaccaccactcttaggtctgctcactcttagaacacacaatggaagaggaagggtttttgttttcactcattgtggtccccaagcctattgacactagttgcctagagtcccactgtgagtcatggtcagcctgtctgacatccaggttgtgctattaaccaagaaggaaacagatacttggaggcttagatgacttctgcaggatttatattcagatagaaaacatcaaatattttcaggggagaggtttttttttttaatttttccccctttatacaaaaaaaaaagaacatttccaaaactaaaatagaaaatgcttgtggcatttattttctctttttaaaaggttcagaaatttggcaggtcctttgcttctaatgacaaaactgtgagagctagatgtcctatgggcaattaggtagtataataaaggtaaatgaaggtacaatttttaaaccattattttcaccctgttggggtaaatgttttaaagagtgagaaaacataaattgagaaagggtgataaagtaatagataacttttagtttaataataattattgttattatactactaataatagagcacttgtaagcactaagttatctttatccaacatttctccaaatggactgaaagaaacttttcaaggacagtgtattataacaatccctttcccagaattagttgtatagggttggcccaagagatgtaagaaaaatctcgcattgctccctaagcaccctrggccttattaaagagcaacttctatttccagtcgggggagtaacactaaagctacaagaaatatgtaataatgataggtaataatgtgttccaaagctttttcaaactagaataaggaggcaaatagaagaatgagatactgatgtccacagttcattggcagaatctaaccccttctgttatcttttttaatactatttttgtttagatagaagtttcaaagaagataaaaatgcttgaagagcctgagagtaaaaagattatgctgcaaagctatgatataaactgctcttgcagtccaaagggatacctgattaaagaagtttcttatttaaacatctcagacgcaaaaattacattaaatttttgtatatttcaacaacattttaaatgtattttgttatgtttgtattatataggataaagcaaatgtcaagttaaaatgtattgtgttgtttgtaaagtaagaagttacaggcgtgagccacccgcacccggcagagttttataatgcaaaatnaactaatattc

SEQ ID NO: 20 - DNA, 2916 bp, Homo sapiens
gcggacgcgtgggcgactggaggggcgggggagtcacctgcgagcggctgcgctggcggccagcccgcccaccgcgtctggatcgcgccggctgcgcggggctgcggacagcacacaccctggaaggccccggcggggaacgggcagagtccgcgccctgcgtccgcgaccaggaggatcggaccttcgccttcgctgtcgccgccgccgccgcccgcggccgtcggggctattagtgaaagatggtggatcgcttggcaaacagtgaagcaaatactagacgtataagtatagtggaaaactgttttggagcagctggtcaacctttaactatacctggacgagttcttattggagaaggagtattgactaagttgtgcaggaaaaagcccaaagcaaggcagtttttcttgtttaatgatattcttgtatatggcaatattgtcatccagaagaaaaatataacaaacaacatattattcccctggaaaagtcactattgattccatcaaagatgagggagacttaaggaatggatggctaatcaagacaccaactaaatcttttgcagtttatgctgccactgctacggagaaatcagaatggatgaatcatataaataaatgtgttactgatttactctccaaaagtgggaagacacccagtaatgaacatgctgctgtctgggttcctgactctgaggcaactgtatgtatgcgttgtcagaaagcaaaattcacacctgttaatcgtcgccaccattgccgcaaatgtggttttgttgtctgtgggccctgctctgaaaagagatttcttcttcccagccagtcctctaagcctgtgcggatttgtgacttctgctatgacctgctttctgctggggacatggccacatgccagcctgctagatcagactcttacagccagtcattgaagtctcctttaaatgatatgtctgatgatgatgacgatgatgatagcagtgactaaggacacatttgggagtatttaatcaggtgtggctatctgagaaatcaactttgggggaaatgtaagattctgagctctctctctgttttgttctagccatgaatttgcctgagaaacttgtaacctatgtgcctcaatatattccatagaaagtaggtccccctgccttctcccactcctcacactcttctacagggataggcttttgcaaatatatcagataaattttttgtttcttgtttatttttaggttattttcttggaaggttgggaaaagatgtttgttttaacaggtcatgtactacgttgttgttttcatttctgttataagtaaaactaaaagcacagaatggtgggaaaggggctataatgtggttcattaataatgttagcagcttttttctaaccatcctgtctaatggttaagacaccagtaacaaaaacacatgatttggaaatactttggctttttcatatacctagtggtgccttatcataatagcactgttacatgaaataagcccctaccttcttactttctggtttgttgaaaaaatacactggtgctctttgaagtgataaaatgagtgtttatgaatgggtgtaattaggaaatacttctcatctgacagctacaaataactaagtttggaggtattttcactctatatgaataaatatttttccataaaatagttgtgattatatttttgttttatataggtcccaaattataattgtcaaatatatattttaaattaataaaagttgtcattcttaggaatttggtttgaaatttatcagttatacagaattgtcatactgcattagcttctacctttagtaagacatattttttaggtataaattcttatgctttaacattatttctggattgaaaatcttataaaacccttgaaaataaacagtctcttttttacaaagtctgtgttagagcacagatttacctaggcttgaagatttggaagaaataatatgtaagaatggcctcaaggcagaccactttaagtttggcttagacttcatatcgtggaagtattgtctatttcagtgtgaaactatcttgaatttgcaaatatagtgttatattttataaagttttgtaaaatcccaaacaatatttctatttttgtaaaacaattgtatgtataatctgtatttgaaatcattttgcaatctatggaaatagagtagcaattgctatttctaaattgtgaactttaagtcaatctagatttattttgagaagtaattgttcactctttacttttgaggcagccattaggttgaaagtatatatttatcatataaaacttgatgcgttttgcactactctttccatttatatgctgcaaacaactacagtctttgaaatatggaaaatcagcagtctaaagtttgttttaaattctaaatttaaaaaatcttcaaatctgaatataccgcaaatgtcatgagaagtttgattcagtaacttgtgatggaggattctttggtatcttactgtttggttaaggcactaattttacttacctattagattttgaaagtatctgagatatacaaatctccctgtaggaaatgtgaaagaaaagcacaacaaaactagggttttttgttcatttgcttgcttttatgattttttttggtttgttttaatatcaggtggatttttgtttctaagcaatatatacataaaatcaaccaacatatctgaaaaggatcatgaaacctgagaaatgctaatggagatttgctggtacataggaatctagcaaattcaggaaccaaggggaaatgttgtgagataacatttacattgtcaacctttattgactttgtttttacaataaaaaatattttacaacttaaaaaaaaaaaaaaaaaaaaaaaaaaaaaaaaaaa

SEQ ID NO: 21 - DNA, 946 bp, Homo sapiens
  SITE (889): n equals a,t,g, or c
ctcagtgcttcatccccacagtgctcactgagaacagctcaaagacaaagcagttgagtcttatttttactccagtgttctttttgcctgtaattgaatatccttttaagaattgattttgatgaaggctgccataatgaaaggaaagtgacctgcaaacatccagtcacaggacaaccatcacaggacaattgtatttttgtagtgaatgaacagactgttgcaaccatgacatctgaagaaaagaaggaacggccaataagtatgataaatgaagcttctaactataacgtgacttcagattatgcagtgcatccaatgagccctgtaggcagaacttcacgagcttcaaaaaaagttcataattttggaaagaggtcaaattcmattaaaaggaatcctaatgcaccggttgtcagacgaggttggctttataaacaggacagtactggcatgaaattgtggaagaaacgctggtttgtgctttctgacctttgcctcttttattatagagatgagaaagaagagggtatcctgggaagcatactgttacctagttttcagatagctttgcttacctctgaagatcacattaatcgcaaatatgcttttaaggcagcccatccaaacatgcggacctattatttctgcactgatacaggaaaggaaatggagttgtggatgaaagccatgttagatgctgccctagtacagacagaacctgtgaaaagagtggacaagattacatctgaaaatgcaccaacctaaagaaaccaataacattcccaaccatagggtgctaattaaaccagagatccaaaacaatcaaaaaaacaaggaaatgagcaaaattgaagaaaaaaaggcattagaagctgaaaaatatggntttcagaaggatggtcaagatagacccttaacaaaaattaatagtgtaaagctgaag

SEQ ID NO: 22 - DNA, 3267 bp, Homo sapiens
ggcacgaggagaaatcacagggagatgtacagcaatggggccatttaagagttctgtgttcatcttgattcttcaccttctagaaggggccctgagtaattcactcattcagctgaacaacaatggctatgaaggcattgtcgttgcaatcgaccccaatgtgccagaagatgaaacactcattcaacaaataaaggacatggtgacccaggcatctctgtatctgtttgaagctacaggaaagcgattttatttcaaaaatgttgccattttgattcctgaaacatggaagacaaaggctgactatgtgagaccaaaacttgagacctacaaaaatgctgatgttctggttgctgagtctactcctccaggtaatgatgaaccctacactgagcagatgggcaactgtggagagaagggtgaaaggatccacctcactcctgatttcattgcaggaaaaaagttagctgaatatggaccacaaggtagggcatttgtccatgagtgggctcatctacgatggggagtatttgacgagtacaataatgatgagaaattctacttatccaatggaagaatacaagcagtaagatgttcagcaggtattactggtacaaatgtagtaaagaagtgtcagggaggcagctgttacaccaaaagatgcacattcaataaagtaacaggactctatgaaaaaggatgtgagtttgttctccaatcccgccagacggagaaggcttctataatgtttgcacaacatgttgattctatagttgaattctgtacagaacaaaaccacaacaaagaagctccaaacaagcaaaatcaaaaatgcaatctccgaagcacatgggaagtgatccgtgattctgaggactttaagaaaaccactcctatgacaacacagccaccaaatcccaccttctcattgctgcagattggacaaagaattgtgtgtttagtccttgacaaatctggaagcatggcgactggtaaccgcctcaatcgactgaatcaagcaggccagcttttcctgctgcagacagttgagctggggtcctgggttgggatggtgacatttgacagtgctgcccatgtacaaagtgaactcatacagataaacagtggcagtgacagggacacactcgccaaaagattacctgcagcagcttcaggagggacgtccatctgcagcgggcttcgatcggcatttactgtgattaggaagaaatatccaactgatggatctgaaattgtgctgctgacggatggggaagacaacactataagtgggtgctttaacgaggtcaaacaaagtggtgccatcatccacacagtcgctttggggccctctgcagctcaagaactagaggagctgtccaaaatgacaggaggtttacagacatatgcttcagatcaagttcagaacaatggcctcattgatgcttttggggccctttcatcaggaaatggagctgtctctcagcgctccatccagcttgagagtaagggattaaccctccagaacagccagtggatgaatggcacagtgatcgtggacagcaccgtgggaaaggacactttgtttcttatcacctggacaacgcagcctccccaaatccttctctgggatcccagtggacagaagcaaggtggctttgtagtggacaaaaacaccaaaatggcctacctccaaatcccaggcattgctaaggttggcacttggaaatacagtctgcaagcaagctcacaaaccttgaccctgactgtcacgtcccgtgcgtccaatgctaccctgcctccaattacagtgacttccaaaacgaacaaggacaccagcaaattccccagccctctggtagtttatgcaaatattcgccaaggagcctccccaattctcagggccagtgtcacagccctgattgaatcagtgaatggaaaaacagttaccttggaactactggataatggagcaggtgctgatgctactaaggatgacggtgtctactcaaggtatttcacaacttatgacacgaatggtagatacagtgtaaaagtgcgggctctgggaggagttaacgcagccagacggagagtgataccccagcagagtggagcactgtacatacctggctggattgagaatgatgaaatacaatggaatccaccaagacctgaaattaataaggatgatgttcaacacaagcaagtgtgtttcagcagaacatcctcgggaggctcatttgtggcttctgatgtcccaaatgctcccatacctgatctcttcccacctggccaaatcaccgacctgaaggcggaaattcacgggggcagtctcattaatctgacttggacagctcctggggatgattatgaccatggaacagctcacaagtatatcattcgaataagtacaagtattcttgatctcagagacaagttcaatgaatctcttcaagtgaatactactgctctcatcccaaaggaagccaactctgaggaagtctttttgtttaaaccagaaaacattacttttgaaaatggcacagatcttttcattgctattcaggctgttgataaggtcgatctgaaatcagaaatatccaacattgcacgagtatctttgtttattcctccacagactccgccagagacacctagtcctgatgaaacgtctgctccttgtcctaatattcatatcaacagcaccattcctggcattcacattttaaaaattatgtggaagtggataggagaactgcagctgtcaatagcctagggctgaatttttgtcagataaataaaataaatcattcatccttttttttgattataaaattttctaaaatgtattttagacttcctgtagggggcgatatactaaatgtatatagtacatttatactaaatgtattcctgtagggggcgatatactaaatgtattttagacttcctgtagggggcgataaaataaaatgctaaacaactgggtatacatgcataaaaactatccattcaaacccaaaaatttaataatcattgagtcttttattaatgaatttgaatactagaaagaaacagggcttgcatcaataaatggaagtatgtttttatttgttttaaggagctttgccagttaaaaacaacatgcaattgcagaaatctaacagagttgctaaaagttggttgatttcttttggtgaagaaaagccaatctaaattatttaaatataaaagacatgacttggtttaaaaaaaaaaaaaaaa

SEQ ID NO: 23 - DNA, 911 bp, Homo sapiens
  SITE (874): n equals a,t,g, or c
  SITE (896): n equals a,t,g, or c
  SITE (909): n equals a,t,g, or c
  SITE (910): n equals a,t,g, or c
  SITE (911): n equals a,t,g, or c
acccacgcgtccggttggctgagctcctaaagtatactgcccaagaccacagtgactacaggtatgtggcagctgctttggctgtcatgagaaatgtgactcagcagatcaacgaacgcaagcgacgtttagagaatattgacaagattgctcagtggcaggcttctgtcctagactgggagggcgaggacatcctagacaggagctcggagctgatctacactggggagatggcctggatctaccagccctacgsccgcaaccagcagcgggtcttcttcctgtttgaccaccagatggtcctctgcaagaaggacctaatccggagagacatcctgtactacaaaggccgcattgacatggataaatatgaggtagttgacattgaggatggcagagatgatgacttcaatgtcagcatgaagaatgcctttaagcttcacaacaaggagactgaggagatacatctgttctttgccaagaagctggaggaaaaaatacgctggctcagggctttcagagaagagaggaaaatggtacaggaagatgaaaaaattggctttgaaatttctgaaaaccagaagaggcaggctgcaatgactgtgagaaaagtccctaagcaaaaaggtgtcaactctgcccgctcagttcctccttcctacccaccaccgcaggacccgttaaaccacggccagtacctggtccccgacggcatcgctcagtcgcaggtctttgagttcaccgaacccaagcgcagccagtcaccattctggcaaaacttcagcaggttaacccccttcaaaaaatgatacctacagggaggcagataattttaaaataaagtaaataaaattawaaaaaaaaaaaagggggnccgtttttaaagggttccaagnttacgttccccgnnn

SEQ ID NO: 24 - DNA, 567 bp, Homo sapiens
  SITE (236): n equals a,t,g, or c
  SITE (238): n equals a,t,g, or c
  SITE (542): n equals a,t,g, or c
  SITE (556): n equals a,t,g, or c
actcctgagctcaggcaatctgtccacctcgacctcccaaactgctaggattacaagcktgagacccagcctcatacttatttttaatatttaaaatgattttgcttttcttgtttcttagtgcatgtaaagaagtatctttgcctgctgtataactgtgtgtatctcattttcctcacagtacttattgattccatttacaaagtgactgagggccggcagtctgaaatattccncnttacaagctgaggggaacttcgaccccagctgctgcttcaccatctaccatggcaaccacatggagtccctggacctcatcacctccaaccccgaggaggcccgcacctggatcacaggcctcaagtacctgatggctggcatcagtgatgaagactcccttgccaaaaggcagaggacccatgaccaatgggtgaagcagacctttgaggaagctgataagaatggtgacggcttgctgaatattgaagagatacatcagctgatgcataaactgaatgttaatctgccccgaagaaaagtcngacaaatgtttcangaagccgacac

SEQ ID NO: 25 - DNA, 1332 bp, Homo sapiens
aggagctcaccctggagatcctggatcgccggaacgtgggcatcagggagaaggactattggacctgctttgaggtcaacgagagggaggaggcagagcgccccctgcactttgcggagaaggtgctgcccatcctgcacgggctgggcacggacagccacctggtggtgaagaagcaccaggccatggaggccatgctgctgtacctggccagccgtgtcggtgacaccaagcatggcatgatgaagttccgtgaggaccgcagcctcctgggcctgggcctgccctcaggtggcttccacgatcgctacttcatcctcaacagcagctgcttgcggctctacaaggaggtccggagtcaccggcctgagaaggagtggcctattaagagtctcaaagtctacctgggagtgaagaagaaactcaggccacccacctgctggggcttcacagtggtgcatgagacagagaaacatgagaagcagcagtggtacctctgctgtgacacacagatggagctccgggagtggttcgctacctttctgtttgtgcagcatgacggcctggtgtggccctcagagccctcacgcgtgtcccgggcagtgcctgaggtccggctgggtagtgtgtcactgatcccccttcgaggtagtgaaaatgaaatgcgccggagtgtggctgccttcaccgcggaccctctgtctcttctgcgcaacgtctgagcacaggagcccatccttggctctaggattccgccgctggaagccttctgttcagacaccccttatgctccaaggcctgatgtgagccagcggggggtgcatgggaaactgcaccccacaacccacatcctccatcctgactgcagcatggggttccccggcaggggtgggaggcagcaggggtcagcctgggcaggaacctctcccaactctgtccaggtgttcagacctcttggcccaacctgctcaccccaccgggttcactgtccttgtggggctggagagatgggcataagtcaggaacttgggaggaccaccaccctttcagaggcgtgaggccctggggccctgccggaagggagccccctgctcctcccaacaaactccagaacagcagaaagcgggtgctgtagaggagcactcagctcacggggagggagctcttggctgagcttctacagggctgagagctgcgctttggggacttcagccttccttccagtctgggctgagtggggggtccagactacctgatgccccttccccaatttggggactttttgataatataaatatatctgtatattttaaaaaaaaaaaaaaaaaaaaa

SEQ ID NO: 26 - DNA, 402 bp, Homo sapiens
  SITE (94): n equals a,t,g, or c
tctaatccgcccaaaagcagcagcctgagcctggccagcagcgcctccaccatctcctcgctcagcagcctkagccccaagaagcccacccggnaggtaaacaagatccacgcctttgggaagagaggcaatgcgctcaggagggatcccaaccttcccgtgcacatccgaggctggcttcataagcaggacagctcggggctccgtctctggaaacgccgctggttcgtcctctccggccattgcctcttttattacaaggacagccgcgagagagtgtcctaggcagcgtcctgctccccagctacaatattagaccagatgggccgggagcccccgagggagtccgcttcaccttcaccgcagagcacccgggcatgaggacctacgttttggccgctg

SEQ ID NO: 27 - DNA, 2801 bp, Homo sapiens
  SITE (543): n equals a,t,g, or c
  SITE (1063): n equals a,t,g, or c
gggtcggcgacctgggcaagctgctgatgcagggctcgttcagcgtctggaccgaccacaagaggggccacaccaaggtgaaggagctggccaggttcaagcccatgcagcggcacctgttcctgcacgagaaggcagtgctcttctgcaagaagagggaggagaatggggaggggtatgagaaagctccctcctacagctacaagcagtccttaaacatggctgccgttggcattacggagaacgtgaagggagatgctaagaagttcgagatctggtacaacgcgcgcgaggaggtctacatcgtccaggcgccaactcctgagattaaagccgcgtgggtgaatgaaattcggaaagtgctgaccagccagctgcaggcttgtagagaagccagccagcaccgggcgctggagcagtcacagagcctgcccctgccggccccgaccagcaccagtccctcaagaggaaactcaaggaacatcaagaagctggaagaaaggaaaacagaccccctaagcctggagggatacgtcagctcancgccctgacaaagccccccgaaaagggcaaaggttggagcaaaacgtcccactcactggaggcacctgaggacgacgggggctggtcaagtgcagaggagcagattaactcgtccgacgcagaggaggacggcgggttgggccccaagaagctggttccaggtaaatacacggtcgtggcggaccacgagaagggaggccccgatgcgctgcgcgtgaggagcggggacgtggtggagctggtgcaggagggcgacgagggcctctggtaagaccccgcgctcagccccggactgccccgcacgtggctgccgctgaccctcgccccttgcaggtacgtcagggacccgaccactggcaaggagggctgggtgccggccagcagcctgtccgtccggctcggcccgtccggctcggcccagtgcytgagcagctcagagtcgagcccggggtcggccgtgctgagcaactcgtccagctgcagcgagggcggccaggcccccttctccgacctgcagggntagcgcggcctcggcgccggagacccgcgcgctgtctggggctgcsgtggcgtggggagggcgcggcccccggacgccccgaggaaggggcacctcaccgccccgacccagagcgcctggccgtgcgggctgcagaggacccctccggggcagaggcaggttccacggaaaaccccggcccgctggggcttccccggagactccagagcccacagaggaggggccgcagggaacagccccgggcggcaggcgccgggcagcggcatctcgtcctggctccaccgtgctgcttctgcctccggacggtgctttcaggggacgcgcggaccgtggtggagctgcttccggagaagtggaggatcctctggccaacggctgaggagagcggggcacggggtctctttagcttttacaagttttaggattttttcaagcagggatcaatcccgtggccattttttgtggtactttggcctcaattcttcaccaggaatcactgtgtttacatgaaatgacaatttgatactgtatttgatagaaaactatttttttgttaccggggtttacatagaagcacgttgtttataccactaagtgactttggcggggctctcccatggaaacggatggcactccctgaagctccctggtcacaggtggatgaaaacgtgtccgtgggtgacatcaggtggtgtctccaccaccaaaagcagttagaagccaaggagattcctttatctacctagggttcattttcaaaagaaaatttaaactataatttaaacaattaacgttcttttctacaaaaaaaatgcagggacttgatttttttaaagagcttcactgaattaggatatttttattgcttttaaagaaaatacaaagatgcagtttctgcagggtgtggcgtggaccagtgctgccgaccatagctcagagagccctgcccctgcctcactgcactgcagcctcctcggaggccgcacctccactccactccccacgcgccccctgcctcccacccaggtccacctgccacctggtgaccaccttgagtacagaagtgaaagtggggagagtattttattcaagtcacagcagaactggaaaaaaactcttctgttttaccaacttcttgtgtttcagaaacatattctgttcaaaacttttgaagccctttcggtgtctagtctgcagatgtttttgtatgtgtgcacctctgaccatgtgtgtacatatgtgtcttgctggaaaggacatattcgctgtccccgtgctgctgggagggccgcctcacagcctcacggttcccagccccagcacagtggaggcaggcgtggctgcattcccctcacgctaccctcccagcggcttgtagccgtcactggccagacctccagggtgcggaatcaaataggaagcatgcagagactcggcagcttttcctctgatgtgtaagttatttggaacgcgtgctgtgtcccgcgatgtccctgatgtactgtgcaggcgcggtgcctccgtctcgtcgcacagctgcgcgcccttgtgtgaccctccccataaaggcactttacagcttcatgtttcatccactgtcacttttttttaactgctgatgtaaatggaattttaaaagcagagttctttattgtatggatgacgtttgaataaatatcagcaactcctgcaaaaaaaaaaaaaaaaaaaaaaaaaaaaaaaaaaaaaaaaaaaaaaa

SEQ ID NO: 28 - DNA, 1871 bp, Homo sapiens
ggcacgaggagccacagtgaccgccatgggttagggaggtgtgatgtcaggctgttggggtttagaagtgaagccaaggggcctggacaggggaataatgagggaagagaggagactctcctgaccctccctcttgctcccaggcacgacccctgacccgctacctgccaatccggaaggaggactttgacctgaagacacatattgagtcatcgggccatggtgttgatacctgcctgcacgtggtgctcagcagcaaggtacaaggcgtgtgtggccctggggtgctggggagagggagaatcccgtggtgagaggcacctcctgggtcgttggaatagtggcgtcagtctctaccctcacctaaccagatctctgtcccaggacctggtgtgctggcctgaggagatgttggggacaatcccccatgaatacaggcacaggcgatggcacacacttaaggcttaagggctgcatatttgggtccttccttactcctgcttcctaccaggtctgccgtggctacttggtcaagatgggcggcaagattaaatcatggaagaagcgctggtttgtcttcgaccggctcaagcgcaccctttcctattatgtgggtgagttcccacaaggccaccctgggggccagccaggatccctgggctctgttacccaggacggctggtcttctagaaggaggccaagcttccaagtaggggaccagagtcttgggctaggctttgccctccttccctgaaaatgtacacaatgtacctggttcacctccatttttgtgttcattcattcattccttcattcagcaatgttactaagcatctagtaagttctaggcactgttctaggctctggtgatgagtaagatggccacagcgctctcatggagcttataatcggggaagcagacaagagtgataaccacgcacaatgggtatgctgataggagacatccaggcactgcaggagcatggggtcttatggtcagagttgggctgggaactcccccttggacaaattccatcagagattccaagacaagcagttgaacagtgccaaagagtgctcaggatagcccaggaacaggccgactagaccctcttgctctctcagctctctccgttccagcatctagcctagtttcccatccctggaactcccttgtacttttcccacttggagcgtgggatgctgtgttataccctagtcaggaggaggtaaggtatgctgcagtaacaagaagtcataaaatcccagtggctggacaggtgcagtggctcacacctgtgatcccaaaactttgggaggccaaggtgggcagatagcttgaggctaagagattgagaccagcctgggcaacatggtgaaactttgtctctactaaaaatacaaaaattagctgggcgtggtggcatgcacctgtagtcccagctactcgggaggctgagcacgagaattgcttgaacccaagagacagaggttgcagtgagccgagactgcgccactgcactccagcctggacaacagcatgagactctgtctcaaaaaaataaattaaaaggccgggcatggtgtctcatgcctgtaatcccagcacttttgagaggccgaagcgggcagatcacgaggtcaagagattgagaccatcctggccaacgtggtgaaaccccgtctctactaaaaatacgaaaattagctgggcatggtggcacgcgcctgtagtcccagctactcgggaggctgaggcaggagaattgcttaaacccaggaggcagaggttactgtgagctgagatcgtgccactgcactctagcctggcgatagagcaagacgccgtctcaaaaaaaaaaaaaaaaaaa

SEQ ID NO: 29 - DNA, 913 bp, Homo sapiens
  SITE (61): n equals a,t,g, or c
  SITE (758): n equals a,t,g, or c
  SITE (824): n equals a,t,g, or c
  SITE (850): n equals a,t,g, or c
  SITE (858): n equals a,t,g, or c
  SITE (869): n equals a,t,g, or c
  SITE (891): n equals a,t,g, or c
tcctcacgctcccttatggaacaaggcatccaagaggatgagcagctgctctacgacttanaatattattctttcttcgacttgaatcctaaatatgatgctgtccgaataaaccaactctatgagcaagccaggtgggccattctcttagaagaaattgattgcacagaggaagaaatgttgatctttgcagctctacagtaccacattagcaaactgtcgttgtctgctgaaacacaggattttgcaggcgagtccgaggttgatgaaatagaagcggcgctttctaatttggaagtaaccctagaaggtggaaaagcggacagccttttggaggacattactgatatccctaaacttgcagataatctcaaattatttaggcccaagaagttactaccaaaagctttcaaacaatattggtttatctttaaagacacatccatagcatactttaaaaataaggaacttgaacaaggagaaccactagaaaaactaaatcttagaggctgcgaagttgtgcccgatgtaaatgtagcaggaagaaaatttggaatcaagttactaatccctgttgccgatggtatgaatgaaatgtatttgagatgtgaccatgagaatcaatacscccaatggatggctgcctgcatgttggcatcgaagggcaaaaccatggcagacagctcctaccagccagaggtcctcaacatcctttcatttctgaggatgaaaaacaggaactctgcatctcaagtggnttccagtctcgaaaacatggatatgaacccagaatggtttgggtcaccacggtgtgcaaaaagacnccaaattccaaacagcttgggcccgncccggatncctgggaaggnggcaacccagaaaccggtgggncccaaaaattgccccccttggg

SEQ ID NO: 30 - DNA, 2291 bp, Homo sapiens
gggctgcaggaattcggcacgaggtgacagcatccccaaatccctgagcgactcgttatcccccagcctcagcagtgggaccctcagcacctccaccagtatctcctctcagatctcaaccactacctttgaaagcgccatcacacctagcgagagcagtggctatgattcaggagacatcgaaagcctggtggaccgagagaaagagctggctaccaagtgcctgcaacttctcacccacactttcaacagagaattcagccaggtgcacggcagcgtcagtgactgtaagttgtctgatatctctccaattggacgggatccctctgagtccagtttcagcagtgccaccctcactccctcctccacctgtccctctctggtagactctaggagcaactctctggatcagaagaccccagaagccaattcccgggcctctagtccctgcccagaatttgaacagtttcagattgtcccagctgtggaaacaccatatttggcccgagcaggaaaaaacgaatttctcaatcttgttccagatattgaagaaattagaccaagctcagtggtctctaagaaaggataccttcatttcaaggagcctctttacagtaactgggctaaacattttgttgtcgtccgtcggccttatgtcttcatctataacagtgacaaagaccctgtggagcgtggaatcattaacctgtccacagcacaggtggagtacagtgaggaccagcaggccatggtgaagacaccaaacacatttgctgtctgcacaaagcaccgtggggtccttttgcaggccctcaatgacaaagacatgaacgactggttgtatgccttcaacccacttctagctggcacaatacggtcaaagctttcccgcagatgcccgagccagtcgaaatactaagtgactctgccgagtgccctcactcgccttcgagagataaagaaagcgttacctctcatttctctttgtgattcttgacggtgactcttgtatgtaatcctgtggcttaactacttctccctccttgtccagcacttttctagctctcccgttccccatctccattgctctgtactcttttcttttttcttgtgctgagaatctcgttagtagcatgtggcctaacaaaaggaaaaaatgtttttaaacacacacacacacacacacacacacacacacacacatacacagacaaaaacacaaaaactctgaggggatctggggaatctccaaattattgtgggtgtactttggcttccttttgtatgataggtccccatcatgaccacctctgatgtctgtgctgctgtcaccaggcacctttgtttttcaagacaacatactttttttttcttttctctgtttgtgatatcactttaatttttcttgggtggcttagagactaagggaggagacatctggcctttttagaacctgagaggaaaaaaagagtctttttttcccctctgtctctttttgccatggctaatccctgcatttccattcagggaaaaggtggtagtgagcatagaactgcaacagttatattctgagtcaaagttggggctttttacggcataattatggaatttttatttactggtagagaggagacgagaggctttttcagtgggcctgggacagtggctgctcttgactttgtgtgaagggaaatgccaaggatgcttctggtggacttcaggggaccccagggtttggccgtgggccgtgatggcagcaggcggtgggatgcttgtagctcctcacagcaggattcctgcccactgttttttctctgttgggagggaagctcttttctaggagtgtctcagttctgcttttggcattagtgatggtggtggtacagttggaattagtgccatgtcatacacaaatgttccacaaggcgggagtgtttcactttctggtgataaacttgatggtcattgttatgattaagataatgccgggcaggccgggcacagtggctcacgcctgtaatccaagcacttggggaggccgaggcgggcagatcacgagatcaggagttcaagaccagcctggccaatatgatgaaaccccgtctctactaaaaatacaaaattagtcgggtatggtgaaaaaaaactgtaattccagctgcttgggagcctgaggcaggagaactgcttgaacccaggaggcagaggttgcagtgagccaagatcgcgctattgcactccagcctgggtgacagagcaagactctgcctcagaaaaaaaaaaaaaaaaaa

SEQ ID NO: 31 - DNA, 984 bp, Homo sapiens
  SITE (915): n equals a,t,g, or c
  SITE (919): n equals a,t,g, or c
  SITE (920): n equals a,t,g, or c
  SITE (955): n equals a,t,g, or c
  SITE (979): n equals a,t,g, or c
gcccacgcgtccgcccacgcgtccgcccacgcgtccggcaggcgaggaatcgccgtggcgtcttggtgttctccacgctggttcgcaggtgaagagatggcgtttgtgaagagtggctggttgctgcgacagagtactattttgaagcgctggaagaagaactggtttgatctgtggtcggatggtcacctgatctattatgatgaccagactcggcagaatatcgaggataaggtccacatgccaatggactgcatcaacatccgcacggggcaggaatgtcgggatactcagcccccggatggaaagtcaaaagactgcatgctccagattgtttgtcgagatgggaaaacaattagtctttgtgcagaaagcacagatgattgcttggcctggaaatttacactccaagattctaggacaaacacagcgtatgtgggctctkcagtcatgrccgatgagacatccgtggtttcctcacctccaccatacacggcctatgctgcaccggcccctgaggtagggagaaccctgagcctccagcaggcttatggctatgggccatacggtggtgcgtacccgccaggaactcaagttgtctacgctgcgaatgggcaggcgtatgccgtgccctaccagtacccatatgcaggactttatggacagcagcctgctaaccaagtcatcattcgagagcgctatcgagacaacgacagcgacctggcactgggcatgctggcaggagcagccacgggcatggccttagggtctctattttgggtcttctaggggcctcaaggtcttgatgtgcatagcttctgataaccctgtgtgcaataatatgatttgcagggcatttctgtttgtgacaaaagtttttaataatagktttaatcattcctttgaaagtagtgntggnntaatttggactaatccacataaggaccaccagaanaaagggtttgaactgggctatttngtcaa

SEQ ID NO: 32 - DNA, 406 bp, Homo sapiens
  SITE (341): n equals a,t,g, or c
  SITE (348): n equals a,t,g, or c
  SITE (357): n equals a,t,g, or c
  SITE (364): n equals a,t,g, or c
  SITE (379): n equals a,t,g, or c
ggcacgagatgacctcttcagtgatgtcctagaggaaggtgaactagatatggagaagagccaagaggagatggatcaagcattagcagaaagcagcgaagaacaggaagatgcactgaatatctcctcaatgtctttacttgcaccattggcacaaacagttggtgtggtaagtccagagagtttagtgtccacacctagactggaattgaaagacaccagcagaagtgatgaaagtccaaaaccaggaaaattccaaagaactcgtgtccctcgagctgaatctggtgatagccttggttctgaagatcgtgatcttctttacagcattgatgcatatngatctcnaagattccnagaaacngaacgtccatccatnaaacaggtgattgttccgaaagaaaat

SEQ ID NO: 33 - DNA, 1954 bp, Homo sapiens
ccacgcgtccggccgcggcggcgcgggtgctccgggccgaggccgcgtctggctcttgctgattgaattcctttggtgcagtttagcatgttcctctgtgttctgcatctcctgtagtgtaatgttcaagctcagaaatgccttatgtggatcgtcagaatcgcatttgtggttttctagacattgaagaaaatgaaaacagtgggaaatttcttcgaaggtacttcatactggataccagagaagatagtttcgtgtggtacatggataatccacagaacctaccttctggatcatcacgtgttggagccattaagcttacctacatttcaaaggttagcgatgctactaagctaaggccaaaggcggagttctgttttgttatgaatgcaggaatgaggaagtacttcctacaagccaatgatcagcaggacctagtggaatgggtaaatgtgttaaacaaagctataaaaattacagtaccaaagcagtcagactcacagcctaattctgataacctaagtcgccatggtgaatgtgggaaaaagcaagtgtcttacagaactgatattgttggtggcgtacccatcattactcccactcagaaagaagaagtaaatgaatgtggtgaaagtattgacagaaataatctgaaacggtcacaaagccatcttccttactttactcctaaaccacctcaagatagtgcggttatcaaagctggatattgtgtaaaacaaggagcagtgatgaaaaactggaagagaagatattttcaattggatgaaaacacaataggctacttcaaatctgaactggaaaaggaacctcttcgcgtaataccacttaaagaggttcataaagtccaggaatgtaagcaaagcgacataatgatgagggacaacctctttgaaattgtaacaacgtctcgaactttctatgtgcaggctgatagccctgaagagatgcacagttggattaaagcagtctctggcgccattgtagcacagcggggtcccggcagatctgcgtcttctgagcatccccccggtccttcagaatccaaacacgctttccgtcctaccaacgcagccgccgccacctcacattccacagcctctcgcagcaactctttggtctcaacctttaccatggagaagcgaggattttacgagtctcttgccaaggtcaagccagggaacttcaaggtccagactgtctctccaagagaaccagcttccaaagtgactgaacaagctctgttaagacctcaaagtaaaaatggccctcaggaaaaagattgtgacctagtagacttggacgatgcgagccttccggtcagtgacgtgtgaggcagaagcgcacggagcctgcctgcctctgccgtcctcagtttcctttcatgaggcttctagccaaagatgataaagggggaaatggtttttagtgcgtatattatactgcctcttaggtgtactctttataagctggtaaaccaagaatctagggagtggccaaactaaatataatttctttaaaaaagaaagaaaaaggaaaaatccaaaatatctcagtatcatctgtctgaagcattgtgtgttctcattcgggtggtaacaatgtatgtgtaatatttttttcttagtgattttgacagtttaaatgtttaacaacttaaagcattaaaaatgcttattaataactttggtcatttaaaaaatgctacaatgacttcctattaaaggttcaatatttacacattcttattggttgatattaccacatgaaatattgccagaccaagatacctaaactcatgatgtctgtggtgctgtaaaatttatactaaaatgtggactattttgaaattataaccatttttgatgccctgaaaaaaaaaaaaaaaaaaaaaaaaaaaaaaaaaaaaaaaaaaaaaaaaaaaaaaaaaaaaaaa

SEQ ID NO: 34 - DNA, 4524 bp, Homo sapiens
  SITE (4519): n equals a,t,g, or c
  SITE (4520): n equals a,t,g, or c
gcggacgcgtgggcggacgcgtgggtgaacgacacggtggtgcccaccagccccagtgcggacagcacggtgctgctcgccccatcagtgcaggactccgggagcctacacaactcctccagcggcgagtccacctactgcatgccccagaacgctggggacttgccctccccagacggcgactacgactacgaccaggatgactatgaggacggtgccatcacttccggcagcagcgtgaccttctccaactcctacggcagccagtggtcccccgactaccgctgctctgtggggacctacaacagctcgggtgcctaccggttcagctctgagggggcgcagtcctcgtttgaagatagtgaagaggactttgattccaggtttgatacagatgatgagctttcataccggcgtgactctgtgtacagctgtgtcactctgccgtatttccacagctttctgtacatgaaaggtggcctgatgaactcttggaaacgccgctggtgcgtcctcaaggatgaaaccttcttgtggttccgctccaagcaggaggccctcaagcaaggctggctccacaaaaaaggggggggctcctccacgctgtccaggagaaattggaagaagcgctggtttgtcctccgccagtccaagctgatgtactttgaaaacgacagcgaggagaagctcaagggcaccgtagaagtgcgaacggcaaaagagatcatagataacaccaccaaggagaatgggatcgacatcattatggccgataggactttccacctgattgcagagtccccagaagatgccagccagtggttcagcgtgctgagtcaggtccacgcgtccacggaccaggagatccaggagatgcatgatgagcaggcaaacccacagaatgctgtgggcaccttggatgtggggctgattgattctgtgtgtgcctctgacagccctgatagacccaactcgtttgtgatcatcacggccaaccgggtgctgcactgcaacgccgacacgccggaggagatgcaccactggataaccctgctgcagaggtccaaaggggacaccagagtggagggccaggaattcatcgtgagaggatggttgcacaaagaggtgaagaacagtccaaagatgtcttcactgaaactgaagaaacggtggtttgtactcacccacaattccctggattactacaagagttcagagaagaacgcgctcaaactggggaccctggtcctcaacagcctctgctctgtcgtccccccagatgagaagatattcaaagagacaggctactggaacgtcaccgtgtacgggcgcaagcactgttaccggctctacaccaagctgctcaacgaggccacccggtggtccagtgccattcaaaacgtgactgacaccaaggccccgatcgacacccccacccagcagctgattcaagatatcaaggagaactgcctgaactcggatgtggtggaacagatttacaagcggaacccgatccttcgatacacccatcaccccttgcactccccgctcctgccccttccgtatggggacataaatctcaacttgctcaaagacaaaggctataccacccttcaggatgaggccatcaagatattcaattccctgcagcaactggagtccatgtctgacccaattccaataatccagggcatcctacagacagggcatgacctgcgacctctgcgggacgagctgtactgccagcttatcaaacagaccaacaaagtgccccaccccggcagtgtgggcaacctgtacagctggcagatcctgacatgcctgagctgcaccttcctgccgagtcgagggattctcaagtatctcaagttccatctgaaaaggatacgggaacagtttccaggaascgagatggaaaaatacgctctcttcacttacgaatctcttaagaaaaccaaatgccgagagtttgtgccttcccgagatgaaatagaagctctgatccacaggcaggaaatgacatccacggtctattgccatggcggcggctcctgcaagatcaccatcaactcccacaccaccgctggggaggtggtggagaagctgatccgaggcctggccatggaggacagcaggaacatgtttgctttgtttgaatacaacggccacgtcgacaaagccattgaaagtcgaaccgtcgtagctgatgtcttagccaagtttgaaaagctggctgccacatccgaggttggggacctgccatggaaattctacttcaaactttactgcttcctggacacagacaacgtgccaaaagacagtgtggagtttgcatttatgtttgaacaggcccacgaagcggttatccatggccaccatccagccccggaagaaaacctccaggttcttgctgccctgcgactccagtatctgcagggggattatactctgcacgctgccatcccacctctcgaagaggtttattccctgcagagactcaaggcccgcatcagccagtcaaccaaaaccttcaccccttgtgaacggctggagaagaggcggacgagcttcctagaggggaccctgaggcggagcttccggacaggatccgtggtccggcagaaggtcgaggaggagcagatgctggacatgtggattaaggaagaagtctcctctgctcgagccagtatcattgacaagtggaggaaatttcagggaatgaaccaggaacaggccatggccaagtacatggccttgatcaaggagtggcctggctatggctcgacgctgtttgatgtggagtgcaaggaaggtggcttccctcaggaactctggttgggtgtcagcgcggacgccgtctccgtctacaagcgtggagagggaagaccactggaagtcttccagtatgaacacatcctctcttttggggcacccctggcgaatacgtataagatcgtggtcgatgagagggagctgctctttgaaaccagtgaggtggtggatgtggccaagctcatgaaagcctacatcagcatgatcgtgaagaagcgctacagcacgacacgctccgccagcagccagggcagctccaggtgaaggcgggacagagcccacctgtctttgctacctgaacgcaccaccctctggcctaggctggctccagtgtgccatgcccagccaaaacaaacacagagctgcccaggctttctggaagcttctggtctgagggaggtgtctccgaggatccttttgcctgccgccttcattgatcctgtattaagctgtcaactttaacagtctgcacagtttccaaagctttactactcttagaggacacatgccttaaaaaaggaggggaggaaccacgctgccaccaaagcagccggaagtgccttaacttgtggaaccaacactaatcgaccgtaactgtgctactgaagggaactgcctttcccccttctgggggagacttaacagagcgtggaaggggggcattctctgtcaatgatgcactaacctcccaacctgatttccccgaatctgagggaaggtgagggagtgggaagggggatggagagctcgaggggacagtgtgtttgagctggagtgctgcgggcagcctttctcatggaatgacatgaatcaacttttttctttgtttcatcttttaagtgtacgtgcttgcctgttcgtgcatgtgttcataaactcaacactttaatcatggtttcatgagcattaaaaagcaaagggaaaaaggatgtgtaatggtgtacacagtctgtatattttaataatgcagagctatagtctcaattgttactttataaggtggttttattaacaaacccaaatcctggattttcctgtctttgctgtattttgaaaaacacgtgttgactccattgttttacatgtagcaaagtctgccatctgtgtctgctgtattataaacagataagcagcctacaagataactgtatttataaaccactcttcaacagctggctccagtgctggttttagaacaagaatgaagtcattttggagtctttcatgtctaaaagatttaagttaaaaacaaagtgttacttggaaggttagcttctatcattctggatagattacagatataataaccatgttgactatgggggagagacgctgcattccagaaacgtcttaacacttgagtgaatcttcaaaggaccctgacattaaatgctgaggctttaatacacacatattttatcccaagtttataatggtggtctgaacaaggcacctgtaaataaatcagcatttatgaccagaagaaaaataatctggtcttggactttttatttttatatggaaaagttttaaggacttgggccaactaagtctacccacacgaaaaaagaaatttgccttgtccctttgtgtacaaccatgcaaaactgtttgttggctcacagaagttctgacaataaaagatactagctaaaaaaaaaaaaaaaaaaggggggggggcccgccnntaag

SEQ ID NO: 35 - DNA, 811 bp, Homo sapiens
ccacgcgtccgaccacctttttttctttgcgttttcttactgctggtcctgggagccttttccttcggagcagcagccctgtccggcatctgtcttgagctcccagcaaggaaagtccatcagcttgataatggaggagaacaatgactccacggagaacccccaacaaggccaagggcggcagaatgccatcaagtgtgggtggctgaggaagcaaggaggctttgtcaagacttggcatactcgctggtttgtgctcaagggggatcagctctattatttcaaagatgaagatgaaaccaagcccttgggtactatttttctgcctggaaataaagtttctgagcatccctgcaatgaagagaacccagggaagttcctttttgaagtagttccaggtaagatattttcctagtctgattaaattattgtcatcctgtgttggtaaaggtgaagatgggtcagacaggtttcattcttttttgaatcatgactgagaaccttaatttgaggcttggttagtgttgacgcagataatgactgcaggtttatatactagtacaaatgaatgcactcacacacacatactctgaccacataactactagattttcatttgtccatgagactycatagttgaccacagkcatgatacagtatttgktcaggactattggagatgaawttgattttacagcgctcttgkgatgkgaaawttgacaaggggttataggttgaawgctttgcccagkggaatcactgrcmtatttcctcacaaaattgtatcttcaaggaggttttgcaaaaaaca

SEQ ID NO: 36 - DNA, 819 bp, Homo sapiens
ccacgcgtccgaccacctttttttctttgcgttttcttactgctggtcctgggagccttttccttcggagcagcagccctgtccggcatctgtcttgagctcccagcaaggaaagtccatcagcttgataatggaggagaacaatgactccacggagaacccccaacaaggccaagggcggcagaatgccatcaagtgtgggtggctgaggaagcaaggaggctttgtcaagacttggcatactcgctggtttgtgctcaagggggatcagctctattatttcaaagatgaagatgaaaccaagcccttgggtactatttttctgcctggaaataaagtttctgagcatccctgcaatgaagagaacccagggaagttcctttttgaagtagttccaggtaagatattttcctagtctgattaaattattgtcatcctgtgttggtaaaggtgaagatgggtcagacaggtttcattcttttttgaatcatgactgagaaccttaatttgaggcttggttagtgttgacgcagataatgactgcaggtttatatactagtacaaatgaatgcactcacacacacatactctgaccacataactactagattttcatttgtccatgagactccatagttgaccacaagtcatgatacagtatttgttcaggactattggagatgaatttgattttacagcgctcttgtgatgtgaaatttgacaaggggttataggttgaatgctttgcccagtggaatcactgacatatttcctcacaaaattgtatcttcaaggaggttttgcaaaaaaaaaaaaaaa

SEQ ID NO: 37 - DNA, 810 bp, Homo sapiens
gcacgagcccgggtcccacaccatccttcgaaggtctcagagttacatccccacgtcaggctgccgtgcttccactgggcctcccctcattaagagtggttactgcgtgaagcaagggaatgtgcggaagagctggaaacgtcgcttctttgcacttgatgactttaccatctgctacttcaagtgtgagcaggaccgagaaccactgcgcaccatatttcttaaggatgttctgaagacccatgaatgtctggtcaagtctggtgatctcttaatgagggacaacctgtttgaaataataacaagctccaggaccttctacgtacaggcagacagtccagaagacatgcacagctggattaaggagattggcgcagctgtccaggccctcaagtgccaccccagagaaacgtcctttttctagatccatttctttgacccgacctggaagctccagcctttcaagtgggcccaactctatcctgtgcagggggcggccacctttggaggaaaagaaagccctctgcaaagccccctctgtggcctcctcctggcagccctggacacctgtcccccaggctggggagaagctgcttccacctggagacacttcagaggactccttgtcacgcctcgtcctggggagggcagcgctcctggggtgctgcccagctcccggataaggcacagatcggagccccagctgacatggaaatacagttgttggcctccggcctcccctcaaaaaaaaaaaaaaaaaaaaaaaaaaaaaaaaaaaaaaaaaaaaaaaaaaaaaaaaaaaaaaaaaaa

SEQ ID NO: 38 - DNA, 2445 bp, Homo sapiens
ccgaagatgggcgccgtgccctgccgccgggctcttctgctttgcaacgggatgaggtacaaactgctgcaggagggcgacattcaggtctgtgtcatccggcacccgcggacctttctcagcaagatcctcacctcgaaattcctgaggcgctgggagccgcaccacctaacgctggccgacaacagcctggcgtccgccacgccaactgggtacatggaaaactcagtctcctacagcgcaattgaagacgttcagctgctgtcctgggagaatgccccgaagtactgtttacagctcacgattcctgggggaactgtcttactgcaggctgccaatagctacctgcgagaccagtggttccattctctgcaatggaagaaaaagatttacaaatataagaaagtgctgagtaacccaagccgctgggaagttgtcttgaaagagatccggaccctggtggacatggccctgacatccccctgcaggatgactccatcaaccaggccccactggaaatcgtctcgaaactgctctcagagaacacaaacttgaccacccaggagcatgaaaacatcattgtggcaatcgctcctttgctggaaaacaaccacccaccaccagatctctgtgaattcttttgcaagcactgcagagagcggccccggtccatggtggtcatcgaggtgttcacccccgtggtgcagcgaatcctcaagcataacatggactttgggaagtgcccgcgactgaggctgtttactcaggagtacatccttgccttgaacgagctcaacgcggggatggaagtggtgaagaagttcattcagagcatgcacggccccacagggcactgcccccacccccgggtcctgcccaacctggtggccgtgtgcctggctgccatctactcctgctatgaagagttcatcaacagccgcgacaattccccaagcctgaaggaaatccggaacggctgccagcagccgtgcgaccggaagcccactttacctctgcgccttctgcaccccagcccggacctggtgtctcaggaagccacgctgtctgaggcccggctcaagtcggtggtcgtggcctccagtgagatccacgtggaggtggaacgcaccagcactgccaagccggcgctgacggccagcgcaggcaacgacagcgagcccaacctcatcgactgcctcatggtcagccccgcctgcagcaccatgagcatcgagctgggcccccaggccgaccgcacgctcggctgctacgtggaaatcctcaagctgctgtcagactatgatgactggagaccgtctctggccagtttgcttcaacccattccattccccaaagaagctctcgcacatgagaagttcaccaaggaactgaagtacgtgattcagaggttcgccgaagaccccaggcaagaggtccactcatgcctgctgagcgtgcgggccggcaaagatggctggttccagctctacagccccggaggggtggcctgcgacgatgacggggagctgttcgccagcatggtgcacatcctcatgggctcctgttacaagaccaaaaaattcctgctctccctggcagaaaacaagctgggtccctgcatgctcctggcactgagggggaaccagaccatggtggagatcctgtgcttgatgctggaatacaacatcatcgacaacaacgacacccaactgcagatcatctcaaccctggagagcacagacgtggggaagcgcatgtacgagcagctgtgtgaccggcagcgggagctgaaggagctgcaaaggaaaggcgggcccaccaggctaacactgccctccaagtccacagacgctgacttggctcgtttgctgagctccggctccttcggaaacctggagaacctcagtttggccttcaccaatgtaaccagtgcctgcgccgagcacctcatcaaactgccttcgctcaagcagctgaacctgtggtccactcagtttggagacgctggccttcggctcctgtcggaacacctcaccatgctccaggtgctgaacctgtgcgagaccccggtcacagacgctggcctgctggccctgagctccatgaagagtctctgcagtttaaacatgaacagcaccaagctctcagctgacacctacgaagatctgaaggccaagcttcccaatttgaaggaagtggacgtccgctacaccgaagcctggtgaagctcccagctcaaggcaggaagacgtttgcaaccgcgacaaaataactcttgactaacagccgcagagcagccggtcctggggtcccaccctggtgccctggctgtgagatagatggggagtctttctgggggcggaggggggagggggtggggagggggcccacaagcacgcccagcccccgccgaattcgatatcaagcttatcgataccgtcgacc

SEQ ID NO: 39 - DNA, 626 bp, Homo sapiens
gaccgcatggactgtggccgcaaagtccgggtggagagcggctacttctctctggagaagaccaaacaggacttgaaggctgaagaacagcagctgcccccgccgctctcccctcccagccccagcacccccaaccacaggaggtcccaggtgattgaaaagtttgaggccttggacattgagaaggcagagcacatggagaccaatgcagtggggccctcaccatccagcgacacacgccagggccgcagcgagaagagggcgttccctaggaagcgggacttcaccaatgaagcccccccagctcctctcccagacgcctcggcttcccccctgtctccacaccgaagagccaagtcactggacaggaggtccacggagccctccgtgacgcccgacctgctgaatttcaagaaaggctggctgactaagcagtatgaggacggccagtggaagaaacactggtttgtcctcgccgatcaaagcctgagatactacagggattcagtggctgaggaggcagccgacttggatggagaaattgacttgtccgcatgttacgatgtcacagagtatccagttcagagaaactatggcttccagatacatacaaaggagggcgagtt

SEQ ID NO: 40 - DNA, 940 bp, Homo sapiens
  SITE (1): n equals a,t,g, or c
  SITE (6): n equals a,t,g, or c
ntatangccagctcgaaattaaccctcactaaagggaacaaaagctggagctccaccgcggtggcggccgctctagaactagtggatcccccgggctgcaggaattcggcacgaggagaggtggcattggcgccagtactcaggccagaagccccttgtgccctgctctcagaacacaggccccagaccaggaaggcattctgctaaagaaggggacccgaaacctcagctaccagcgccgatggttcatcctccgaggaaacctcctcttctacctagaacactagaccgaccatgcacccctgggcctcatcctgttagagaactgccaggtggaaccacaccttaaggctgcagaaccctatgcctttaccatcctgacccctggggtggagggcacaggtgggcgggcctacaagctggctgcagaaacccaggaagagctggagacttggctgtgggcactggctggcgcgagctggaggcggctggctgggctgctgtcccccctccccccccaccaaaacccaatactgggagctgtgccaggcaactggccaagaacccatctcatccccagaggacagtggctttctagccactgtgagtaccccctccagcttccaggagttgcatgagcactttgggaaggagatccgggtgctgcacgtggtacatagagagctccaggcagccagtgacaatggagacagcagatcccaggcaaagatggagcaggagctcaaccagtgtctgatgagtgactgagagatggacccaaagctaagaggtacctacttgccaagacagcagactgcttcaacagagacccaggtcctggctctgtccctccctccctcgtccttaccccatccccccctcatcaaataacaaggcagaaaacaggcccaggtamaamaaaaaaaaaaaaaaaaaaaaa

SEQ ID NO: 41 - DNA, 1997 bp, Homo sapiens
  SITE (1708): n equals a,t,g, or c
  SITE (1834): n equals a,t,g, or c
ctgcgcggcgggctgtggctgcggaggttgaggggcgtccgaggcgcggaggggctggctgggcaggaggggttggcggggcagcagggccgcggccatggggagcttgaaggaggagctgctcaaagccatctggcacgccttcaccgcactcgaccaggaccacagcggcaaggtctccaagtcccagctcaaggtcctttcccataacctgtgcacggtgctgaaggttcctcatgacccagttgcccttgaagagcacttcagggatgatgatgagggtccagtgtccaaccagggctacatgccttatttaaacaggttcattttggaaaaggtccaagacaactttgacaagattgaattcaataggatgtgttggaccctctgtgtcaaaaaaaacctcacaaagaatcccctgctcattacagaagaagatgcatttaaaatatgggttattttcaactttttatctgaggacaagtatccattaattattgtgtcagaagagattgaatacctgcttaagaagcttacagaagctatgggaggaggttggcagcaagaacaatttgaacattataaaatcaactttgatgacagtaaaaatggcctttctgcatgggaacttattgagcttattggaaatggacagtttagcaaaggcatggaccggcagactgtgtctatggcaattaatgaagtctttaatgaacttatattagatgtgttaaagcagggttacatgatgaaaaagggccacagacggaaaaactggactgaaagatggtttgtactaaaacccaacataatttcttactatgtgagtgaggatctgaaggataagaaaggagacattctcttggatgaaaattgctgtgtagagtccttgcctgacaaagatggaaagaaatgcctttttctcgtaaaatgttttgataagacttttgaaatcagtgcttcagataagaagaagaaacaggagtggattcaagccattcattctactattcatctgttgaagctgggcagccctccaccacacaaagaagcccgccagcgtcggaaagaactccggaagaagcagctggctgaacaagaggaactggagcgacaaatgaaggaactccaggccgccaaygaaagcaagcagcaggagctggaggccgtgcggaagaaactggaggaagcagcatctcgtgcagcagaagaggaaaagaaacgccttcagactcaagtggaacttyaggccaggttcagsrsagagctggaaagagagaagcttatcagacagcagatggaagaacaggttgctcaaaagtcctctgaactggaacagtatttacagcgagtacgggagctggaagacatgtacctaaagctgcaggaggctcttgaagatgagagacaggcccggcaagatgaagagacagtgcggaagyttcaggccaggtgccagatttgtttgcagactttgcctttatgtactttgcctgggctaatacagtttcttggawtgactaacactctggtggagagggagaagtgtctctgctctggctgtgactgagytcgaggtgctgtccagattagaaagactgtggagactcgaccggctggagtgtttcttttcattctgargcgctgggaaacccttgcttctggggctaaataagggcctattttagagcagtctggtaggtatgtntgatgaggtacccttagtcttattcgagaaaatccacaaacccagaattacctctgataagagcttggcatcttcaacacgctccagaccagagagggccattggtatgcaggcagaggcctgttncaggccaacgttgccgtcaggttttgaggaataaggaagaaatatgcagtttctatttggtcattcaggattggtaacattccttcagtaattactacttgaaatcctaatttaaaagtatttgaaacctagatttttttccccttagaactttatgatagtc

SEQ ID NO: 42 - DNA, 1881 bp, Homo sapiens
ggcacgaggtcgagcgtccatgtcggataatcagagctggaactcgtcgggctcggaggaggatccagagacggagtctgggccgcctgtggagcgctgcggggtcctcagtaagtggacaaactacattcatgggtggcaggatcgttgggtagttttgaaaaataatgctctgagttactacaaatctgaagatgaaacagagtatggctgcagaggatccatctgtcttagcaaggctgtcatcacacctcacgattttgatgaatgtcgatttgatattagtgtaaatgatagtgtttggtatcttcgtgctcaggatccagatcatagacagcaatggatagatgccattgaacagcacaagactgaatctggatatggatctgaatccagcttgcgtcgacatggctcaatggtgtccctggtgtctggagcaagtggctactctgcaacatccacctcttcattcaagaaaggccacagtttacgtgagaagttggctgaaatggaaacatttagagacatcttatgtagacaagttgacacgctacagaagtactttgatgcctgtgctgatgctgtctctaaggatgaactttaaagggataaagtggtagaagatgatgaagatgactttcctacaacgcgttctgatggtgacttcttgcatagtaccaacggcaataaagaaaagttatttccacatgtgacaccaaaaggaattaatggtatagactttaaaggggaagcgataacttttaaagcaactactgctggaatccttgcaacactttctcattgtattgaactaatggttaaacgtgaggacagctggcagaagagactggataaggaaactgagaagaaaagaagaacagaggaagcatataaaaatgcaatgacagaacttaagaaaaaatcccactttggaggaccagattatgaagaaggccctaacagtctgattaatgaagaagagttctttgatgctgttgaagctgctcttgacagacaagataaaatagaagaacagtcacagagtgaaaaggtgagattacattggcctacatccttgccctctggagatgccttttcttctgtggggacacatagatttgtccaaaaggttgaagagatggtgcagaaccacatgacttactcattacaggatgtaggcggagatgccaattggcagttggttgtagaagaaggagaaatgaaggtatacagaagagaagtagaagaaaatgggattgttctggatcctttaaaagctacccatgcagttaaaggcgtcacaggacatgaagtctgcaattatttctggaatgttgacgttcgcaatgactgggaaacaactatagaaaactttcatgtggtggaaacattagctgataatgcaatcatcatttatcaaacacacaagagggtgtggcctgcttctcagcgagacgtattatatctttctgtcattcgaaagataccagccttgactgaaaatgaccctgaaacttggatagtttgtaatttttctgtggatcatgacagtgctcctctaaacaaccgatgtgtccgtgccaaaataaatgttgctatgatttgtcaaaccttggtaagcccaccagagggaaaccaggaaattagcagggacaacattctatgcaagattacatatgtagctaatgtgaaccctggaggatgggcaccagcctcagtgttaagggcagtggcaaagcgagagtatcctaaatttctaaaacgttttacttcttacgtccaagaaaaaactgcaggaaagcctattttgttctagtattaacagtgactgaagcaaggctgtgtgacattccatgttggagaaaaaaaaaaaaaaaaaaa

SEQ ID NO: 43 - DNA, 659 bp, Homo sapiens
  SITE (557): n equals a,t,g, or c
  SITE (621): n equals a,t,g, or c
ggaccactgaagtgtatgtttgtgcaaggtgagagctgggtgctttgttcttaatttggagacaaattgccaggaggcgatcgagatcggatgacagcaaatcatgaaagctacctcctcatggcaagcacccagaatgatatggaagactgggtgaagtcaatccgccgagtcatatggggacctttcggaggagcaacacagatgtacacacggtggcatcacttcttaagctgtacctccgagaacttccagaaccagttattccttatgcgaagtatgaagattttttgtcatgtgccaaactgctcagcaaggaagargaagcaggtgttaaggaattagcaaagcaggtgaagagtttgccagtggtaaattacaacctcctcaagtatatttgcagattcttggatgaagtacagtcctactcgggarttaacaaaatgagtgtgcagaacttggcaacggtctttggtcctaatatcctgcgccccaaagtggaagatcctttgactatcatggagggcactgtggtggtccagcagttgatgtcagtnatgattagcaaacatgattgcctctttcccaaagatgcagaactacaaaagcaagccccaagantggagtgagcaaccaccattgaattcccgaagaaaacc

SEQ ID NO: 44 - DNA, 2266 bp, Homo sapiens
tgaaattgaaaaattggagcacaaattgaaccaagcccctgagaagtggcagcagctgtgggaaagggtaaccgtggaccttaaagaagaaccaagaacagatcgctcccaaagacacctgtcgagatccccaggaattgtgtctaccaacctaccttcctatcagaagaggtctctgctacatctcccagacagcagcatgggggaggaacagaattccagcatctccccatccaatggagtggagcgaagagcagccacgctctatagccagtatacatccaagaatgatgaaaacaggtcctttgagggaacactttataaaagaggggctttgctgaaaggttggaagccccgttggtttgttttggatgtaacaaaacatcagctgcgctactatgactcaggtgaggacacaagctgtaaaggccacattgatctggctgaagtagaaatggtcatccctgctggccccagatgggagagccccaaagcacacaagtgacaaggctttctttgatctcaagaccagcaaacgtgtgtataacttctgcgcccaggatggacagagtgcccagcaatggatggacaagatccagagttgtatctctgatgcctgatgcccatggtcaacccacgcagaagaaacagaagaactcatgctgccagatagatagaaaaagaagcatggatccttgaggagctgacaacaagttatcccagggcctgaggttctcctgcccagtcccctcttgcaggggttgctatatctacttaacctgaataggtgtttcacacaggtctggtcaacagccccatgcactccctgtatcttgcactaaatttttctaacagggtcttagtggttaatgatcagaagatgtctcctgagccaactgtgaacctcacccaggcaaaatggctaccacctacttgggtccttcttcatgaaagctatagatccttttttgttctctgaggtcataatttcctcggagacctgtttaacaagcaaaaatcaaaaccctccaagattgtctcatattctacctggactaggtttcctatgagagacatctacttgtaatgcctgacctttgagatgctcagttctctggtgctgccaaaagatgtttccatggtccgtgctctgccagtggggttcacaacaagagacgtcattgttcagtagcaggcaaagagggagcacacagcattattctgatggaaaaagattatccagggaatggtacaacaatgaccagcccaatgcaggaaaacactacttccaaaacactgaattctctagaccagaggtgctctgaggatccagggccttgtgttcttatgtatcttctgcttcctgacagcttctttttcaaaataacatgcaaaaaaagctgaatgcactaactcacaaaacaaacacttgcactgaattcccaatgaagtgaagatgttggaaagacagaggccagctatttaggaccatacgcacctgtgacaagggctgtgttgaccacagtcacactgtggcatgactggatacccaaactacacttctacacatgaaaagtaagaactgtctttagattttctttactttgataacttgtgattgtttagcttaagacccaagaaatgctgtttgctcatggtaaacagaaacagcatcttcgctacaaccactgacaccagctggcgtcataggtagctagatcattgcatttgttttgaaatgttaatatgttaaatactaaactaatatttcaaaaatgtgtatatatgatttctatatccttgtttttcagatagcctgcttataatttaatataaattaactgatgcattcataagatttcaataatgaaatggttcccttttaaaaaataaaaatactttgtagattaaaaataaatcagaatttcaaatttaaaattgtccacacactaggaaatagaactgtgttaatatataagaaatttggggataattaagaatgaaggacttttctatcatttccattttataaattgccacctgtgaaaatggtttttgcacattatttgtatttttctttgtatatgaaataattttttgtactttgtaaaatatggagcccattgtaccttcaactatttgagactatacacagtgcttcttttgtaactggattactttaactttcgtgaaggcattacattgcctcacattcactaaccaccttgaattaaatttatttcttaagaaaaaaaaaaaaaaaaaa

SEQ ID NO: 45 - DNA, 1142 bp, Homo sapiens
gctcttcctcctcctcctcccagctcagcgtggctaccctggggcgtagcccctccccaaagagcgctctactcacccagaatggcacgggcagccttcctcgcaacctggcagccacactgcaggacatcgagaccaagcgccaactagctctgcagcagaagggacaacaagtgattgaagagcagcggcggcgactggctgagctgaagcagaaagcggcagctgaggcacagtgccagtgggatgcccttcacggggcagcacccttcccagcgggcccctcgggcttcccccctctcatgcaccactctatcctacaccacctgcctgcggggcgggagcgtggggaggagggtgagcacgcctatgatacgctgagtctggagagctctgacagcatggagaccagcatctccaccgggggcaactcggctgctcccctgacaacatgtccagcgcgagtggtctggacatggggaagatcgaggagatggagaagatgctgaaagaggctcatgcagagaagaaccggctcatggagtcgagggagcgggagatggagctgcggcggcaggccctggaggaggagcggcggaggcgtkacaggtagaacggaggctgcagagtgagagtgcccggaggcagcagctggtcgagaaggaggtcaagatgcgggagaaacaattttcccaggcacgacccctgacccgctacctgccaatccggaaggaggactttgacctgaagacacatattgagtcmtcgggccatggtgttgatacctgcctgcacgtggtgctcagcagcaaggtctgccgtggctacttggtcaagatgggcggcaagattaaatcatggaagaagcgctggtttgtcttcgaccggctcaagcgcaccctttcctattatgtggacaagcatgagacgaagctgaaaggagtcatctatttccargccattgaaggaagtgtactacgaccacctgcgccagtgcagccaagaagaggtttttccgcttccactatggtgactgagaagcccgaacccagccctcaccttctgcgtaaaagacccatggaccggctgtgattacatggtggccccatctggcagaggccatgcgtatctggatgggatgt

SEQ ID NO: 46 - DNA, 1172 bp, Homo sapiens
  SITE (53): n equals a,t,g, or c
  SITE (108): n equals a,t,g, or c
ttcaacaacatgtggctgtactgtgtgcccaaatcagctttggtaggctctanatcacagttcgaaacagggttggcattgatggaatgaaatttgtagagactcaanatgaagaatatccacatactttccaggtgtctgggaaagagagaacactggaactgcaggccagttctgcgcaagacaaagaagaatggatcaaggcccttcaagaaaccatcgatgcttttcatcaaaggcatgaaaccttcagaaatgcaattgcaaaggataatgacattcactcagaggtttctactgctgagctagggaaaagagccccaagatggatccgagataatgaagtgacaatgtgtatgaaatgtaaagaacctttcaatgcactgacacgaaggaggcatcattgtcgagcatgtggatatgtggtttgttggaaatgctccgactacaaagctcaacttgaatatgatggtggtaaattgagcaaagtttgtaaagactgttatcaaatcataagtggattcacagacagtgaagaaaagaaaagaaaaggaattttagagattgaatcagcagaagtatctggaaacagtgtggtgtgcagctttcttcagtatatggagaagtcaaaaccttggcagaaagcttggtgtgtgatccccaagcaagaccctcttgtgctgtacatgtatggtgccccccaggacgtcagagcccaggccaccattccacttctgggctatgtggtggatgaaatgccaaggagcgcagacctgccacacagtttcaaactgacccagtctaagtccgtgcacagctttgctgcagacagtgaggaactgaagcagaagtggctgaaagtcatccttttagctgtcacaggtgagacaccaggtggtccaaatgagcatccagccaccttggatgatcatcctgaacctaagaaaaaatcagaatgctgaactcctccaggaccagccatggtgtggaggtctcaggacttacagctcaagacattcccagctcttcttacacatctgctagcactttatgttgaaaaatataggcccataaatgcatcttttgaggactattttcctatgtttatgtactcttagtgaaattagtgtgcagagtcattctaccgataaagttttgaaataatgtgaaaa

SEQ ID NO: 47 - DNA, 1461 bp, Homo sapiens
aagggattaagctggcggccgccgccgccgaggcttacccgggaatgtctgggcccgcgcctcgcggcccccaagctccacgctgcgcccgctgtcccggcctctaaaggccgccacgtccctgcggcgcgcgcaggcagaaagcggcttcgtgccggcggagggggcccgggcgggccgggaggggctgccccaggccctgcgcctaccccatcaccgcggccggcgccgggccgggaggatgcgcggtgtggggctctgaagcatggagggggtgttgtacaagtggaccaactatctcacaggctggcagcctcgttggtttgttttagataatggaatcttatcctactatgattcacaagatgatgtttgcaaagggagcaaaggaagcataaagatggcagtttgtgaaattaaagttcattcagcagacaacacaagaatggaattaatcattcctggagagcagcatttctacatgaaggcagtgaatgcagctgaaagacagaggtggctggtcgctctggggagctccaaagcatgtttgactgatacaaggactaaaaaagaaaaagaaataagtgaaaccagtgaatcgctgaaaaccaaaatgtctgaacttcgcctctactgtgacctcttaatgcagcaagttcatacaatacaggaatttgttcaccatgatgagaatcattcatctcctagtgcagagaacatgaatgaagcctcttctctgcttagtgccacgtgtaacacattcatcacaacgcttgaggaatgtgtgaagatagccaatgccaagtttaaacctgagatgtttcaactgcaccatccggatcccttagtttctcctgtgtcaccttctcctgttcaaatgatgaagcgttctgtcagccaccctggttcttgcagttcagagaggagtagccactctataaaagaaccagtatctacacttcaccgactctcccagcgacgccgaagaacctactcagatacagattcttgtagtgatattcctcttgaagacccagatagacctgttcactgttcaaaaaatacacttaatggagatttggcatcagcaaccattcctgaagaaagcagacttatggccaaaaaacaatctgaatcagaagatactcttccatccttctcttcctgaagaaactgaagtgtccaacttcctctaagtattgctatgcaaaagctgctgtaattaaactattgttatagggagtagttttttcccttaggactctgcactttatagaatgttgtaaaacagacaaacaagaaaacaaaccacatacttttgaagygtrttttatctttatatagttkgtttgcaagagtattttcctaataacttcacagtatgaatgtgcatcttttttttttgaacaaatgatgggtgtaacattttgacatccataaggrcaatgtagatattttcct

SEQ ID NO: 48 - DNA, 2686 bp, Homo sapiens
  SITE (2505): n equals a,t,g, or c
  SITE (2569): n equals a,t,g, or c
  SITE (2644): n equals a,t,g, or c
  SITE (2645): n equals a,t,g, or c
gggcgcgggaagcacakyccggccctccaggtccccaaggagaccccagcctcctgctgcccactgtgagcgacctccccggggctcctctggaagcggctccggcaagtatcgagtttgcctgtgcggagctgggggagcctccggctttcctgtttgctttgttaattattttcgtccccagaggaaggcgggccggccccctcattccctgctgggcccctcctccctgaagatctacacagcagatctactcacaaaagtccacccagcagaagcaggaggatggtggttgtgggtcctctgtgagcagccctgttaacctttaaaccagcacggccgccgcagctgtgagcctagcacctgatcagtggagagctgtggattgcatgtttgtttgccattgcccccgccaccctgcaagttgcaccttctagaatcagcaagccaagctcctctcacccagcgtaatgatgcggaaatgcaaatgcaccatcatgttgtgacccatattgcgaaaattagaaaaaaggaagttgtgtttcgctattgcacgaagttcagcccagaggagaaactcgctcgccttcagaagacagtacctcctaaatggctctactttgaacctgctgggcaaggaagagattttcaaggaaaccatctaccgtgtgcaagctcctgccggccaaccccagaccccagcacggagccaggcgcctgtgcccgccraccctcagcatcctcctcagaaaggctggtggcatcaggaagcccctggccagcctccacctgagcccagtgagctcagctttaaggatggagtcaggcagggggtcctcaacccctccaggacccattgctgccctagggatgccagacactgggcctggcagttcctccctagggaagcttcaggcgctccctgttgggcccagagcccactgtggggaccctgtcagcctggctgcagcaggggacggctctccagacataggccccacgggagagctgagtggtagcttaaagatccccaaccgggacagcgggatcgacagtccmtcctccagtgtggctggagagaactttccctgcgaggagggcttggaggctggcccaagccccactgtactgggggcgcacgcagagatggccctggacagccaggtcccgaaggtcaccccccaggargaggcggacagcgacgtgggtgaggaacctgactctgagaacaccccccagaaggctgacaaggatgccggcctggcccagcactctggcccccagaagcttctccacattgcccaggagctcctgcacaccgaggagacctatgtgaagcggctgcacctgctggaccaggttttctgcaccaggctgacggatgcggggatccctccagaagtcatcatgggcatattctctaacatctcctccatccaccgcttccacgggcagttcctgctgccggagctgaagacgcggatcacggaggagtgggacacaaacccacggctcggggacatcctgcagaagctggccccattcctgaagatgtacggcgagtatgtcaagaactttgaccgagccgtagggctggtgagcacgtggacccagcgctccccactgtttaaagacgtcrtccacagcatccagaagcaggaggtatgcgggaacctgacgctgcagcaccacatgctggagcccgtgcagagggtcccccggtacgagctgctgctcaaggactatctgaagaggctcccgcaggacgccccagaccggaaggatgcggagaggtccttggagctcatctccacagccgccaaccactccaatgctgccattcggaaagtggagaaaatgcacaagctcttggaggtgtacgagcagctgggtggggaagaagacattgtcaacccggccaatgaactgatcaaggagggccaaatccagaaactgtcagccaagaacggcaccccccaggaccgccacctcttcctgttcaacagcatgatcctttactgtgtgcccaagctgcggctcatgggccagaagttcagcgtccgggagaagatggacatctcaggcctccaggtgcaggatatcgtcaagccaaacacagcacatacattcatcataacgggaagaaaaaggtccctggagctgcagacgcggacagaggaagagaagaaagaatggattcagatcatccaggccaccatcgagaagcacaaacagaacagcgaaaccttcaaggcttttggtggcgccttyagccaggatgaggaccccagcctctctccagacatgcctatcacgagcaccagccctgtggagcctgtggtgaccaccgaaggcagttcgggtgcagcagggctcgagcccagaaaactatcctctaagaccagacgtgacaaggagaagcagagctgtaagagctgtggtgagaccttcaactccatcaccaagaggaggcatcactgcaagcttgtgtggggcggcatctgngggaaagtgcttccgaggttcaagggcccgagaaacaagcccggcaaaagcccgggtctgcaanaagaattggtttcctggacacaagcccagtgggcccccttggaaaagccccagaggaaagacaccccaattggannaacccccaagcccaagcctgggttttgggggccccctgggg

SEQ ID NO: 49 - DNA, 1934 bp, Homo sapiens
aagccattgaagaagtctattatgatcacctcaagaatgctaataagagtcctaatccgttactcacctttagcgtcaagactcatgacagaatctattatatggtagccccatcgccagaagccatgcggatctggatggatgttatagttacgggggcagaaggttacactcacttcttgttgtagtgaactgaggcaacagtccacttcagggcagacggcaataatctcttacaagaatgaagccatattcaaccccagatgagaaaacccaacagatccatcccttgagctgtaaacactcagaactcctttcatatcaagacaagttatttgtaaaaaataaagaaggggttttaatacaaaccttcataataaatagcaaaataattgaagcttccatgagaaagaaaacactattttgataaattggatcacttataggaacatttctaataaactgtttttaatcagttgtcggatttggtgaaataaactaaacaggttacagaatatctgtatgtacttggaaatacagaataactttatcacccaaatcactggcattgacattattggtaatcaactggctttttttaaaaaaggtagcattttgttgacagttattttgtaaacataagcaaataagggcttggagggaaatacattttaggaggagttttgccttaattttttaagtactgcaccaaaaccaaagagctgacctgacttctgtggaacagtagtaactgcaagtgatgaactgcatttcgtattgttctgtatatttcaaaatggtattttgatgccatcaaatgcccaggaaattgactttgcagtgtcaccactggtgtaagctactatatatgtatatatatatatgtagtaaaccactttttgtaaaagaagaaagagcaaaaagctgtgtgttttagaaaaaaaagccaggttacgcaacaggcattctgtcatgttgaacaacttttaaataaagagaatatctggtgttaggagcttgttttgctgaagatttctccattcctggggctgagaataaaggcaaccagtagccactgtcctttagattgtctgatttctttttgttgtggagcacacctgctaactgctccctcaacataactatgaaatcatagctctgttttcaccaaagaacagaccaattaacatacttatttgcagaagtggtgtagttctacaaaacggcaaatgaagttcaacttaatattctctataatgtattattttattttattttttacaattagccttttttttagttaatttttgtcaaatgaaacgacttcaggcaagtctcttttataatggtttttcaagtgccatttattctagtttatcatgttttgcatgtttgaaagtatgaatgtgctctttcctaaaacatggcaaatgaatagatgtagagaataacaatattacttacaagatgaaatgattagattagaagtgtccctttattaaactttgtcagcctgactgggtacaattcttttgttaatttgcagtgtggtttgtatacacgtatacgtgttatcaataataagattttgcaactggatgacacaagattttacttgaacagtgaaggacaaaaatcatgattgtggaagatatttttaaaatctgattttgcagcgatcacttttaaaccctgtagtgatgtaagactaaaatataattgctaagattttgttggttaatgtaaagatatgacttttctgcactgtactctcttcataggattgtaaaggtgttctaatccaattgcatgatgtagtaagcctcttaaatatgtgtgttaaatatattgagtttggattaaaatgttgacatgatttcacatttgaaaataaactcatctcttattttgaagttaaaaaaaaaaaaaaaaaa

SEQ ID NO: 50 - DNA, 2031 bp, Homo sapiens
ggcacgagcagctgggaagtggtggaaggactgaggggggagatgaattacacccaggagccaccagttcagaaaggatttttgctgaaaaagaggaagtggcccttaaaaggctggcataagagattcttctatctggacaaaggaatcttgaaatatgccaagagccaaaccgatatagagagagagaagctgcatggctgcattgatgtcgggctctcagtgatgtctgtaaagaagtcatcaaaatgcatagaccttgacaccgaggagcacatctaccatctgaaggtcaagtcagaagaagtctttgatgagtgggtatcgaaacttcgccaccacagaatgtatcgtcagaatgaaattgccatgtttccacatgaagttaaccactttttctcagggtccaccatcacagactcttcatctggggtgtttgactccatttcaagtaggaagcgtagcagtatatcaaagcagaatttatttcaaactggaagcaatgtatcattttcttgtggtggtgagacacgagttccattatggttacagtcttcagaggacatggaaaaatgctccaaagacctggcgcactgtcatgcctacctggtagaaatgagccagctcctgcaaagcatggacgtcctgcatcggacatactcggcaccagctatcaacgccatccagggtggatcttttgaaagtcccaaaaaggaaaaaagatcgcacaggaggtggcggtccagagctattggcaaagatgctaaaggaacactgcaggtcccgaaacctttttctggcccagtaagactacactcctccaatcctaatttgtcaacactagattttggagaagagaaaaattattctgatggctctgaaacctcatcagagttttctaaaatgcaagaagatctgtgtcatattgcccataaagtttacttcactttaaggtcagcttttaatatcatgtcagcggagagagagaaactgaagcagctgatggagcaggatgcctcctcctccccgtctgctcaggtcattggtctgaagaacgccctgtcatccgccctagcacaaaacacagatcttaaagaacgcttacgcagaatccatgccgagtctctgctcctcgactcccccgctgtcgccaagtcgggtgacaatctggcagaggaaaactccagagatgaaaaccgagctctagttcatcagctttctaatgaaagtagactctccatcactgactccctttctgagttttttgatgctcaggaagttctgttatctccaagctcttcagaaaacgagatttctgatgatgactcatatgtcagtgacataagtgataatctttccttagataatctcagtaatgatttagataatgagagacagaccttggggcctgtccttgatagtggtcgggaagcgaagtcccggagaagaacgtgcctgccggcgccctgcccgagcagcagtaacatcagcctgtggaacatcctgaggaacaacatcgggaaggacctgtccaaggtggccatgccggtggagctgaacgagcccctgaacacgctgcagaggctctgcgaggagctggagtacagcgagctcctggacaaggccgcgcagattcccagccccctggaaaggatggtgaggagtcagccttcccttgccactgtccagcctcggtccccaagccacgaggccattcacggggcccatcagagagacagcccctgttccctccggtttcattttgattgttccgtaaacaggttcattactcagagctgtctggcttcctccgcctggctgtttccagtcaccttgtgaggatttggagacggggttggggtgcttctccgtggcacttggtgcctggggtagttctgttctgtgggtttgtgcttcctctttctccagaagccttctggctgattgttccgatgtgcccggctggaaaacatgtctttagggctgtctgcatgtttatttttacttccctgggtggacagaatttatttt

SEQ ID NO: 51 - DNA, 1718 bp, Homo sapiens
ccacgcgtccggcagaagctaacggagctgcagcgggacctggtgggcatagagaacctcattgctcctggcagggagttcatccgtgagggctgccttcacaagctcaccaagaagggcctgcagcagaggatgttttttctgttctcagatatgttgctgtacacaagcaaaggagttgcagggaccagccacttccggatccggggcctccttcccctccaaggcatgctggtggaagaaagtgataacgagtggtctgttccacactgtttcaccatctacgcggctcagaaaacaatcgtggtggcagccagcactcggctggagaaagagaagtggatgctggacctgaactccgcgatccaagcagccaagagtggcggtgacacggcccctgcactgccaggccgcactgtgtgcactcgtccccccagatcccccaacgaggtatctctggagcaggagtcagaagatgatgctcggggtgtccgcagctccctggaggggcatggccagcaccgggccaacaccacaatgcacgtgtgctggtaccggaacaccagcgtgtccagggcagaccacagtgcagctgtcgagaaccagctttcaggatatctgctaagaaagttcaaaaacagtcatggctggcagaagctctgggtcgtctttaccaacttctgtttgttcttctacaaaactcatcaggatgactacccactggccagcctcccgctgctgggctacagcgtgagcatccccagggaggccgatggcatacacaaagactatgttttcaagctccagttcaaatcccacgtctacttcttccgggctgagagcaagtacacatttgaaaggtggatggaggtgatccagggggccagcagctcagccgggagggccccaagcatcgtgcaggatggcccccaaccctcctcagggctggaggggatggtcagggggaaggaggaatgacgctcaacctgcccaggtttggacacaactacaaagaacagcaggacacagaggtgacctctgtcctgaggcttctcaacagatgggaagtggctgtggtctcactggatcctcactggcaccagcagtgtgggtgggcctcatgtaacatctgggaggggcttcatccccccacccaggacctagtgcatgccagcagctatctggggccctgggaaaaatgtgcgagtcttgagcgcggagccgctcaagccacagctcccaggcccctggctcaaagacgcagacaaggcctgagcagtgctctcggcatcggaccaaagcctgggcacaccctgcctctctccccagagcagggtccctgccgaggactggcctagagcaagcactggaaaagaggccctgccatacaccctgcgtacccactgccaggaccctctcagacaagcgtggcacagccatgctgaccttccatctggtgaaccaagtggcagccccaggggcctgccctgcaggtcacagctaaacaagtctggcagaagccacgcttgttccccatgtacctctagagaagcagaaacaaagtccccctgtgccctgggagggtggggccgtctaatttattactgcccagcattccttcaacgggaagtagatgggcgactgctttgttcacacacatttgattaaaaataaacaaacagcatctccccaaaaaaaaaaaaaaaaaaaaaaaaaaa

SEQ ID NO: 52 - DNA, 1730 bp, Homo sapiens
tttttttttttttttttttgttttgcaaccacccatcaataaactttcttttttattattaagtgggggcagggtttctgttcttgcaactgagtcctaacagaaaacaatggtttcgctgaccacacggagagctgaggacaggacaaaaaggcatgagacagctggacacctggagagaggtgacacaggacagagtcctcacccggctgccctgggcctcggggagctcaggctgcagtccctgggcctggtggcacccacagcacggcagtctctggctgggcttcggggagcccacatgtctgatcggcagggcttggctggccaggcggtgggcaccagcgtggtgggtgggcagtcctgggcttccaggaggcctcctgggactcaggctcttcagtggggtgtgcctgtcagggtgcaggtgggttctgtggctacactcccatcctgtcttccctctgtgttcccaaacctgctctggtccctagatgtctggagacctggggtcgtccagctcaggaggccatctggarctgccgctgcagcctgcagagtgtaaggtggcgtttgttaccaagacctgtgggtgttctggggcttcctgaagggaaaggcattacctgcagtgaagccataaggacacagtgtccagcaaaaaggcactgggagtccagaaagagccactccccaccgctgcacctgccaccatgggatggggtcccggagccctgggcagcttctggagctgccctcttgggggcctgggcagtggagctggcttggggacagatgttctgcaggccgggggtcagctgtggaaggcagaccaggccacccccgaggcgtagaactccacgctgctgggccagtcgccgtccctgctgccctccttgtcctcgtcggagtcatcgtcatctccactggacstccgcagatgggccgggccaggtgggctggctgccctggggaccccgcgccctgctcctccgcctcctcctgccgctgctgggcggccagttcgcggtagcagaggctgcagacgcgcacgggcttgggggacaggcgcgggagcaggaagcgctggcgcgagcactcagcgcagaccacgaarccgcacttgcggcagtggtggcgcctcgtgagggcagagaagcgcgtctgcgtgcagcgcatgcagatgtccgtggccttgtcggggatccagggtgccgcgtgctccgtgctgggcgggcggcccgtggccctcagttgccgccgcacgcactcctcgatgtggctaatccattcctggcgctccgtagcggaggcggccgacaccacaaaggacttcttggccgtcttgatcatccagcggttcttggcctgcagcgtctccggcaacagctccagtgtgacctcctccagggggatgatgtgctggctgcggtamttgcgcttgttgagcacgatgctgccatacaccaggatgtcgttaaagaggaagaagatgcgcggcttggccttcttgcggcactctttggtcagcacgccctcgcccagcagcactcggcctggcagcgccagcggctgccccgaggccccgaagcagctctccactgccgcgatgcgctggctgttgatctccgtgttggccaagtggtccaccatcgtctccagctggcggcttctgcgccggccccgcgcccagccctcgagtccacaccgcagtagcccgggtccccgcc

SEQ ID NO: 53 - DNA, 432 bp, Homo sapiens
  SITE (2): n equals a,t,g, or c
  SITE (3): n equals a,t,g, or c
  SITE (46): n equals a,t,g, or c
  SITE (361): n equals a,t,g, or c
annagcacactgatgacaagtcacgcctgacagtaaccggtccggnaattcccgggatcgacccacgcgtccggggcaagcgagttggtggaagtattcggccatggaaacagatgtatgttgtccttcggggtcattcactttacctgtacaaagataaaagagagcagacgactccgtctgaggaagagcagcccatcagtgttaatgcttgcttgatagacatctcttacagtgagaccaagaggaaaaatgtgtttcgactcaccacgtccgactgtgaatgcctgtttcargctgaagacagagatgatatgctagcttggatcaagacgatccaggagagcagcaacctaaacgnagaggacactggagtcactaacagggatctaattagtcgaaggataaaagaatacaacaatctgatgagca

SEQ ID NO: 54 - DNA, 2881 bp, Homo sapiens
gggtcgacccacgcgtccgcccaagatggcgtccatcatggaagggccgctgagcaaatggactaacgtgatgaagggctggcagtaccgttggttcgtgctggactacaatgcaggactgctctcctactacacgtccaaggacaaaatgatgagaggctctcgcagaggatgtgttagactcagaggagctgtgattggtatagacgatgaggacgacagcaccttcacaataactgttgatcagaaaaccttccatttccaggcccgtgatgctgatgagcgagagaagtggatccatgccttagaagaaacaattcttcgacatactctccagcttcaaggtttggattcaggatttgttcctagtgtccaagattttgataagaaacttacagaagctgatgcttacctacaaatcttgattgaacaattaaagctttttgatgacaagcttcaaaactgcaaagaagatgaacagagaaagaaaattgaaactctcaaagagacaacaaatagcatggtagaatcaattaaacactgcattgtgttgctgcagattgccaaagaccagagtaatgcggagaagcacgcagatggaatgataagtactattaatcccgtagatgcaatatatcaacctagtcctttggaacctgtgatcagcacaatgccttcccagactgtgttacctccagaacctgttcagttgtgtaagtcagagcagcgtccatcttccctaccagttggacctgtgttggctaccttgggacatcatcagactcctacaccaaatagtacaggcagtggccattcaccaccgagtagcagtctcacttctccaagccacgtgaacttgtctccaaatacagtcccagagttctcttactccagcagtgaagatgaattttatgatgctgatgaattccatcaaagtggctcatccccaaagcgcttaatagattcttctggatctgcctcagtcctgacacacagcagctcgggaaatagtctaaaacgcccagataccacagaatcacttaattcttccttgtccaatggaacaagtgatgctgacctgtttgattcacatgatgacagagatgatgatgcggaggcagggtctgtggaggagcacaagagcgttatcatgcatctcttgtcgcaggttagacttggaatggatcttactaaggtagttcttccaacgtttattcttgaaagaagatctcttttagaaatgtatgcagacttttttgcacatccggacctgtttgtgagcattagtgaccagaaggatcccaaggatcgaatggttcaggttgtgaaatggtacctctcagcctttcatgcgggaaggaaaggatcagttgccaaaaagccatacaatcccattttgggcgagatttttcagtgtcattggacattaccaaatgatactgaagagaacacagaactagtttcagaaggaccagttccctgggtttccaaaaacagtgtaacatttgtggctgagcaggtttcccatcatccacccatttcagccttttatgctgagtgttttaacaagaagatacaattcaatgctcatatctggaccaaatcaaaattccttgggatgtcaattggggtgcacaacatagggcagggctgtgtctcatgtctagactatgatgaacattacattctcacattccccaatggctatggaaggtctatcctcacagtgccctgggtggaattaggaggagaatgcaatattaattgttccaaaacaggctatagtgcaaatatcatcttccacactaaacccttctatgggggcaagaagcacagaattactgccgagattttttctccaaatgacaagaagtctttttgctcaattgaaggggaatggaatggtgtgatgtatgcaaaatatgcaacaggggaaaatacagtctttgtagataccaagaagttgcctataatcaagaagaaagtgaggaagttggaagatcagaacgagtatgaatcccgcagcctttggaaggatgtcactttcaacttaaaaatcagagacattgatgcagcaactgaagcaaagcacaggcttgaagaaagacaaagagcagaagcccgagaaaggaaggagaaggaaattcagtgggagacaaggttatttcatgaagatggagaatgctgggtttatgatgaaccattactgaaacgtcttggtgctgccaagcattaggttggaagatgcaaagtttatacctgatgatcagggcagtaggcataattcagcaacaaacaatcttcctttgggagaaacctgttcattccaatcttctaattacagtggttcctatctcagggatactggactttctgacgcagatgaacaattaaggggaaaagcttcccttttccctctgtggcagttacgattttgacttcagtcctgagaaaaacttcaggttttgaaaatcagatgatgtcttctccttttccaaacaccacacgttgaaagcatttataaatccaagtctgaaactctgcgctctagtactgctgttaagatacacaacttgtttcttagttcatataatctcgggatacacacacacacacacatatatatacacacacatacgtatacacacacatacatatatataaatatacctgatgccagatttttttcataaatattctgcctactgtaaatatgggttcctctgagttgttttagaaaattagcgcaatgtattaaaatcaagtgttaggaaatttcatggtcttacctacaataacttttattttggaattgaactattattaaattgtatctaatcctggattacagtttaattaattattaaaaaaaaaaaaaaaa

SEQ ID NO: 55 - DNA, 461 bp, Homo sapiens
accatgagaaactttttgaattaatattaatggaagacattaaatttcctcgaacactctcttcagatgcaaaatcattgctttcagggctcttgataaaggatccaaataaacgcttcgactttaacataaacaaaaacgtcaaccagtattcatgttggaactaatcgtaagtttcatccattagtggctttggagtacagcagaaattaacaagttttctgtgagaatcagccttggtggaggaccagatgatgcaaaagaaattatgagacacagtttcttctctggagtaaactggcaagatgtatatgataaaaagcttgtacctccttttaaacctcaagtaacatctgagacagatactagatattttgatgaagaatttacagctcagactattacaataacaccacctgaaaaatatgatgaggatggtatggactgcatggacaatgaga

SEQ ID NO: 56 - DNA, 851 bp, Homo sapiens
  SITE (1): n equals a,t,g, or c
  SITE (51): n equals a,t,g, or c
  SITE (846): n equals a,t,g, or c
nggtgacactatagaaggtacgcctgcaggtaccggtccggaattcccggntcgacccacgcgtccggttaatggaggggagctttttttccacttacaaagagaacggtcctttcctgagcacagagctaggttttacgctgctgaaattgctagtgcattgggttacttacattccatcaaaatagtatacagagacttgaaaccagaaaatattcttttggattcagtaggacatgttgtcttaacagattttgggctttgtaaagaaggaattgctatttctgacaccactaccacattttgtgggacaccagagtatcttgcacctgaagtaattagaaaacagccctatgacaatactgtagattggtggtgccttggggctgttctgtatgaaatgctgtatggattgcctcctttttattgccgagatgttgctgaaatgtatgacaatatccttcacaaacccctaagtttgaggccaggagtgagtcttacagcctggtccattctggaagaactcctagaaaaagacaggmaaaatcgacttggtgccaaggaagactttcttgaaattcagaatcatcctttttttgaatcactcagctgggctgaccttgtacaaaagaagattccaccaccatttaatcctaatgtggctggaccagatgatatcagaaacttygacacagcatytacagaagaaacagtkccatattctgtgtgtgtatcttctgactattctatagtgaatgccagwgtattggaggcagatgatgcattcgttggtttctcttatgcacctccttcagaagacttatttttgtgagcagtttgccattncaggt

SEQ ID NO: 57 - DNA, 769 bp, Homo sapiens
aattcggcacgagcaaatacgggcctgagtgtgactggtggtctctgggtgtctgcatgtatgagatgctctatggagaaacgccgttttatgcggagtcactcgtggagacctatgggaagatcatgaaccatgaagagcgattccagttcccatcccatgtcacggatgtatctgaagaagcgaaggacctcatccagagactgatctgcagtagagaacgccggctggggcagaatggaatagaggatttcaaaaagcatgcgttttttgaaggtctaaattgggaaaatatacgaaacctagaagcaccttatattcctgatgtgagcagtccctctgacacatccaacttcgacgtggatgacgacgtgctgagaaacacggaaatattacctcctggttctcacacaggcttttctggattacatttgccattcattggttttacattcacaacggaaagctgtttttctgatcgaggctctctgaagagcataatgcagtccaacacattaaccaaagatgaggatgtgcagcgggacctggagcacagcctgcagatggaagcttacgagaggaggattcggaggctggaacaggagaagctggagctgagcaggaagctgcaagagtccacccagaccgtgcagtccctccacggctcatctcgggccctcagcaattcaaaccgagataaagaaatcaaaaagctaaatgaagaaatcgaacgcttgaagaataaaatagcagattcaaacaggctcga

SEQ ID NO: 58 - DNA, 1735 bp, Homo sapiens
agggcgcgccctgacggactggccgagccggcggtgagaggccgcgcgtcgggagcgggccgcgcggcaccatgtcggccaaggtgcggctcaagaagctggagcagctgctcctggacgggccctggcgcaacgagagcgccytgagcgtggaaacgctgctcgacgtgctcgtctgcctgtacaccgagtgcagccactcggccctgcgccgcgacaagtacgtggccgagttcctcgagtgggctaaaccatttacacagctggtgaaagaaatgcagcttcatcgagaagactttgaaataattaaagtaattggaagaggtgcttttggtgaggttgctgttgtcaaaatgaagaatactgaacgaatttatgcaatgaaaatcctcaacaagtgggagatgctgaaaagagcagagaccgcgtgcttccgagaggagcgcgatgtgctggtgaacggcgactgccagtggatcaccgcgctgcactacgcctttcaggacgagaaccacctgtacttagtcatggattactatgtgggtggtgatttactgaccctgctcascaaatttgaagacaagcttccggaagatatggcgaggttctacattggtgaaatggtgctggccattgactccatccatcagcttcattacgkgcacagrgacattaaacctgacaatgtccttttggacgtgaatggtcatatccscctggctgactttggatcatgtttgaagatgaatgatgatggcactgtgcagtcctccgtgsccgtgggcacacctgactacatctcgccggagatcctgcagscgatggaggacggcatggscaaatacgggcctgagtgtgactggtggtctctgggtgtctgcatgtatgagatgctctatggagaaacgccgttttatgcggagtcactcgtggagacctatgggaagatcatgaaccatgaagagcgattccagttcccatcccatgtcacggatgtatctgaagaagcgaaggacctcatccagagactgatctgcagtagagaacgccggctggggcagaatggaatagaggatttcaaaaagcatgcgttttttgaaggtctaaattgggaaaatatacgaaacctagaagcaccttatattcctgatgtgagcagtccctctgacacatccaacttcgacgtggatgacgacgtgctgagaaacacggaaatattacctcctggttctcacacaggcttttctggattacatttgccattcattggttttacattcacaacggaaagctgtttttctgatcgaggctctctgaagagcataatgcagtccaacacattaaccaaagatgaggatgtgcagcgggacctggagcacagcctgcagatggaagcttacgagaggaggattcggaggctggaacaggagaagctggagctgagcaggaagctgcaagagtccacccagaccgtgcagtccctycacggctcatctcgggccctcagcaattcaaaccgagataaagaaatcaaaaagctaaatgaagaaatcgaacgcttgaagaataaaatagcagattcaaacaggctggagcgacagcttgaggacacagtggcgcttcgccaagagcgtgaggactccacgcagcggctgcgggggctggagaaacagcaccgcgtggtccggcaggagaaggaggagctgcacaagcaactggttgaagcctcagagcg

SEQ ID NO: 59 - DNA, 633 bp, Homo sapiens
caccccagctgatggggtctgccagctgggttcggaagcctgcactctgagatgctgggtgccctgtcaccaggtgtgcttctgccccgttcccagcctgcccctcccctgaatgcctgtcctaggctgtgtgcagctggtcgggctgggcagccctgggacccagctgggcacctgttctcccattaacacagggtgccctggtcctggtccccgttcctgccttgaggcctgccaccctcctgccctgccctccaagggtatggggggcctgggcagtgctcaacctctgcccagccttgaccagagaccttgctaattgacaatggacaatgctggtgcccagcccagactctggggtggggcagtgcttgagggggtccttgactgtgggacctgaggggctctctggcagctcctcacgtgtgcacatcaccttatagtcacccttcatcctgggtcattgagagtcctgtctgcagccagatgccagcaggctgtggtcctgtagtccctgagccatggaggcagggtgggctcatcctgtgcaccttgttccacagtctccctctttcccaatttacaagaagaccaataagaaaaataagaaaacaagaaaaaaaaaaaaaaaaa

SEQ ID NO: 60 - DNA, 1323 bp, Homo sapiens
  SITE (703): n equals a,t,g, or c
  SITE (1322): n equals a,t,g, or c
ccgactcactatagggaaagctggtacgcctgcaggtaccggtccggaattcccgggtcgacccacgcgtccgcttcctggcgtgcttcagcgtggtgcagcccagctcctttcaaaacatcacagagaaatggctgcccgagatccgcacgcacaacccccaggcgcctgtgctgctggtgggcacccaggccgacctgagggacgatgtcaacgtactaattcagctggaccaggggggccgggagggccccgtgccccaaccccaggctcagggtctggccgagaagatccgagcctgctgctaccttgagtgctcagccttgacgcagaagaacttgaaggaagtatttgactcggctattctcagtgccattgagcacaaagcccggctggagaagaaactgaatgccaaaggtgtgcgcaccctctcccgctgccgctggaagaagttcttctgcttcgtttgagcagctatggctgcatagcaagtagtaggcaggaggccaaagacttctgagacctggggcacccgggcctttgcggcagctactggcagggcctggccacctcataggactcagttcccttctgaacactcgggggacatgggcctctaactgsccactctgatatgcctgggtgagcctaggagggaaggctctgawttggatttctycagtcmaagctcacagaaaaaaancctggcactttgawtttmatgggatggtcctaacagggtcagtcacctccgagcagtttgggaacccagtttcttgtcctgggccctcaggtcagcctggctgaattaggacccttccttggcacaggggtgagaaagagcttggggaacgcttggcattatggagggctggaaggggctcaaccccgatttggagagaagtttgggatggagtgggcgagagattgagagagcgagcaggaaaagaggtcttggagcctgggactgatggtggataaggcctggaaagaagatgacgaggaggaggagagagggaagtggggtggatgaggagcaggctgacacctgggctgccctcaatccccaaggccagggagggcggggctggcccctgggaagaactgggtctctgggctccctaggcactgcccaaactggctgagccaggagtggggcaggaagtgagagtcaaggcccagcaaaaggagggggaggagctgcaaattagaacctgaaggaggaccgggttggggatcatccctttcctcaaggtcacacagcctagaagctagagcagtgcagagtctgcaaataaaaccttaagtctgtgaaaaaaaana

SEQ ID NO: 61 - DNA, 1617 bp, Homo sapiens
  SITE (25): n equals a,t,g, or c
  SITE (177): n equals a,t,g, or c
  SITE (1599): n equals a,t,g, or c
tccgcaagattcgagcctgagcggncctgggcgtctcgagaggtgagagagttggcggcgaggtctcggcggctaagcgagcgtcggcgactgtctctccgcgagaggaggcaagttggggtccaggctccaaagccggtggccgcgtaccgggtggagccctgtctttgaggtctnaggagagaacagtgatatcctgagagaagatgggaaagggctgcaaggttgtggtttgtggattgttatctgtggggaaaactgcaattttggagcagctcctttatggaaatcatactattggaatggaagattgcgaaacaatggaagatgtatacatggcttcagtagaaacagaccgaggagtaaaagaacagttacatctttatgacaccagaggtctacaggaaggcgtggagctgccaaagcattatttttcatttgctgatggcttcgttcttgtgtacagtgtgaataaccttgaatcctttcaaagagtggagcttctgaagaaagaaatcgataagttcaaagacaaaaaagaggtagcaattgtggtattaggaaacaaaatcgacctttctgagcagagacaagtggacgctgaagtggcacagcagtgggcaaaaagtgagaaagtaagactgtgggaggtgactgttacagatcggaaaactctgattgaaccattcactttattagccagtaaactttctcaaccccagagcaaatcaagctttcctttgcctgggaggaaaaacaaagggaactctaattctgagaactaaaaatcagtaatttccacaattgtatgttgaatagtgattgcctttaagtgtctgtgaacatggagtaatattactatttaaaataggccatttgtrtctacctttggtccttaggaaaattcctaaggaagtcaattaatgcactttagatgttaaaagtatttgggctaaggttattattgcctgatatgaaataatatattcttattctcattgtttgaaacctgtctttgaaattagcacctttgttatttatgttgtacttgtgaaaacagtaaaatagtttggatagttatgcaaatgcacctatgtgtaacttccccccaaccccaagctgtttcggaagatatcataatcattctgtgtaacattatgcaaacttctaagcccaaacatgactttgtttttaaaaagttcattaatctaatgtctaggattataaaacatttttttgtgtctaaattggacccaaaacattgaacagtttggggtagtaagctaaatttcatcttgtggagattttgctaaacagactaagacccatgatttagctttgctcaaattagaatgtttagcatgagttgaggtaccaggtagtgttaagtaggttcatcacgctctaaggccgttttttccttagccagacccctgttgatagaccagatacttgagggcaaactgtttgctcctcctcttgaaaatgattaggcacttaaggacagtaaagctgtattttctggaaggaagactgtatcttctggaatagttttctagaaaactagtcatatacaataaaagtatcaaaaatattggnaaaaaaaaaaaaaaaaaa

SEQ ID NO: 62 - DNA, 1137 bp, Homo sapiens
ccacgcgtccgggaggccgagggctgccgctaccaatttcgggtcgcgctgctgggggacgcggcggtgggcaagacgtcgctgctgcggagctacgtggcaggcgcgcctggcgccccggagccggagcccgagcccgagcccacggtgggcgccgagtgctaccgccgcgcgctgcagctgcgggccgggccgcgggtcaagctgcaactctgggacaccgcgggccacgagcgcttcaggtgcatcaccaggtccttttaccggaatgtggtgggtgtcctgctggtctttgatgtgacaacaggaagtcctttgaacacatccaagactggcaccaggaggtcatggccactcagggcccggacaaggtcatcttcctgctggttggccacaagagtgacctgcagagcacccgctgtgtctcagcccaggaggccgaggagctagctgcctccctgggcatggccttcgtggagacctcggttaaaaacaactgcaatgtggacctggcctttgacaccctcgctgatgctatccagcaggccctgcagcagggggacatcaagctagaagagggctgggggggtgtccggctcatccacaagacccaaatccccaggtcccccagcaggaagcagcactcaggcccatgccagtgttgactctaggagagaaagggttaaagcagtcccagccttagcccacctggtgggatggggagtgttaatatctctctggaggacaaatgacagaagggttcatataaacagtatcctgacacagtcatgcttcctggattttggagtcgaggctttctacagaaaagaaagttctgatggccaggcatggtggctcacgcctgtaatcctagcatttttggaggccaaggacagtggatcacctgaggtcaggggttcgagaccagcctggccaacatggtgaaaccctgtctctactaaaaatacaaattagccaggcgtggtggtgcatgcctgtaatcccagttactccagaggctaaggcagaaaaattgcttgaacctgggaggcagagattgcagtgagccaagactgcgccactgcactccagcctgggcaacagagtgagactctgtttcaaaaaaaaaaaaaaaaa

SEQ ID NO: 63 - DNA, 2493 bp, Homo sapiens
ggcggcgggggcggggcctggaggagcctacaccgactctggaggaagactggagcctttgcggcggcgctgcccctcccctggtccccgcgagctcggagggcccggctggtgctgcgggggccccgggaggttgaaaactaagcatggggaagagctgcaaggtggtcgtgtgtggccaggcgtctgtgggcaaaacttcaatcctggagcagcttctgtatgggaaccatgtagtgggttcggagatgatcgagacgcaggaggacatctacgtgggctccattgagacagaccggtgggtgcgagagcaggtgcgtttctatgacacccgggggctccgagatggggccgaactgccccgacactgcttctcttgcactgatggctacgtcctggtctatagcacagatagcagagagtcttttcagcgtgtggagctgctcaagaaggagattgacaaatccaaggacaagaaggaggtcaccatcgtggtccttggcaacaagtgtgacttacaggagcagcggcgtgtagacccagatgtggctcagcactgggccaagtcagagaaggtgaagctgtgggaggtgtcagtggcggaccggcgctccctcctggagccctttgtctacttggccagcaagatgacgcaaccccagagcaagtctgccttccccctcagccggaagaacaagggcagcggctccttggatggctgaagagctgccgttcctctttcacgatcccagccccatttcagtgtctggggctctggtagatgtgttgagggcaaagtagaggacaagctgtctttcccagtcagccagggagctccccgccaggccacgccccagccactttgctccctctcacctctgggaagtgcaaatactcttggttgacatccccttcctcagccctcccagcctactccccatcccagcttttagaggatctgctccactgtctcctggggcagctgtgggtcactgttcccttccagctgccccagacaggaagcagagtcaccacgcagcagtgtcccttcttgggtctgagttcctattataggtaggggccccaccctctgggcttcccatcagcgacacacacacacttatggcaccagcctggactccagaaaaagggtgtccaggtattgtgtgtatgcatttagatgtgcacacacaaatatgctcctatactgggattaggcgtgtcctcatccctcaccctgacctttctcctgtgcttttcttggctggaagaagttggcctcctgggagtgtagttttctgttttaaatcccccacccctggctgggctcagtggctcacccctgtaatcccagcactttgggaggccaaggcgggtcgattacttgaggtcaggagttcacgaccagcctggccaacattgtgaaaccccatctctgccaaaaatacaaaagttagccgggcgtagtggcacatgcctgtaatcccagctacccggggaggctgaggcaggagaattgcttgaactcagaaggcggaggctgcagtgagccgagatcgtgccactgcactccagcctggtcaacagagcaagactccatctcgaaaaaaaaaaaaaaaattccccacccctaccaattgttttacttcctcttcctgctcagggagcagatgggcctcactggttgagatggaatagaataactgggctatgagtcaccagcccactttgtgacccagcaagacctttcccctctctgggcatcagtttctcatctgtaagatgaccagagttgcttagatgatctcctagatcctttccagttctcttgatttcgtaaagccaatggcttctccctctttaaggtgctatgccaaccagccctggaggctgggatctgccgctccctccagccaccagggggcaggagtgcactacctgctgtcagtcaccagagtggccgctcagtgcccagcccgccagcctcgctcttggaggctgctctttatcctgcctgtggttttcagctcagagctggacttctatttataagttacctgtatttatatttatatgcccgctctcatggtgaaggctggacaaggtgctcctctggcccctccttcttacctcagatgcctgaacagaacaaggcaaacccgtagcagcctctcaggagctgacaggtcctctttcggggctcaggagggtgggcacacacccagcggcctgcagagtaagcttattacccacaactgtgcccgctttgtgcttctaaggtgcacacctagcctaggtgagacactgcagccaggcaaccaccgacacacgccccttctcaaagccagaggtgagtggggcaggtgcccggggctgggtgagtggaattaggacacacacaggcttgggcttcaagttcatttattgatgcattggttggacacaataaaaccacaattgttatcaaaaaaaaaaaaaaaaaaaaaaaaaaaa

SEQ ID NO: 64 - DNA, 3054 bp, Homo sapiens
tcgacccacgcgtccgcccacgcgtccgggaaaccctgtgcagggagcgccgccatcttggaccagcccgaggaagatactgagggagcacaggagcagtcaccgctgccactgctactgccgctactgctgccggcgcgtctgcacctctcggcctgccagtgtacctgccggcgcctcggtcgaccgcccccgccccctctcccgctgcgtccgcactcctgttcctggtcctgacgcccccctcccgcccggaaagctgcccagccaccagcaaccccccagtgccaccatggcaactgcaccatacaactactcttacatctttaaatatattattattggggacatgggagtaggaaaatcttgcttgcttcatcaatttacagaaaaaaaatttatggctgattgtcctcacacaattggtgttgaatttggtacaagaataatcgaagttagtggccaaaaaataaaactgcagatttgggatacggcaggacaggagcgattagggctgttacacggagctactacagaggagctgcgggagctcttatggtctatgatatcactagaagaagtacatataaccacttaagcagctggttgacagatgcaaggaatctcaccaatccaaatactgtaataattctcataggaaataaagcagatttggaggcacagagagatgttacatatgaagaagccaaacagtttgctgaagaaaatggcttattgttcctcgaagcgagtgcaaaaacgggagagaaggtagaagatgccttccttgaggctgccaagaaaatctatcagaacattcaggatggaagcttggatctgaatgctgctgagtctggtgtacaacacaaaccttcagccccgcagggaggccggctaaccagtgaaccccaaccccagagagaaggctgtggctgctagtgacctctttgctgtggcccctcatttgacctttcacctctgtctgttggaagcagtactttttactgcctcattgtcttctgtacatcttactgggtttaattaaaaaaaaagaaaaaactctgttgtaaaaacagtttaacacaatactaaactgctaaacaactagatgtaatcaggttatcaaaggcaagtagagtaataaatctctcctgcatggtaaatctagactttttttcccccttgtcctcgtgataagtatgtcaccaatatatgatttaaaccgagcactgatgctggacttcatgatttttaccctccctttggcaaggctttgtctcactgtacggtttaatttggtgatatcttaagcctttcttcccatccttaactgttcaagtatgtctgttgtaaccaataagtttattgctgtgaaattacttctgatggtagagaaggggttctataactgcttttgttttgttttggataaatttcctgttgtgtgggtggcatttttcttaacgagatttgcttctgtcttagcctcacacagggaaaatatccatttatcttctctctcgtgcttaattaatagctttatctttttttataccattttatccttttctctttaacagaaagtaaatatgtataaaatttgaaggaatcgaactaacaatacattctgtgtatattattttaatgaagaaaataaattgattactggcattggaacagtataaaataccagtttgtacagtatgacctatatgtgaccatgttactcccttccatttcacacaaagaaatagacacaactgcagttcacaagtagtactggctccaccccttggtgctggcagtgtttggggacattatgctggaaagagctcctagcatcagaggattaacactagcagattctgttccatctttgcactgttgcttacctgctgattttcttaactgttcttgtgcaatcgacaatgtgctaacctgcttttctctttttgtaaacgtttttgcattacaggctgcattcttgccttactgtatagaaaaagaaaaaaggctgggtttactattgcacattttaagcttttatacctttatcttcttggaatggtcagattctgaactggacagtcagaaccacaggtctgctgttaagggattttaaattgtgcatttttaaccctacagtgaaataacttaagatatccctgtgttcacagtgtgaggggctgttttatgtcatgttggcataaattgttttgtaaaagggaaagtgtttctaaaggtgtttcagcgcttgtgctgatacaaagtaagttattactttgcaccaggtggtttggccactgaattaatactgtatagcaagagaaacaatcttatttttttggacaacatgttttattaagttcttcatttctgttgattttttttattgcatttatgattcagtggctgggaattgagaatttatttgaaatagaataggtaacacctcagcgtactatagaaaatgcactcagctcaactgctgtgtttaaaatacacattttaaatccctctttacagacactaacataaaagtacatctttctgggttgtaaacatgtggtagtaccagagtattgtatagtcaatgttaaataaaagccaaaactggaatgtgcagaaagtaggctttggttaatttgtggattcatttttatttttgtctttaactttttaaaaaataagatttctggagtagattggtatattctgttaaagacttacagtgatccattttgcttacactgttgcatcacaagggactcacccagggaccatgacctgctggtgtgtgtgtatatttacaaaaacaaaacaaacaaaccacccattgggatataaggtagcaatcacaaactaaagactgcggcttgttgaggtgcaataccctgactcccaaagttagttacagtgggttttattgtttttgtgactgaaggatttattcagactgctgtactcttcatttgatgtaacaaaatgctattaatctaaatatttgtaaataaagtacctgtatctagattaaaaaaaaaaaaaaaaaaaaaa

SEQ ID NO: 65 - DNA, 840 bp, Homo sapiens
ccacgcgtccggaagatcggtagattgagtggctagagaggtcggaggtaagtggctatagaagtcgggcggacccggaacccagaggacgcgacaccatgacttatgcttatctcttcaagtatatcatcatcggagacacaggtgtggggaagtcatgtctcctcctgcagtttacagataagcggttccagcctgtccacgacctcacaataggtgtggagtttggagctcgtatggtcaacattgatggaaaacaaatcaaactgcaaatctgggatacgggtcttgctctgtcgcccaagctggagtgcagtggcaccatctccactcattgcaccctcaacctccccggctcaactagtcctcccacctcagcccctcaagtagctgggactgcagatgtgtgccatcacacctggctaattttttctattttttttagaggcgtggtttcaccatgttgcccaggctggtctcaaactcctgagctcaaatgatctgcccaccttggcctcccaaagtgctgggattataggcatgacccacggtgcccagcctgctgcttcagatttttttactggggatggccaaggatacctgagactgatatagacaagaccaaattgaactgctcactctttctagcttactggttcacaaactttggctcatgaactggaatgagatgaagtagagtgattttttttttttttttaatttagacagagtctcactctgttgcccaagattgcgccactgcactccagcccgggcaacagagcgagactccctctcaaaaaaaaaaaaaaaaaaaaaaaaaaaaaaaaaaaaaaaagg

SEQ ID NO: 66 - DNA, 1927 bp, Homo sapiens
ggcacgagaaaaaaactccattaaaaagcccagctttcctccatgttagatgtgacttggaaaatgagaaagatttagcaaaattccaccgtatcttttgccaggctagagacagggagagcagagtaaaaccctcaggctgctgaaatttctaggctgttaggaagcccctcgaattctgtgaaaatgagggtttcttaactcacactgagagcggaaaggggcagacccttttcataactccctcaagtgtgtgttacctttctttaccagcatggtaagcaacaggacatatcccagcctcggacatgtctgtatgatccaaggtacccaaagtcagacagagtaaactcaagcctggcactggctttctgccgcttcatgtgctttggaaaaagcaggagaagcaatagcagcaggagtccccagcagctggagccgcaagaatgaactgcaaagagggaactgacagcagctgcggctgcaggggcaacgacgagaagaagatgttgaagtgtgtggtggtgggggacgtgccgtggggaaaacctgcctgctgatgagctacgccaacgacgccttcccagaggaatacgtgcccactgtgtttgaccactatgcagttactgtgactgtgggaggcaagcaacacttgctcggactgtatgacaccgcgggacaggaggactacaaccagctgaggccactctcctaccccaacacggatgtgtttttgatctgcttctctgtcgtaaaccctgcctcttaccacaatgtccaggaggaatgggtccccgagctcaaggactgcatgcctcacgtgccttatgtcctcatagggacccagattgatctccgtgatgacccaaaaaccttggcccgtttgctgtatatgaaagagaaacctctcacttacgagcatggtgtgaagctcgcaaaagcgatcggagcacagtgctacttggaatgttcagctctgactcagaaaggtctcaaagcggtttttgatgaagcaatcctcaccattttccaccccaagaaaaagaagaaacgctgttctgagggtcacagctgctgttcaattatctgaggtttgtctgggacctgcctccaccccatccagggatgagaatggcagccaatctctgtggccaagctccagccaaaaaggagggcacgaccagaaaggaactccctttgcacggaggcttgccccatcaccctctgagccctcccaacacagcacactagtcagcccactgccacgacctccctgccagccagaagcatccgtactgcacgctgtctgagaatgctgggcctggattgcagacagtgccgctgctgatcgcatcaaaaacaaagtcaaaggccatctcacattttacaaatccccagctcatgaacgtgaagctgataggaaatcaccccagggaacccgaaaaagaaacttgattcctctattgctggccttacttgatgtcttttataaaacttgggactacaatactaacctttttttctgaatctgctgttctacccatgtgtctcacattcatttgtattatttcaagaaatgtactaatttccagttcactcaggccttactaatccataccaaattagcctaaagacaaggcattttatattcatttctattttcagcatgtttctaccaaagctattagaaccaacacgtacctctgaatgcccgattataagaagacatgagaagactttaaaagttttggaaatttacagagccatgatttttgaacctaattgaaagaaaaccatctgaattgttgcaggtccacatttttgccaaagatacactctatagatgcttagtagtggcctgatttttttccatgtattgccacgacaaactaaaaatgaactgtgtttaaaaaaaaaaaaaaaaaaa

SEQ ID NO: 67 - DNA, 3346 bp, Homo sapiens
  SITE (2787): n equals a,t,g, or c
  SITE (2795): n equals a,t,g, or c
ggcacgagctctacgctctttcccctccccctcctgtaacttcctcttcttccccggttgggccctctgctcctctgcactctcctccccagttcgcagatttccgcccaccttccgcctcgtctagccgcgccacagctagcggggtgatctttccccccctctggtaggagttggtgaaggtgagactcatgagggaatacaaggtagtggtgttagggagtggaggggttggcaaatctgcccttactgtgcagtttgtcactgggactttcattgagaaatatgaccccaccattgaagatttctaccgcaaagagatcgaagtggactcttccccctccgtgctggaaattctggacaccgcaggaactgagcagtttgcctccatgagagatctctacatcaaaaacggccaaggtttcatcctggtttatagcctggttaatcaacagtcttttcaggatatcaagccaatgagagatcaaattgtcagagtgaagagatatgaaaaagtcccactaatcctagtaggaaataaagtggatctggaaccagaaagagaggttatgtcttcagaaggcagagctctggctcaagaatggggctgtcctttcatggagacatcggcaaaaagtaaatcaatggtggatgaactttttgctgagatcgtcaggcaaatgaactattcatccctgccggagaagcaagatcagtgttgtacaacttgtgtcgtccagtaaagaagataacctcaatcatggccataccgagcagataaaactcagaggaaatttgcacagatgctgctttggagaactttacaacctgggttgcagaactgagccttggtaaacctgtctctattacagcatgttgccatacatctatttaagtgcataaggtctttggccttcaagatccatcgaccttaaacaggaatgcttagcacgtttaccatacgtttaaaatccattctttatcaatcagtccttttatagctttctaagttcttattgatggctaatatacaaggggtaatttttaatattttaaatgagttctttaatcagattctcgacttgtatttattaaatactcaaactcagtattacctactcaatgccttttaaaagaaagttataatggagaaaaaattgagccttaaacaaatgggtacttctgtatattacctcgtaccagagcttcatcctatttgtaaaatctttctcctttaaaattattggttaatactttgagactttgtttacgtgtggcagtgttgtaaaaagaaactaaagatcacattttacctgtatggatggaatatcccttttcttcaagtgcagtttgtgatgtgttttgtttttttttttttttttttgaattaacatgttctgaaggttacaattgatatttgaaattgactgtagagcatttagttgaagagttaagcattcagttccattaggttttcacatgtgttaatctcatttacagcattgaattgcggcagtaacattttcctttctgtgaagttctaaatttagttatgacctatttagcaatgcctttgaaaagggatattgtatccatggtaaattaattgtatacctaaacagagatagctcatctttgcctatcaggcttgtaattgacatctagtagacttctgcacatgtaaaattgaattcaaataaaatcatacacactttctagttcttaatatttgtctttctgaataatagtttaaagcaatatttgttaaagttttcttgcactatcacaattgctttttagttatttctcaagaagcatgttcgtattagagacaaaatctgtgtaacaggagggagaatagcgccaagtctctgggctattttttatttttgcaaatgtgctttctaatagccattgccttccatgttgtttacctaatcagcatatttttgtctgaatacttgaacattttaacagtaacgcaggtgtagaatcagaaaggaaacttatgcagagtaatattttggttcagttttaacatcgtgacaatgagggctttttctagcaatgatttttaaattgtgtaagtttgacagtattttattgttgggtttttatttgattttagttgtgtgcttttcatttgcagaagttagtaactgcagctcacctactgcaccaaagttctcgattttaggagcccagctttagtcatttgaacatgcttctaaataaaataaaacaaaaccaaaactatacttttgatctataataagagctcaataactttgtcaaggaaagctctaatatatgcagtgatggtttatgaaagggtgtggcaattttaaatttatattgtgtgtgatgttcaaataaagtggtatctacattcatgtgatttatgggtcagcatgaccattaattactgagtagaaattgactaaactttgatttcctttttttaaatcgtgttgcatttgattcctgagcaaattccctcaaagtgaactcttgttcttaaattttgaattttatggtgagattgtaaagatagaggcaattgaaacattgttccttatttatgaactgcttgaagtgaatacttaatttaagtttgcactttaataccaaacttaaaccaaacactcatttaaaagtaggttaagtgatcatggatcattgttattagctttgtggctttgtgaaattctaaaggaatcaataattcatcatgatttaaattttctagagattttgatttttttataatgtttctttcctgtagantgtgttcntgtttctctctctctctctctctctctctctctctctctctctctctcaaaattacagtgttcattgtcattgacctcagcagcaaatttgacttgaattcacttaggatcgcaggaatcaggggaaagtgattttaaaggtggtttctccagcacattttaagaaaagggaccaaaagttattttagcttcctcaatagattgcatgttgcttattaggataataaattaatattaaatgcaatatatgtcttgtctttattatggcatctatttaggagttgttcaaatcactgcagtagggctctgcaaataaaataatgtaacctattatcatggatctaatgtactgtaactttatcagtgaaaggtaaaatctcaaataacaagtacaaacattgaacaattacctataaagatttgtaaaagtaaaatttttccaatagatttcattcttgtcattttgtaagacgaccctgcagtccacctgtttgtaacttttttaataaaatagacatctgtattactgaaaaaaaaaaaaaaaaaaaaaa

SEQ ID NO: 68 - DNA, 1817 bp, Homo sapiens
ggcacgagccgcgggagtcgcggcgctgcgggtaggagccgggttgcgggagaccccaggttcggttgggattcccagccagaacggagcttaagccgggcaggcgagcgaatgacggagtagcgagctgcacggcggcgtgctgcgctgttgaggacgctgtcccgcgcgctcccaggccgccccgaggcttggggtcttcgaaggataatcggcgcccggggccgaacagcgggggcacacggggcgctgccgaagtgcaaggccacggccagagctcgagcccgacgcgctgtctggagtcgtaggttggcgccgtttggggtcggggtctgaggcttgggcgctgcctgggccgagcggagatcggggtttgcctcccgtccccgctcaggaccctgacgtggctgaagcggccccgggagcatgagcggcagcgcgtggacgtcaaggtggtgatgctgggcaaggagtacgtgggcaagactagcctggtggagcgctacgtgcacgaccgctttctggtggggccttatcagaacaccatcggggccgccttcgtggccaaggtgatgtcggtcggagaccggactgtgacattaggtatttgggacacagcaggctctgagcgctatgaggccatgagtagaatctactatcggggtgccaaggctgccatcgtctgctatgacctcacagacagcagcagttttgagcgagcaaagttctgggtgaaggaactgcgcagcctagaggagggctgccaaatctacttatgtggcaccaagagtgacctgctggaagaagaccggaggcgtcgacgtgtggacttccacgacgtccaggactatgcagacagtagctgctcctcagccctttggggggtgggggtgtgtggctgtctgggtggatcaaagaaaatagggactgccttggctgccagggcaaggtgctctaggaggtcttcctggcctccttgaactgtggggtccaggagactccctgaactgctagccctcccttttgtctgtttatctaattctcaggtatgaggctttagtcacttctctttacagatatcaaagctcagctctttgaaacatccagcaagacaggccagagtgtggacgagctcttccagaaagtggcagaggattacgtcagtgtggctgccttccaggtgatgacagaggacaagggcgtggatctgggccagaagccaaacccctacttctacagctgttgtcatcactgagtcagcactcacctggcctgggggaattaaaggaattccccgtaagggctggacccagctcctttctgggcttgggtagtcaaatgtctgagctaccccaggtcctcatgtcagcagagtggcgcctgcctgtgctggcccatggaacggagacagcattgggctgactgtgggcatgaggagggataaggctgatttggaccccaggcttctgccctggacagcacttgtgtctgcagattatttaagtggcttttgatctgtaaataaaatcagtgcactgtgcatcacacccagcccctttccctgctgtgtggattaggtgtcaagacacctagttcttcctggggccacccggctggcctcactgcttatattaaggctcctcccaactctcattttcctttggaaaacaagacttttttccccatggttaccgctgagatactggggctgtagtagtataaaagctcacagttccttctgagtgctgaaaagagtgcatgagttgcttcgaaataaaagggtcaagcattcctacctgaaaaaaaaaaaaaaaaaa

SEQ ID NO: 69 - DNA, 2479 bp, Homo sapiens
ggcacgagcaagctcgcaagcctgggaggcagcgcggcgggaggagcctgcccctgcccccagtagggggcgccgaagcgccgcactgcagcatcctggccgctgagcgcagcggccttggccgggctcagctcgcgtcctgccgcagtccctccgccgctagtcggagcgagcgcgagtgaggagacccccgccgggccactggcacttgcttctgcggcgagtcccacccacgaccgcagcccagcaactcgcaaacgcaacctgaagcctgggctgcgcagtgtgggagggcttcgcgatcttgggggacccattccgaacttgcagaggaccgtagctctcctggcctggagagtgtgaacaggattgtggactcttccaagattcacaatgatatggtgaatccaaagactggaaccaaaaagatttactcagtgctttagttttaacaacagtaaattgtctaccaacacccatcatggctaaaagtgcggaggtcaaactggcaatatttgggagagcaggcgtgggcaagtcagctcttgtagtgagatttctgaccaaacggttcatctgggaatatgatcccaccctcgaatcaacctaccgacaccaagcaaccatcgatgatgaagttgtttccatggagatactagacactgctggtcaggaagataccattcagagggaggggcacatgcgatggggggaaggctttgtgctggtctacgacattactgaccgaggaagttttgaggaagtgctgccacttaagaacatcctagatgagatcaaaaagcccaagaatgtgactctcatcttggttggaaacaaagctgacttggaccactccaggcaggttagcacagaagaaggagagaagctggccacagaattggcttgtgctttttacgagtgctctgcctgcactggagaagggaacatcacagagatattctatgaattgtgtcgagaggtgcgtcgccggaggatggtgcagggcaagacgaggcgacgcagctccaccacgcatgtcaagcaagccattaacaagatgctcaccaaaatcagtagttaggcagcccagctgaggtggaccaactaattggaaacactcttccccttctgttcccctttcaaaaataaaacaaaatattgcattctttgtttggattctgagaaatgtctgggcttcccattgtttctggcctctaataggttgggaagttttagcgtgttttatgcaatttcagtgctaacaatttcttcctttcctgcttgaataagatacactctaatggcatttgaacatgtaatcaccagagattctgaaatgactggtttatgttaagctatttttaggcatcttcaccttgctttaagtaggttgaagtttttgcaaaggcatttaaaaattcaatttcttgtcagatactacaaataattttcttaaaagtctaagatagcagaaaatacagtaaaaacacaggagaagaagctgagctattggaacaggaaatagaaggaactctagtttctgtttgaagtgaggattttctgaattatctaatatcatctaggttttctttaaaattttattttgttcttcagttcaagcatcttctcactaatgtttttcactataacagagaattcatttcaatttgagttggttctctcaatgatctattgatcattacaccctaactctccttccttggctcaaacaatattttccctataacaaaggcaataggacacaaaattacatcctgctgggccttttttcatcaagtcagggtgatataaaaacattggaagtcttttcaccaaaccctgactttattgaatgctagtagaagatgtagaattagagacatctgatttgtttatcaccttagcagaaaaaccacagtccaaaagacaagcaaattaagaatggagcttaaccatgcctccattgggaagtctagactttgagccaggtacagtaagaaaaattagcctctgattcattaagtttgccacatgacttattttgatattttggatacattaactcacttaggagaattcagaaaagaatgggtgattaaagttcattacagctgaataaatgtgtctaaaacagactcttgtattctgaaagtacagtctacaactgataaaaccttatgattcttttctcccccattatgcccctatatatatcaagatttgggtactttattttagtagaaaatatatatcttttacatatgtatgtatttataaatgcatagatatatgtataaaaatttgtaagcgttagcggcattaattcaccaatgcatttggacaacttgatgtaactgactttattttatgtgactataataaaaagcataattttctcaaaaaaaaaaaaaaaaaactcgagggggggccccrgtacccwattcgccctaatagtgagtcgtattacataaacaaggcc

SEQ ID NO: 70 - DNA, 817 bp, Homo sapiens
  SITE (605): n equals a,t,g, or c
  SITE (641): n equals a,t,g, or c
gttgggtaccggggccccccctcgagttttttttttttttttttgkkaawtstaactttwttcttatmcaatttgcagaatagatttgaaatgattgctataggttttaatgttgataagaactggactataatacaactgaaatgcagttgagctgagcaagtacatttaaaaatgaagtcacagacatgatttttctatacatttttttgtttgaagaaaattatgataaagtcagcaagcagtcacagatgaaagaacaaataaaataggtggcttggatagttaagatgagaaacaaaaatatctgtttagagttaaaaatggacagagtggtttattttgcagcaagaagagaaaacggggtagtggatggcaactgatggaacaggagaatgctcagcagcatttgctcttccagcctgtcacgcctcctccactgctgatatctacattttcactgttgggctcttttacaggggtctttcgaaggatatcttcagctaacgtgaggaacgccttttcgatgtttatatttgcttttgcactagtctcaaaaaacctaataccatgctcccttgcaatctgttctccttttcctttangtacaactcttttgtcgtccatatcacacttgtttnctagtaacattctttccacatcttcattggcatgctcatctatgtttctaagccatttgctgatgttttcaaaccttttaccattggtgatggcatatactagcatgatacccatgcgcctctgtataggaaggtgtgatggtgtgaaatcgctcctgggcctgctgatcccatat

SEQ ID NO: 71 - DNA, 2623 bp, Homo sapiens
ccacgcgtccgatgacgggcacgccaggcgccgttgccacccgggatggcgaggcccccgagcgctccccgccctgcagtccgagctacgacctcacgggcaaggtgatgcttctgggagacacaggcgtcggcaaaacatgtttcctgatccaattcaaagacggggccttcctgtccggaaccttcatagccaccgtcggcatagacttcagcaacaaggtggtgactgtggatggcgtgagagtgaagctgcagatctgggacaccgctgggcaggaacggttccgaagcgtcacccatgcttattacagagatgctcaggccttgcttctgctgtatgacatcaccaacaaatcttctttcgacaacatcagggcctggctcactgagattcatgagtatgcccagagggacgtggtgatcatgctgctaggcaacaaggcggatatgagcagcgaaagagtgatccgttccgaagacggagagaccttggccagggagtacggtgttcccttcctggagaccagcgccaagactggcatgaatgtggagttagcctttctggccatcgccaaggaactgaaataccgggccgggcatcaggcggatgagcccagcttccagatccgagactatgtagagtcccagaagaagcgctccagctgctgctccttcatgtgaatcccagggggcagagaggaggctctggaggcacacaggatgcagccttccccctcccaggcctggcttattccaagaggctgagccaatggggagaaagatggaggactcactgcacagccgcttcctagcagggagctatactccaactcctacttgagttcctgcggtctccccgcatccacagggagggtaaaacacttagcttttattttaatagtacataatttaataccaaaaaaggcgcctggatccccaaaaaaccgaggctgggagctagtggcccttttgctttctaggacttggggggccggccctccctcctaagcataacaaaggtggtgttgctccagctcagccccaggggacacagatgcactttgggggtgagggcaggtaatgactccatcgcaccctcagttcagctggacagaggctcaggtgaccccagccttcactgtctcccgctctccaggagcttatcttcgccccatctcccaaataagtgggcccttgtgctgtgaggaagaccaaagcctcagggaagataagagatatggagatgggagggggaggacaaggggcagagagtagggtctagctggctatctctggccttactaacaccccccctggaggcatgccccttttctccagcacacaagcacattggggcacctggaaatattggttccaggctcctgttctctggacttcagatcctgggggagcccctcccccccctgaatccctggcttagctaccttcctgcctgtgcacctaaaaacctcaggtcagaactaggaaaagagttttgtttttatttttttgaaatggagtctcgttctgtcgcccaggctgaggtgcagtagtgcaatctccgctcactacaacctccactccctggggctcaagcgatcctcccacctcagcccccgaagtagctgggactataggtgtgtaccatcacacctggctaatttttgtattttttgtagacacagggtttcgccatgttgcccaggctggtcttgaattcctgagctcaagcaacctgccggcctcggcctcccaaagtactgggattacacgcagaaggcaccatgcccaggctagatgtgtcttatcccaatcctttggcaggcatgcagctccacaggcgatttcttcaagcagctgaagtgtttagccctcctgggttaagagccagataaggagaaatccctttcctaggtttggaatgtgttgtgaaaaaaaaagagaaatccctggctcctggagctggtgggagacaagattaagcaaacctcccctgacatgtatccctttgaccccaagctctgcctcctccctgaccacccatgccctttcctttaacttctcaaacagataccagggcctaaactgctttacctcccctcctactgagtcaggttaggtggtgggaggtcacccatttccgagttaaaccaatgcaatatgagtaaaacaaagtcatgtgggtatgtctggggtagagagaggggtagcaagttcatgtgtcctccttggtcacatatctcccaaagctccgatccctgccatgggaagtggacaggaaacatgaggtcatgacctgcaggcatctttactgcagctctgccggcctggaggaggagagggggaggaagaagtatgcgctgcacatttctgaggctactgcatttgctttcaaggcagaaatcttgctctgagcagtcagcggctccagtttgggcccgataaggaagttctccgtggcctccctcaggcagagcagggaggaggctgacattgccagtctcttctggggcccaaggcaggttgcaggagatccaatcccatagacagctctgggcctcttgcatttgagtttttcagaattaaactgcagtattttggaaagcaaaaaaaaaaaaaaa

SEQ ID NO: 72 - DNA, 1069 bp, Homo sapiens
gcacgagccgctttgcacgggcacaaagacttccacccccgcgtcacctgcgcctgccaggagcaccggacaggcaccgtgggatttaagatctccaaggtcattgtggtgggggacctgtcggtggggaagacttgcctcattaataggttctgcaaagacacctttgataagaattacaaggccaccattggagtggacttcgagatggaacgatttgaggtgctgggcattcccttcagtttgcagctttgggataccgctgggcaggagaggttcaaatgcattgcatcaacctactatagaggagctcaagccatcatcattgtcttcaacctgaatgatgtggcatctctggaacataccaagcagtggctggccgatgccctgaaggagaatgacccttccagtgtgcttctcttccttacccctgctcagtatgcgctgatggagaaagacgccctccaggtggcccaggagatgaaggctgagtactgggcagtctcatctctcactggtgagaatgtccgagaattcttcttccgtgtggcagcactgacctttgaggccaatgtgctggctgagctggagaaatcgggggctcgacgcattggggatgttgtccgcatcaacagtgatgacagcaacctctacctaactgccagcaagaagaagcccacatgttgcccatgagggctgaggagactgttcagagactgcccagccctagggcactgtgccaccctcattcctccagagcttgacccctggacatttgcactgactttatccagaccaaagagctgcctcttggtggcagtattcccacagaggggtagctgggatcatgctagtcacttcctgcccccaggcaccgtgccaaagactggatgccccctactcctcaggggactgtccagggcgcccagtggtagtgagggagagtgtctctgttcttttgctcagcctgctgggccctttgtgtttgaggatgcttaatgattccagcctctcactgtgccttatgcattaaaatttctttgttacgagcaaaaaaaaaaaaaaaaaa

SEQ ID NO: 73 - DNA, 974 bp, Homo sapiens
  SITE (717): n equals a,t,g, or c
gcggcggcggcggctcccggaaggccgcggcggcgtcccggctgctaaggcgggccccacgcggctggcagcggacaggccggacctacggccggaggacgggcggcagccgcctctgcgcggaccggggctgggccgtgcggcggcagcggcgccaggggatgctcttgctgggcctggcctctcccttctcaacttagggcggcggcgggcccgcgcccctggctcccgggccatggcgctgagggagctcaaagtgtgtctgctcggggatacaggtgtaggtaaatcgagtattgtgtggcggtttgtggaagacagttttgatccaaacatcaacccaacaataggggcatcttttatgaccaagactgtccagtaccaaaatgagctacataaattcctaatctgggatacagctggacaagaacgatttcgtgccttagcaccaatgtactatcgagggtcggctgcagctataatcgtttatgatatcacaaaagaagagacattttcaacattaaagaattgggtgaaagagcttcgacagcatggcccacctaatattgtagttgccattgcaggaaataaatgtgatcttatcgatgtaagagaagtcatggagagagatgcaaaggactacgccgactctattcatgcaatttttgtagagaccagcgcaaaaaacgcgataaacataaatgaactctttatagnaattagtgagkatcyctgtgccttatccatttcctctgtaaaagccgcttaacacagaatgatcttcctggttagaattcctgtcttacttagagcagtctagtctctgatattgtgatcagtgaaatgaagttggagaaggtaagagtaatgtccagttttcatatcatgttatagttgctgaagagctgccgcccttctggaaaagtgttgcctactggaataaataatgcacagggtactgaggtcatgaaagt

SEQ ID NO: 74 - DNA, 915 bp, Homo sapiens
  SITE (769): n equals a,t,g, or c
  SITE (884): n equals a,t,g, or c
  SITE (909): n equals a,t,g, or c
gaacaaagaagttaaatattggtgggaaaagagtaaaccttgccatatgggatacggcaggtcaagagagattccatgcattgggtccaatttactacagagattcaaatggagcgattttagtttatgacataacagatgaagattcttttcagaaggtaaaaaactgggtcaaagaattacggaaaatgttgggaaatgaaatctgtttatgtatagttggtaataaaatagacttggaaaaggagagacatgtttccattcaagaagcagagtcgtatgcagaatctgtgggagcaaaacattatcatacttcagccaaacagaacaaaggaattgaggaactctttcttgacctttgtaaaaggatgatagaaacagcacaagtggatgagagagcaaaaggcaatggctctagtcagccgggaactgcaaggcgaggtgtacagattattgatgatgaacctcaagcccagaccagtggtggagggtgctgttcttctggataactgttcacgcctaagaaattaaaagacagaacaaaactgtggatcattgccctcaacatgaagactgccatattccaagtcacattattttaccaatggaattatagaattaacagtattttaaattacgtttataacactgcagagaccttaagtgctaaacttagtggagtttgtgaccagagaattggcattttctacaaatgtttttttttgttttttttttgktttttttttgtttttttttgagacggagccgnctctgtcacccaggctggagtgcactggcttgatctcggctcactgcaagctccacctcccaggttcacgccattctcctgcctcagcctcccgagtagctgggactataggcgnccaccacgacgccgggtaatttttngaattt

SEQ ID NO: 75 - DNA, 964 bp, Homo sapiens
  SITE (806): n equals a,t,g, or c
  SITE (898): n equals a,t,g, or c
  SITE (918): n equals a,t,g, or c
  SITE (924): n equals a,t,g, or c
  SITE (952): n equals a,t,g, or c
  SITE (959): n equals a,t,g, or c
ggtgggacacagctggtcaggagcggttccgcagtgttacccatgcctactaccgggatgctcatgctctgctgctgctctacgatgtcaccaacaaggcctcctttgacaacatccaggcctggctgaccgagatccacgagtacgcccagcacgacgtggcgctcatgctgctggggaacaaggtggactctgcccatgagcgtgtggtgaagagggaggacggggagaagctggccaaggagtatggactgcccttcatggagaccagcgccaagacgggcctcaacgtggacttggccttcacagccatagcaaaggagttgaagcagcgctccatgaaggctcccagcgagccgcgcttccggctgcatgattacgttaagagggagggtcgaggggcctcctgctgccgcccttgaacctggctgagctcagtcctctggaggaagccgcccagtccctagaaggctggacagagggtctccaggcccttctgactttgttgcccagtggccaacgcccgagtgtctgttttcaggagccccaggtcaagccttgtcccttcctcctcccagcaacagtcccaacaagcaggcttctgagagcccgtggccgcacactggccgccacggaaaagcagtcttctgcacgggacggggagcggcaagtggacagactttgccamggtgctctgctgcccctcctgggcacgtccaggtgagggagggctggggctggcaccacgcacagtgcctaaccctagaaaagccatgtcttcagcccgacatgcttaggcagcttanggaggacgcctgcccacgcctgggacagaagcttcactgctaatcacatcgggcattttgtgtcctgggacttgctgttccgggccaccttntaggagctctggttaacagnataggncttcttactgaccttgaagatcctgggncttgganaaaag

SEQ ID NO: 76 - DNA, 627 bp, Homo sapiens
  SITE (455): n equals a,t,g, or c
  SITE (588): n equals a,t,g, or c
  SITE (611): n equals a,t,g, or c
  SITE (624): n equals a,t,g, or c
gatccgggtggctgcaggctgctggcttctgcggctgcggggtcggggtcgcggccagggccaagccgcagcgagttcacaggcggaacccctgcaggcggcgccccctacgcgaggtcacccctgggaaggagcgcagcccacccggcccctccgcatccgagcaggacgcccgtctcctctccctgaggatttcaggtctccctgtcccaggaggcttgtgccaagatggcatcagctggagacacccaggcaggcccacgggatgcagcagatcagaacttcgactatatgttcaaactgctactgataggcaacagcagtgtgggcaagacttccttcctgttccgatacgcggacgactccttcactcccgccttcgtcagtactgtgggcatcgatttcaaggtcaagaccgtctaccgccatgacaagaggatcaagctgcagatctngggacacagcgggccaggagcgctaccgcaccatcaccacggcctactaccggggagccagggcttcctgctcatgtatgacatcgccaatcaggaatcctttgccgctgtgcaggatggggccacgcaaatnaagaccttactcctggggacaangcccagttcatcnggt

SEQ ID NO: 77 - DNA, 1364 bp, Homo sapiens
ggcacgagcgctagtgcccagcgcgccgccgccagtgctgcgggctccgggcaatggatgcccccggggccctggcccagaccgccgcccccggtccgggcaggaaggagctgaagatcgtgatcgtgggcgacggcggctgcggcaagacctcgctgctcatggtgtacagccagggctccttccccgagcactacgccccatcggtgttcgagaagtacacggtcagcgtgaccgttggcagcaaggaggtgaccctgaacctctacgacacggccgggcaagaagactatgaccggctgcggcccctgtcctaccagaacacccacctcgtgctcatctgctatgacgtcatgaatcccaccagctacgacaacgtcctcatcaagtggttccctgaggtcacgcatttctgccgcgggatccccatggtgctcatcggctgcaagacagacctgaggaaggacaaggagcagctgcggaagctccgggccgcccagctggagcccatcacctacatgcagggcctgagcgcctgcgaacagatccgagctgctctctacctggaatgttccgccaagtttcgggagaatgtggaggacgtcttccgggaggccgccaaggtggctctcagcgctctgaagaaggcgcaacggcagaagaagcgccggctctgcctgctgctctgacccagggcagacagacctcacgacagcactgacagggcccgggggcccaggtgccgattgcaccagggaggctgccccatcccgaccctccagctcatggtgtctggggcctgcggctagactcttggaacattctggaactctctcctttcctggctggggctctgaccacaaactcccctccaggctgcccctgggacatggtggtgatgtgggtgcaggagccagtgtctgttgtcgggactcgcaagtgccctcatcacagccacccccaccacgagtgtctccccagtgcagactcaagttatgcttgaaatgaaaaagtctatctggtagtgggtaaacgtagacctggcactgttccacgcgggcgccccaagcctgccactcctgtgtccctgcctccctgggctcccgagataggcaccactgtatcctccagctccttccttccttcccccaggaacacggaggccaccgagggggctgggcctatcaggaggacacaggctgcagcctggcacccacccctcccatctccaccccacatggaagacttgtcttcaacttggccactgtctttgcagagctgggcacatgtgcccagggggcagaaaaaatggcttctcagttgttaaaagtataccctggaccaccaaaaaaaaaaaaaaaaaa

SEQ ID NO: 78 - DNA, 792 bp, Homo sapiens
  SITE (8): n equals a,t,g, or c
  SITE (9): n equals a,t,g, or c
  SITE (717): n equals a,t,g, or c
  SITE (724): n equals a,t,g, or c
  SITE (751): n equals a,t,g, or c
gcttcatnnggaataaccgaacaaaagctggagctccaccgcggtggcggccgctctagaactagtggatcccccgggctgcaggaattcggcacgaggatcagagggaagtcaatgaacggcaagctcgggaactggctgacaaatatggcataccatattttgaaacaagtgcagcaactggacagaatgtggagaaagctgtagaaacccttttggacttaatcatgaagcgaatggaacagtgtgtggagaagacacaaatccctgatactgtcaatggtggaaattctggaaacttggatggggaaaagccaccagagaagaaatgtatctgctagactctacatagaaactgaacatcaagaaccccaccaaaatattacttttaaaaacaatgacaaaccacacaattgttgttgagtaaaccacgcacaatggcatgtctttctttttctgccagaaaatctattttaagaaaccagaatagtcaacagtgttcaaaagaattgactagttatccctgaggccctttcaaacatgatcaaagatttcccaatgtgatctcatcatcakggatactcaatttgytttttcttatagagaaaatgagtatataagacaatatacaagaagaaatatcagtgagttttaaatcagaacaagttacctgtcacattgragaaaagggtaggcactwaagggrgracacagaangaagaanttctaaaatattggatttacttcttanattgagtcagatgcatacttttagatttgcaatgggggaaa

SEQ ID NO: 79 - DNA, 1089 bp, Homo sapiens
ccacgcgtccgtctctccctgtgggtatccctgattttggctccatctggtcagacttcctcttcaaattcctggtgattggcagtgcaggaactggcaaatcatgtctccttcatcagttcattgagaataagttcaaacaggactccaaccacacaatcggcgtggagtttggatcccgggtggtcaacgtgggtgggaagactgtgaagctacagatttgggacacggctggccaggagcggtttcggtcagtgacgcggagttattaccgaggggcggctggagccctgctggtgtacgacatcaccagccgggagacatacaactcactggctgcctggctgacggatgcccgcaccctggccagccccaacatcgtggtcatcctctgtggcaacaagaaggacctggaccctgagcgggaggtcactttcctggaggcctcccgctttgcccaggagaatgagctgatgttcctggagaccagcgctctcacaggcgagaacgtggaggaggcgttcctcaagtgtgcccgcactatcctcaacaagattgactcaggcgagctagacccggagaggatgggctctggcattcagtacggggatgcgtccctccgccagcttcggcagcctcggagtgcccaggccgtggcccctcagccgtgtggctgctgagctctgtggagccagctcacctgttctccaggaccagccctgctggggcccaggcccaggctctgagaggccgtgtcctaacctgccctggccccggagaagctacgttgccacctgtcccccttccctggcctggtggggcctggctttggggcaagactgagccacgggggaagggggaatcccgtacctgctgctgcttcctctgtcttggctaacgtctgtccccctgaacccctaaccataccccaagagctcccaaagcctgagaccagggtcatttgtccccaactccccatctggccctgctgttgctagtacctgttatttattacctggaggcctgtccagcacccaccctacccccataaagcattgtttaccaaaaaaaaaaaaaaaaaaaaaaaaa

SEQ ID NO: 80 - DNA, 2603 bp, Homo sapiens
ggcacgagccggctcccccatcccccggttcggaccgccgagcgccggctctcccctccctgagcaccgatcccaagttccagctagagaaggtgggcggcagcgccagcccggcgccccctcccagctcccagcgatttgagagggaagatctgatctcctagaattagagttggtacagaaaccatttcagctccaaaaatgttggaggaagatatggaagtcgccataaagatggtggttgtagggaatggagcagttggaaaatcaagtatgattcagcgatattgcaaaggcatttttacaaaagactacaagaaaaccattggagttgattttttggagcgacaaattcaagttaatgatgaagatgtcagactaatgttatgggacactgcaggtcaggaggaatttgatgcaattacaaaggcctactatcgaggagcccaggcttgtgtgctcgtgttctctaccacagatagggaatcttttgaagcagtttccagttggagagagaaagtagtagccgaagtgggagatataccaactgtacttgtgcaaaacaagattgatcttctggatgattcttgtataaagaatgagaagctgaggcactggcaaaaaggttaaagttaagattctacagaacatcagtgaaagaagatctaaatgtgaatgaagtttttaagtatttggctgaaaaataccttcagaaactcaaacaacaaatagctgaggatccagaactaacgcattcaagtagtaacaagattggtgtctttaatacatctggtggaagtcactccggtcagaattcaggtaccctcaatggtggagatgtcatcaatcttagacccaacaaacaaaggaccaagaaaaacagaaatccttttagcagctgtagcataccctaagatgttttgggaggaaaacaattgaattacattgtgcaatgcattaagaaacccatccagctgtcatggtatgttacaaggttttcagcagactttgctcctaatggctctctgaaagtgacagacttaaatattgctctgcagtgcttttcagaatgtagagtgagacctctggtggaaaaattattgccctgtggactcctttaattttttttacattagacgaagcttctcctgtttgtaaaggaatgctataagaaatttcaaacacaggttttgcggaattttaaatgctggaaaacataaatgaaatgcctaaatatattgttacagattttaatactgtggatcaaggaaagatagcaagcattcttttcctgaaattggtcatgtagcttttctgcgaaatagtattgaatctgaatactttcacaaaataatactgaaaggtaaaccctaaatcttgccagactgcattagtattttggcattgaaacttgtgcaatatctgtgtaatgtagaatgtggggtgtgcatgcagatgtctggtactggagtaagctgaaggtatgtgcagtatttaagaaaatgtacattctaattaattcacttataaaaccatttacatattgtgtatatgtttttattttcaaatgataaactctagacatatattttgcaaaatgagcttgggtttaaaaagtgctttgtgccaaaaatatcatacctaatttttatagtgctttactatcagaatttatattgtttattatatcttttaaaagcagtaagcagttttcatctgacagcgtagataaaagaggagtataggaatttgaatgctagagcatctcccaggtgagccttattgcagatctttttgatatagtcacccataagcatggtgagctcctgctctcataaggtcagccaaagccccttaagaaggtacacagcacatctgcagtcattcaggaggtcctgtgaagtgtggtgatgcatctaacaccttttgctgctcactgagaacccagctttgaacttacaagattacactaaccatttttaaagtgcacaaaaatattattattagtcttaactaaaattacatattttataatgccctgcaactctaaaccatccttttgtttacacatttttgtatggtattttaagattatcaatcacttcaacatttctataaccttgtttgtatagcactttctcaagagctgtcagtcccacatacagaatcatttcttttacaaaatgatttaatatgtaatcatgtgtcaggacataaattttgtcacttgggacagtagctttccagctaagataattgcgtgaactctgttaaaactgattatcactcatcaatggctttatttttaacctataaataacccctttcaatatacctggtttttacagcattgcaaaatctgtaaaaataacttttattggaaaatgtcatgaagtcatttttcattatttgtactaaacaatgttttatgtactccttttgtgttttatcttttgtttttccatctgtactcccctcatcctcctaatgttgagaaaatcaaatttcctgggtgtgtccttgttaagtgatcaaaagtaaatgttctctttgccattttagatggaaaaataaaaaaaattaaaaagtaaaaaaaaaaaaaa

SEQ ID NO: 81 - DNA, 493 bp, Homo sapiens
gcgtcgacccccacctgccagagctgatcctccctaggccctgcctaaccttgagttggcccccaatccctctggctgcagaagtccccttacccccaatgagaggaggggcaggaccagatcttttgagagctgagggttgagggcattgagccaacacacagatttgtcgcctctgtccccgaagacacctgcaccctccatgcggrccaaggatggggaatggaactgaggaagattataactttgtcttcaagggtactatcgtggtgcagtgggggccctcctggtgtttgacctaaccaagcaccagacctatgctgtggtggagcgatggctgaaggagctctatgaccatgctgaagccacgatcgtcgtcatgctcgtgggtaacaaaagtgacctyagccargcccgggaagtgccactgaggragcccgaatkttcgctgaaacaatggactgctctgctggagacctaagcctggactcta

SEQ ID NO: 82 - DNA, 425 bp, Homo sapiens
  SITE (379): n equals a,t,g, or c
  SITE (391): n equals a,t,g, or c
  SITE (399): n equals a,t,g, or c
gcgcgggggaggagtgccgggcacgcgcctcctcgccaccctcgccgggcttttcccaggctcgccctcctccccacgccccctgctcgggctgcagttcctataggaagggcattaccatcccttccccaccctccccractctacgstctttcccctccccctcctgtaacttcctcttcttccccggttgggccctctgctcctctgcactctcctccccagttcgcagatttccgcccaccttccgcctcgtctagccgcgccacagctagcggggtgatctttccccccctctggtaggagttggtgaagatttctaccgcaaagagatcgaagtggactcttccccttccgtggttggaaatctggacaacgnagaactgagcantttgcctncatgagagattttaacatcaaaaagg

SEQ ID NO: 83 - DNA, 1728 bp, Homo sapiens
ctcgtgccgctggatttggctttctgtcgctctctctacagggtacaggtgaaagggggcagacccctcatcatgctttccaggcatctgccacttcccaggaattgtctccctggataaacaaggcgaagtccctggctgtgcagaagcagtagctgtgtggtggcacagtcaggaaaactcgggggccctgttggtattttctacccctgacccgtgtgcatacttctgtcgtagctctcaccacagtagactctgctatcattgtgtcttccatcctctgaaccctgtgcaaggtctgctcatggtgaatgcccagtaaggctcacctattgctgctatctcatcatcatatcatttctatgtgcccccctagctaagagtctggactgtggttacattctcaggaatgtttgcaaagtcatatttaggtgtgaggagagtaaaacagagctagacataatgttgcacacagcctttggcactggatgcctggtgaatgtcttgtgcaaatgggtaacgtgaggagcagcatttggggtgcgcaggacttaactatttgtgtataacatattattgatgcctgtgtgtcatactctgctactccaagtctagtagtcaattgcataccatatctcagtctggcactgagggaagcagtctggagggaggtacagctggagatttggttgaggggacttatctctgacaacagcctcttgttgatcttcccagacagtgacaataccctcccctcccttgggctggacccctctctacagctaggagccaatggcagaagacaaaaccaaaccgagtgagttggaccaagggaagtatgatgctgatgacaacgtgaagatcatctgcctgggagacagcgcagtgggcaaatccaaactcatggagagatttctcatggatggctttcagccacagcagctgtccacgtacgccctgaccctgtacaagcacacagccacggtagatggaaggaccatccttgtggacttttgggacacggcaggccaggagcggttccagagcatgcatgcctcctactaccacaaggcccacgcctgcatcatggtgtttgatgtacagaggaaagtcacctataggaacctgagcacctggtatacagagcttcgggagttcaggccagagatcccatgcatcgtggtggccaataaaattgatggtggggccatccctgcacctgggtgttagcaattcactggggacctgccctcatacatttcctcctccattccccgggcaggcaaccttcagtgattggtcctccctcccacgataagatacaacccttggttggttgcttgcattcttcccaccttataaagaagccagctaagccgacctgccctctttccaagacacagatccctattaactgagctctttctaggacctgtttcccaatcatccctgcctatcccactttctggaatgaaggcctccagtggcccccccctccaaaccttcttcccttcccttgacagacagaccaatgtcctaccttctctctacagcagacataaacgtgacccaaaaaagcttcaattttgccaagaagttctccctgcccctgtatttcgtctcggctgctgatggtaccaatgttgtgaagctcttcaatgatgcaattcgattagctgtgtcttacaaacagaactcccaggactcatggatgaatttttacaggag

SEQ ID NO: 84 - DNA, 2418 bp, Homo sapiens
gcaagctcgcaagcctgggaggcagcgcggcgggaggagcctgcccctgcccccagtagggggcgccgaagcgccgcactgcagcatcctggccgctgagcgcagcggccttggccgggctcagctcgcgtcctgccgcagtccctccgccgctagtcggagcgagcgcgagtgaggagacccccgccgggccactggcacttgcttctgcggcgagtcccacccacgaccgcagcccagcaactcgcaaacgcaacctgaagcctgggctgcgcagtgtgggagggcttcgcgatcttgggggacccattccgaacttgcagaggaccgtagctctcctggcctggagagtgtgaacaggattgtggactcttccaagattcacaatgatatggtgaatccaaagactggaaccaaaaagatttactcagtgctttagttttaacaacagtaaattgtctaccaacacccatcatggctaaaagtgcggaggtcaaactggcaatatttgggagagcaggcgtgggcaagtcagctcttgtagtgagatttctgaccaaacggttcatctgggaatatgatcccaccctcgaatcaacctaccgacaccaagcaaccatcgatgatgaagttgtttccatggagatactagacactgctggtcaggaagataccattcagagggaggggcacatgcgatggggggaaggctttgtgctggtctacgacattactgaccgaggaagttttgaggaagtgctgccacttaagaacatcctagatgagatcaaaaagcccaagaatgtgactctcatcttggttggaaacaaagctgacttggaccactccaggcaggttagcacagaagaaggagagaagctggccacagaattggcttgtgctttttacgagtgctctgcctgcactggagaagggaacatcacagagatattctatgaattgtgtcgagaggtgcgtcgccggaggatggtgcagggcaagacgaggcgacgcagctccaccacgcatgtcaagcaagccattaacaagatgctcaccaaaatcagtagttaggcagcccagctgaggtggaccaactaattggaaacactcttccccttctgttcccctttcaaaaataaaacaaaatattgcattctttgtttggattctgagaaatgtctgggcttcccattgtttctggcctctaataggttgggaagttttagcgtgttttatgcaatttcagtgctaacaatttcttcctttcctgcttgaataagatacactctaatggcatttgaacatgtaatcaccagagattctgaaatgactggtttatgttaagctatttttaggcatcttcaccttgctttaagtaggttgaagtttttgcaaaggcatttaaaaattcaatttcttgtcagatactacaaataattttcttaaaagtctaagatagcagaaaatacagtaaaaacacaggagaagaagctgagctattggaacaggaaatagaaggaactctagtttctgtttgaagtgaggattttctgaattatctaatatcatctaggttttctttaaaattttattttgttcttcagttcaagcatcttctcactaatgtttttcactataacagagaattcatttcaatttgagttggttctctcaatgatctattgatcattacaccctaactctccttccttggctcaaacaatattttccctataacaaaggcaataggacacaaaattcacatcctgctgggccttttttcatcaagtcagggtgatataaaaacattggaagtcttttcaccaaaccctgactttattgaatgctagtagaagatgtagaattagagacatctgatttgtttatcaccttagcagaaaaaccacagtccaaaagacaagcaaattaagaatggagcttaaccatgcctccattgggaagtctagactttgagccaggtacagtaagaaaaattagcctctgattcattaagtttgccacatgacttattttgatattttggatacattaactcacttaggagaattcagaaaagaatgggtgattaaagttcattacagctgaataaatgtgtctaaaacagactcttgtattctgaaagtacagtctacaactgataaaaccttatgattcttttctcccccattatgcccctatatatatcaagatttgggtactttattttagtagaaaatatatatcttttacatatgtatgtatttataaatgcatagatatatgtataaaaatttgtaagcgttagcggcattaattcaccaatgcatttggacaacttgatgtaactgactttattttatgtgactataataaaaagcataattttctcaaaaaaaaaaaaaaaaaaaaaaaaaa

SEQ ID NO: 85 - DNA, 442 bp, Homo sapiens
  SITE (310): n equals a,t,g, or c
  SITE (406): n equals a,t,g, or c
  SITE (421): n equals a,t,g, or c
gggaggcggagcagagtcgactgggagcgaccgagcgggccgccgccgccgccatgaaccccgaatatgactacctgtttaagctgcttttgattggcgactcaggcgtgggcaagtcatgcctgctcctgcggtttgctgatgacacgtacacagagagctacatcagcaccatcggggtggacttcaagatccgaaccatcgagctggatggcaaaactatcaaacttcagatctgggacacagcgggccaggaacggttccggaccatyactycccatcttccttctggcccatctgcctgctgccntgaaccccccggttctgtcaggggtcccctaaaggaggacactcaaggggccctggtgggccccagggccaagggggccgggaagggcccctggcntggtggcctgggttngccccttcttaagggtggaac

SEQ ID NO: 86 - DNA, 1485 bp, Homo sapiens
gctgcgctccccaagtctctctcgtgcgcagagcccaggctgcgcttccctggtcaggcacggcacgkctggccggccgccaggatgcaggccccgcacaaggagcacctgtacaagttgctggtgattggcgacctgggcgtggggaagaccagtatcatcaagcgctacgtgcaccagaacttctcytcgcactaccgggccacaatcggcgtggacttcgcgctcaaggtgctccactgggacccggagactgtggtgcgcctgcagctctgggatatcgcaggtcaagaaagatttggaaacatgacgagggtctattaccgagaagctatgggtgcatttattgtcttcgatgtcaccaggccagccacatttgaagcagtggcaaagtggaaaaatgatttggactccaagttaagtctccctaatggcaaaccggtttcagtggttttgttggccaacaaatgtgaccaggggaaggatgtgctcatgaacaatggcctcaagatggaccagttctgcaaggagcacggtttcgtaggatggtttgaaacatcagcaaaggaaaatataaacattgatgaagcctccagatgcctggtgaaacacatacttgcaaatgagtgtgacctaatggagtctattgagccggacgtcgtgaagccccatctcacatcaaccaaggttgccagctgctctggctgtgcmaaatcctagtaggcacctttgctggtgtctggtaggaatgacctcattgttccacaaattgtgcctcyatttttaccattttgggtaaacgtcaggatagagataccacatgtggcaagccaaagatctatgcctctkttttttcaatgagagagaaatagcaaatgttctttctatgctttcctcaccatcatcacagtgtttacaaacttttgaaaatatttagtctgktacaaacttctgtcatgtagctgaccaaaatcctgcagggccacagtcggcactgttatttgcttcttttaatcagcaaaggcctcaagtcttaaaataaaaggggagaagaacaaactagctgtcaagtcaaggactggctttcaccttgccctggtgtctttttccagatttcartatattctctgatggcctgacaggcctattaagtagatgtgatattttctcccaagatgacctccattctcggcagacctaagagttgcctctgagttagctctttggaatcgtgaacacaggtgtgctatattgtccttgtcctaactgtcacttgccatggcctgaatgttggcttaactgaatattgtatgaaaagacatgcctccatatgtgcctttctgttagctttctctgactcaagctgtggggctcctctatacatgctatacatgtaatatatattatatatatttttgcaagtgaacaataaaacattaaaagatgctgtttccctaaaaaaaaaaaaaaaaaaaaaaaaaaaaa

SEQ ID NO: 87 - DNA, 1379 bp, Homo sapiens
gcccctccctgctggttcctggcatcgccagatgctgcgcagcagtctccgattccccatcaccaattcggctggcgtctccgagaccgcggactcccgtagggtccccgtggccccgagttgtagtcgggacaccccggccgcgggtgatcgtcgggtctccacgcgcccgggtcgctgacgcggatccggcctcggcgccttctcagggcgccctgcaaggccgcaggcaggatgaacattctggcacccgtgcggagggatcgcgtcctggcggagctgccccagtgcctgaggaaggaggccgctttgcacgggcacaaagacttccacccccgcgtcacctgcgcctgccaggagcaccggacaggcaccgtgggatttaagatctccaaggtcattgtggtgggggacctgtcggtggggaagacttgcctcattaataggttctgcaaagacacctttgataagaattacaaggccaccattggagtggacttcgagatggaacgatttgaggtgctgggcattcccttcagtttgcagctttgggataccgctgggcaggagaggttcaaatgcattgcatcaacctactatagaggagctcaagccatcatcattgtcttcaacctgaatgatgtggcatctctggaacataccaagcagtggctggccgatgccctgaaggagaatgacccttccagtgtgcttctcttccttgtaggttccaagaaggatctgagtacccctgctcagtatgcgctgatggagaaagacgccctccaggtggcccaggagatgaaggctgagtactgggcagtctcatctctcactggtgagaatgtccgagaattcttcttccgtgtggcagcactgacctttgaggccaatgtgctggctgagctggagaaatcgggggctcgacgcattggggatgttgtccgcatcaacagtgatgacagcaacctctacctaactgccagcaagaagaagcccacatgttgcccatgagggctgaggagactgttcagagactgcccagccctagggcactgtgccaccctcattcctccagagcttgacccctggacatttgcactgactttatccagaccaaagagctgcctcttggtggcagtattcccacagaggggtagctgggatcatgctagtcacttcctgcccccaggcaccgtgccaaagactggatgccccctactcctcaggggactgtccagggcgcccagtggtagtgagggagagtgtctctgttcttttgctcagcctgctgggccctttgtgtttgaggatgcttaatgattccagcctctcactgtgccttatgcattaaaatttctttgttacgagcaaaaaaa

SEQ ID NO: 88 - DNA, 2021 bp, Homo sapiens
ccacgcgtccgcgatggcagcggcggagcagggctgagcccgctgcccgcccgcagttcccggccccgctggccccagtcatggcgaagcagtacgatgtgctgttccggctgctgctgatcggggactccggggtgggcaagacctgcctgctgtgccgcttcaccgacaacgagttccactcctcgcacatctccaccatcggtgttgactttaagatgaagaccatagaggtagacggcatcaaagtgcggatacagatctgggacactgcagggcaggagagataccagaccatcacaaagcagtactatcggcgggcccaggggatatttttggtctatgacattagcagcgagcgctcttaccagcacatcatgaagtgggtcagtgacgtggatgagtacgcaccagaaggcgtccagaagatccttattgggaataaggctgatgaggagcagaaacggcaggtgggaagagagcaagggcagcagctggcgaaggagtatggcatggacttctatgaaacaagtgcctgcaccaacctcaacattaaagagtcattcacgcgtctgacagagctggtgctgcaggcccataggaaggagctggaaggcctccggatgcgtgccagcaatgagttggcactggcagagctggaggaggaggagggcaaacccgagggcccagcgaactcttcgaaaacctgctggtgctgcgtcctgtggggggcaccccacacgacacccctcttccctcaggaggcccgtgggcagacaggggagccggggctttgccctgctgctgtcctctcgtgtgatgaccctattgagtatcagaagccactactccccctgcctggccctgagagcggctctgctgtcatctcaagcagcccctgtccccagcccgtccaccctggagtgggcttcttcagcctgtttccccagccacaggcctgctacgacccccacgatgtgccgcaagcactgtctcaccatcccgcacccaccagacaacagccagggctggagtccaggccactttcagctgctcctttctccgtgcatcgtgtctcttctctgctttttctctcttcccccacttctctttctctgacccctcccctccggtgcgtttcgtatcaaagctcctcaaaccccgtcccccgtgtgtcctgctgtgtgcagctcgctctttcctcctgacttaccaaaccaggaaaacagcaggagagggtggctcaggacttagggacagggtatagcttagatggtggaaagcaaaggagagcaggaagttgtaaatcactggctaatgagaaaaggagacagctaactctaggatgaagctgtgactaggctggagttgcttccttgaagatgggactccttgggtatcaagacctatgccacatcacactggggctagggaagtaggtgatgccagccctcaagtctgtcttcagccagggacttgagaagttatattgggcagtggctccaatctgtggaccagtatttcagctttccctgaagatcaggcagggtgccattcattgtctttctctcctagccccctcaggaaagaaggactatatttgtactgtaccctaggggttctggaagggaaaacatggaatcaggattctatagactgataggccctatccacaagggccatgactgggaaaaggtatgggagcagaaggagaattgggattttagggtgcagctacgctcaccctaaacttttggtggcctggggcatgtcttgaggcccagactgttaaccaggctctgctggcctgtttactcgtcaccacctctgcacctgctgtcttgagactccatccagccccaggcacgccacctgctcctgagcctccactatctccctgtgacgggtgaacttcgtgtactgtgtctcgggtccatatatgaattgtgagcagggttcatctattttaaacacagatgtttacaaaataaagattatttcaaaccaaaaaaaaaaaaaaa

SEQ ID NO: 89 - DNA, 1111 bp, Homo sapiens
gcgagcggcacgtgtcaggccaccgaggtccaagccgcacttgctgccccattgaggacgaggaggcagcaggagcagtgacggtgactctaaggagccggattcccggcacgcagagctgacctgcctggcacccgcggccctctcctgtttccttcccattgtgttggcaccctaaaaagaaagaataaaacaacaacaggaaaaaaaggaaaatatttaaattgtgacaaaaacccactgggttctcttggttacaaactccttcccttctggtgctgcaaaaatgagtgggaaatccctgctcttaaaggtcattctcttgggtgatggtggagttgggaaaagttcgcttatgaaccgttacgtaaccaacaaatttgactcccaggcttttcacaccataggggtagagttcttaaatcgagatctggaggtagatggacgctttgtaaccctccagatctgggacactgcagggcaggaacgtttcaagagccttaggacaccyttctacaggggagcagactgctgcctcttgaccttcagcgtggatgatcggcagagcttcgagaatcttggtaactggcagaaagaatttatttactatgcggatgtgaaggaccctgagcatttcccctttgtagttctgggtaacaaggtagacaaagaggataggcaagtgactactgaggaggcacaaacctggtgcatggagaatggggattacccttatttagaaactagtgccaaagatgatactaatgtgacagtggcctttgaagaagctgtcaggcaggtgctggctgtagaggaacagctggagcattgcatgttgggtcacaccattgacttgacagggctccaagcagggtcttcgtgctgktaaagatagggagccttttaaaaatgtgccccaaattgatcagtcagtagtgtaagaataactgtgcccctctaagagtgcacacacacgcacacaagagggtaagagacaaggttctgattgtgaacagagcctttcaaattgaagtgtagattgatttaaaaaaattaaaattaaaaaaaatgaagctctatcaggccagtgtattttgcgtgatttctgcta

SEQ ID NO: 90 - DNA, 484 bp, Homo sapiens
  SITE (475): n equals a,t,g, or c
  SITE (476): n equals a,t,g, or c
tgcaaccagaagatctaataagaaactgccttttaatcgatcctcttctgacatggatcttcagaaaaaacaaagtaacttggcaactggactctcaaaagccaagagtcaagtttttaaaaatcaagatccggtgctaccccctcgtcccaaaccaggacaccctctctacagtaaatacatgctgtctgtgcctcatggaattgccaatgaagatattgtctctcaaaaccccggagaactctcttgtaagcgtggggatgtacttgtgatgctgaagcagacggaaaataattacttggagtgccaaaagggagaagacactggcagagttcacctgtctcaaatgaagattatcactccacttgatgaacatcttwagaagcagaccaaacgatccaagccacgctcagaagcctgttgacagtggtgctcctcatgctgtcgttcttcatgattttcccagcagagcaannggatgatt

SEQ ID NO: 91 - DNA, 1716 bp, Homo sapiens
  SITE (6): n equals a,t,g, or c
  SITE (1714): n equals a,t,g, or c
  SITE (1715): n equals a,t,g, or c
taaaanggctgctcsaattaacctcctaaaggaacaaagctggagctccaccgcggtggcggccgctctagaactagtggatcccccgggctgcaggattcggcacgaggtttttgacttgttgtctgatatgcatggtactttgacttttgtcctgattcccagtcaacagatcaagccgcctcctgccaaggaaacagtaatccatgtaaaagctcattttgactatgacccctcagatgacccttatgttccatgtcgagagttaggtctgtcttttcaaaaaggtgatatacttcatgtgatcagtcaagaagatccaaactggtggcaggcctacagggaaggggacgaagataatcaacctctagccgggcttgttccaggtaagacacaatatggtagaaagtacataatattaaaagaacattgaaaatgcaagccttcacaaagaaaaactcactctttcatgcctctatttaataaagtattccagttactttttcgtgtagttgggtttttatgttgtacctgcagcgtaagtatattaaatagaatgtggccaattctttggcctttagaatggaattatgtataacttcagccaatcccatattgtagtacatttcctgtatacatattaagatgaccgtattatcgaggcaatacaacttgkattatactatatactatatactatgacattaattggagcatcaacatgatttttgagaaggaaagatgcataactttataaggagtcaggaaaagtaacatcatagaatttattgtaccaaacgtgatcttagggcagaaacaggatgctccaaattttttattgatgaaactatccctaacttagactaaactaaaactttagcttacattatagattaagattattaaggggacatgtttctgagagttaagatgatacaaaatagaacaaagtacagtcatgcatcacttaacgacagggataagttctgagaaatgtgccattaggtgatttcattgttgtgcaaacatcactgagtgtatttacacaaacctagatgatatagcctgctgtacagctaggctatgtggtatagcctattcctccaaccaccatcatatatatggttggttgttgactgaaatgttgttatgcagtgcatgactgtatgtagatataattattttctacaaatggctcttacagttcccaggatggcagtagaataaagaaaggagagcagaactaagggaagtttaataagctatcggagaaggcaaaggaatacatacaggatgataaaaatagggatatagagtaaagggataataattcatccatttatttgttaataaatgctgttatgtctgcaccatgtaaagcactttgcctggtgctgagataaacttcgcttacatactttacttgaaagcatatccattaacacttatgtatatttttttcttctgtgtcccctactttataatattttcatgatattgtctctgttataattctttctactgtatatgctcagtttataaacttcttgatgtcagaggccaagtcttatttgttttaaatccagataatatatgttaaattaatgaataaaagatgattttaaaagttctcagaaaacaaacaaaaattaaaaaaaaaaaaaaaaactcgagggggggcccggtacccaattcgccctataatgagtcgtannc

SEQ ID NO: 92 - DNA, 4607 bp, Homo sapiens
  SITE (1): n equals a,t,g, or c
  SITE (5): n equals a,t,g, or c
  SITE (51): n equals a,t,g, or c
  SITE (52): n equals a,t,g, or c
ngccnctggcagtcggtcaaagtgtatcatatgccaagtcgccccctattnncgtcaatgacggtaaatggccgcctggcattatgcccagtmcatgccttatggactttcctacttggcagtacatctacgtattagtcatcgctattaccatggtgatgcggttttggcagtacatcaatgggcgtggatagcggtttgactcacggggatttccaagtctccaccccattgacgtcaatgggagtttgttttggcaccaaaatcaacgggactttccaaaatgtcgtaacaactccgccccattgacgcaaatgggcggtaggcgtgtacggtgggaggtctatataagcagagctcgtttagtgaaccgtcagatcgcctgragacagccatccacgctgttttgacctccatagaagacaccgggaccgatccagcctccggactctagcctaggccgcgggacggataacaatttcacacaggaaacagctatgaccactaggcttttgcaaaaagctatttaggtgacactatagaaggtacgcctgcaggtaccggtccggaattcccgggtcgacccacgcgtccgcgccccggaaaccatggaagtcctcgtcctggccggataccgcgcgcagaaggaggacgagctgagtctggcgcccggggacgtggtccggcaggtgcgctgggtgcccgcgcggggctggcttcgcggagagtttgggggccgctatggcctcttccccgagcgcctggtgcaggagatcccagagaccctgcggggctccggagaggcgcggaggccgcgctgtgcgcgccgccgaggtcatcctgccaaacacccgaggccccaaagatggtgcaaagtgaacttcagctacagcccagagcaggcggacgagctgaagctgcaagctggggagatcgtggaaatgataaaggagattgaggacggctggtggctggggaagaagaacgggcagctgggagccttcccatccaactttgtggaattgctggacagtgggcccccaagccttggtaacccagacatgccttcagtcagcccgggtccccagcggcctcccaagctgagcagcctggcctatgacagccctccagactacctgcagacagggtcctgtttgactaccagcctgaggccccagacgagttggcgctgcggaggggggacgtggtaaaagtactcagcaagaccacagaggataagggctggtgggaaggagagtgtcaaggacgaagaggagtttttccagacaactttgtactcccaccacccccaatcaagaagctggtcccacggaaagtggtatctcgggaatcagctcctattaaggaaccaaaaaagttgatgcccaaaacatccctccccacagtcaagaagctagcaacagccaccactgggcccagcaaagccaagacatctcggacacccagcagggacagtcagaagctcacctcccgagactcaggccccaatggtggcttccaaagtgggggttcgtatcaccctggccgaaagcgatccaaaacccagactccccagcaacgctctgtgtccagtcaggaggaagagcwcagcagcccggtaaaggccccctctgtgaagagaacccccatgccggacaagactgccaccccagagaggcccccagctccagagaacgcccccagctccaagaagatcccggctcctgacaaagtcccctccccagagaagaccctcactctaggggacaaggcctctatcccagggaactccacctcggggaagatcccagctcctgacaaagtccccaccccagagaagatggtgactccggaggacaaggcttctatcccagagaactccatcatcccagaggagaccctgactgtggacaaaccctccactccagagagggtcttttcagtggaagagtcccctgccctagaagccccacctatggataaagtccctaatccaaagatggcccctctgggggatgaggcccccactctagaaaaggtcttgaccccagagctttctgaagaagaggtgtccaccagagatgacattcaattccatcacttctcttcggaggaagccctgcagaaggtcaagtactttgtagccaaagaggatccatcatcccaggaggaggcccacacgccagaggcacccccaccccagcctccttcctcagagaggtgcctgggagagatgaaatgtaccctagttagaggggacagctccccacgccaggctgagttgaagtctgggccagcatccaggcctgcccttgagaagccccacccccacgaagaggctacaacccttccagaggaggcaccttccaatgacgagaggacccctgaagaggaggcgccccccaacgagcagaggcctctgagagaggaggtgctccccaaagagggagtggcttccaaagaggaggtgaccctgaaagaggaattgccccctaaagaggaagtggctccaaaagaggaggtgccccccatagaaagagcctttgcccaaaaaacacgtcctatcaagccgcctccagactcccaagagacgctcgcgctcccctcgctggtcccgcaaaactacacggaaaacaagaatgaaggagttgatgtaacgtcgctgaggggcgaggtggagtctctaaggagggcgctggagctgatggaggaggaagctgaccgacatctgggaggagctgaagagcgagaaggagcagcgccggcggctggaggtccaggtgatgcaggggacccagaagtcccagaccccgcgcgtcatccacacgcagacgcagacctactgagggtgggcctgggaagggaccgcggcctgacctggctggggccacccacgtccttgcacacgactttgggaaacgcgagaaagtaaactctgcctagcacggcgccacgccggtctggtcgctgggggcggggcctgcgcgggggcagggcctgggcctccgcattcctgacggtccctcccaggcacatctggccaacatgtggctcccattaccgttcccaaggcctgcgcgcggctatttttatccaccggatggtgaggggcgggggagggtgtctccttcggactccagccgcgcactggagaaatggcgggcaggaggggcccaggcggggtcgggctcttgacgcccggcctagattccggaatccagctgtgcgccggggaggagccgggcgggccttctcgccagctcggacccctcccagctggcctccctgtccgctcagagggactcctgccctctcgcttgaacgcacctcggcgcakacgtgaagtccaccgtccagcccaagcacgcatgcttacaccggggctagcagcaccttagcctcgaggtcaggatcctgaggcctggtgtgtgtgtcattgcagtgtatgaacccagggcactgtggggacagggcgacgtgtgtccaggcgtttgccggtaaggaatgcgttttgaataaggaatgcgcgcgcgcttgctctgtgtgtgaggctgggtgcaggcctgtgggcttctgcttttctgctggctgtgaagtgaatgcgggcaggtgtgctgtatcgtcgggttggtgggtgggggtggtgcagctagggtaagggagtcaagctgggcctcagtcctggggcccctgcgtggcaggagcctgggggtcgctgggggcaggagtaacagagggagagactgagtcactgagaatgcagctttctttcatttggtcacttcacctcttcatcgaccccagagagggagtggggaccctgcatgctgccccctccccgcccccggggtcttctggcaggactggggaagggagcctctcagggggtggcggtccacgcccagtagcacctgggagctgtgggggccgaggcagtccgaaggtgtggggtagctctgagctcatgtgcaggtccggtaccccgagcgccttgcagcgggagccrgggcccatcagtaatagtgcatgcggcccagggtgcccgtggccgtggggctgggccccagcgtgcctgtgcccagcaggtccggctgcccggtgcgccagatctcccgcaggatccgttcgcgctcctccagccgctgcgcccgctccagctcctccgccgacgtgaagacgttgacgttgaggggcccgtccggctctgcggacagctcggggcccggcagcgtgtcgtcggggcccagccgagtcaccgtgtcctcctcgtcctcgtcgtcgtcctcgggctccagggtgctgctgcgggggtcccggcgctgagccgggccccggggccgcgggcggggcgcccacgagatgctgatgacgagcaggcagagggtgagcagcaggccgaagcagacgcccagcacgaagtagaggccgaagctctcggggttggcgcggatgtgcgcgtaggcagccaggctgttgctgagcaactccatgtcccttcgcggggcatccatgctgctctggggggcagctcccctaccagccgtcagcgccccgcttccmggctgmmcggccccagcgcgtcccgcggccgcatacactgggtccgg

SEQ ID NO: 93 - DNA, 1210 bp, Homo sapiens
ggaaggatgagaagaccgcccagacgagggagagccacgcaaaggcagacagcgccgtctcccaggagcagctgcgcaaactgcaggaacgggtggaacgctgtgccaaggaggccgagaagacaaaagctcagtatgagcagacgctggcagagctgcatcgctacactccacgctacatggaggacatggaacaggcctttgagacctgccaggccgccgagcgccagcggcttcttttcttcaaggatatgctgctcaccttacaccagcacctggacctttccagcagtgagaagttccatgaactccaccgtgacttgcaccagggcattgaggcagccagtgacgaagaggatctgcgctggtggcgcagcacccacgggccaggcatggccatgaactggccacagttcgaggagtggtccttggacacacagaggacaatcagccggaaagagaagggtggccggagccctgatgaggttaccctgaccagcattgtgcctacaagagatggcaccgcacccccaccccagtccccggggtccccaggcacggggcaggatgaggagtggtcagatgaagagagtccccggaaggctgccaccggggttcgggtgagggcactctatgactacgctggccaggaagctgatgagctgagcttccgagcaggggaggagctgctgaagatgagtgaggaggacgagcagggctggtgccaaggccagttgcagagtggccgcattggcctgtaccctgccaactacgtggagtgtgtgggcgcctgagtgtcctgacagcccttctgcaacgtttacccaccctggttcagagcccagcttctcctggagagccggaccctcagggccctgaaccgtcgctctctggctgctcctctgtcccttgagggaggaagtcctgggacccagggaggggaggggcctttgtctagggaagggactggtagggaagggacgagtctaggctgagggcaagatgggaggtcagaggtgacagaagcgttcaggggtgcctgggcctccccaggagctgtggactcagttcctgacctctgctttggggttcctggggtgggcttggggtgagtgtagttctggcctagcagcaccctcttgtggcttgttctagcgtgtattaaaacttgacacacacccacacacaaaaacaaaaacaccaaaaaaaa

SEQ ID NO: 94 - DNA, 822 bp, Homo sapiens
  SITE (795): n equals a,t,g, or c
  SITE (804): n equals a,t,g, or c
ttcgcgcccggctggtaacgtcgtggcatacgttccggcacgcgcggwctgatggccctggttgatatcccacgcgtcagcctgggttttgtcgaggttgccatacaaacggaagctgaattcgtcgcccagcggaccggtcaggctaaagttagtgcgtttggtggcaccttcctctttatgttctggcgcattgaaatatgcgtcccaggagccgtgccactcgccgctgccttttttggtaatgatgttaaccacgccgcccgccgcgccgttgccataacgcgcagctgccggaccacgcagaacttcaatacgttcaatcatttcaggtggcacccaggaagtatcaccacgggtatcgcgctcgccacgccagccctgacgcaccgagttacggctgcttaccggcttgccgtcaatcaaaatcagcgtgttttccggacccataccgcgaatatcaatctgtcggttattcccacgctgaccactggtggagttaccggtcaggttaacgcctggcatggtacggatgatcttcgacacatcgcgggcaaccgggtttttgcggatttcatctgcggtgatggtcgaaacgccaggcgcctgtaagttctgctcggcggcggtaacgacaatagtatcgtcatgtgaaacaggagtatcggtcggctcttgtgcctgcgctaccccataaatccccagattgaccaacaaggccagggaatgaatcttcttgttcattgttttattcctgcagcccgggggatccactagttctagagcggccgccgncgcggtggngaacagcttttgggcctt

SEQ ID NO: 95 - DNA, 865 bp, Homo sapiens
  SITE (683): n equals a,t,g, or c
  SITE (720): n equals a,t,g, or c
  SITE (781): n equals a,t,g, or c
  SITE (817): n equals a,t,g, or c
  SITE (827): n equals a,t,g, or c
  SITE (852): n equals a,t,g, or c
caagcccacgtgcaatgagctgatcaaaaccatcatcatccagcatgagaacatcttcccaagccccagggwgctggagggccctgtctacagcagaggaggaagcatggaggattactgtgatagccctcatggagagactacctcggttgaagactcaacccaggatgtgaccgcagagcaccacacgagcgatgacgaatgtgagcccatcgaggccattgccaagtttgactacgtgggccggacagcccgagagctrtcctttaagaagggagcatccctgctgctttaccagcgggcttccgacgactggtgggaaggccggcacaatggcatcgacggactcatcccccatcagtacatcgtggtccaagacaccgaggacggtgtcgtggagaggtccagccccaagtctgagattgaggtcatttctgagccacctgaagaaaaggtgacagccagagcgggggccagctgtcccagtgggggtcatgtagcccgatatttatcttgcaaacatcaacaagcaaaggaagcgtccagaatctgggaagcatccgaaaacttttcggagtgacagccatgggcttgagcagttccctgactgactcctccttcccaggggtgggggctagctgccgccatctccagccatcatgagccagagccttccaaagaanggccagataagtggttcattaatgggcacggagcctnaacttcattaaccgcaatcatccttgaagaatcggctggatagtccacagatccggaagantggcacaacgggaaggtcaaaaggttcaataccatnggccatgganccttaggcaatggtcaagatattgnggaacaatgaact

SEQ ID NO: 96 - DNA, 1393 bp, Homo sapiens
  SITE (1389): n equals a,t,g, or c
caaccccagcagcatggctgtatcctttacctcggggtcttgccagaagcagcctcaagatgcatctcctccgccaaaagaatgtgaccaaggaactctcagtgcatccctaaatccgagtaattcagagagtagtccttccagatgcccttcagacccagactctacctcccagccaaggtcaggggcctctgcagatgtagctagagaygtmaagcaacccactgccacgccgaggagctaccggaacttcaggcatccagaaatagttggctactccgtaccaggacgaaatgggcaaagtcaagacctcgtcaaaggatgtgcaagaacagcccaggctccggaagacagaagtacagagccagatggcagtgaggcagaaggcaaccaggtctattttgctgtctacaccttcaaggcacgaaacccaaatgagctgagcgtgtcagccaatcagaaactcaagatcctcgagtttaaagatgttacaggaaatacagagtggtggttagctgaggttaacgggaagaagggctacgttccctccaattatatccgcaaaaccgagtacacctgagcccacgttgcctgccacccagccttgctgcctttgctttcagtccgccgagggttctggcggcccaccgagagggcgcctgctcctgagacacaggccctgtctgcgttgcttaaccatggcatggtggagcacaccacagatcttgttctcctcgattgggttgtaaaccttgatgctcactagaatctctagaatttgaaatggaccctggggctttgcaaatgacttagtgactatgagaagagagacaagtcttrgagctggcttttggaaaggagaaacttgcagtcagaagcccagtgtcctatgtatgcaggaagctgtgctctagcaatagacagtgttggtaatggttgtgctgtacggcgtttggggtggccccatgttccatgctcagctgaccggatgccaactcagatgaaaagaattcatggctctgggcaccccgtgagcagtgcttgcacatggctgggagtttgtcgggattgaaccaaacctagtgcttcaaagctcctgggacacctccagtgtccagcacacattctcatacatactgcccctaatttctaaagtccctaaagcactacattctgtaaccttgtttcttttactccattcccagattagttatgcaaaattcaactgcgttctacttttagaagtgtttagggtctttattttctgttgacccttcatctgaaagattctcttcccttgttaggtacaatcamtggccccccccttttttttgagaggggtctgctawgttgccaggckggtctaaamgcckgggytcaagcaacctnccgg

SEQ ID NO: 97 - DNA, 446 bp, Homo sapiens
  SITE (29): n equals a,t,g, or c
aagtcaagccagatgaaaactccaaagcnttttatgtgccagcccagtatgtgaaggaggtcacgcgcaaagctctcatgccacctgttaagcaggtagctggtctgccaaataactccacgaaaataatgcagagtttgcatcttcagagatcaacagaaaatgtgaacaaattgcctgagctttcaagtttcggaaagccatcgtcatctgttcaaggaacaggtcttattcgtgatgccaatcagaattttggacccagttataatcaaggtcagactgtcaacctaagcctggacctgacccataataacggaaagtttaacaatgactcacattctcctaaagtttccagccagaataggacamgsttcatttggtcattttcccggtccagagttcttgggatgtagagaaaactagcttctcccagggacaatcttgtg

SEQ ID NO: 98 - DNA, 2211 bp, Homo sapiens
aggtaccggtccggaattcccgggtcgacccacgcgtccgggcccagggggcctccgaaggccattcaggccccaagccctacccacgcctcccagcctgggagaaaggggaaccagagcggagaggccgcagtgcgacgggcagagccaaggagccactctcccgggcaacagagaccggagaggccagagggcaggacggctctgggcggaggggcccccagaagagaggtgtccgagtcctcaggccaagcactgcagagctagtccctgcgaggagcccctcagaaacaytggcttaccagcacctacccgtcaggatctttgtggctstgtttgactatgaccccgtgtcaatgtcgcccaatcctgatgctggagaagaagagcttcccttccgagagggtcagatcctgaaggtgtttggggacaaggatgccgatggcttctaccagggcgaaggtgggggccggacaggctacattccctgcaacatggtggctgaggtggctgtggacagccctgctgggagacagcaactgctccagcggggttatttgtccccagatattctccttgagggctcagggaatggtccgtttgtgtactccacagcccacacaactgggcctcctcccaagccccgccgctccaagaaagytgagtcggawkgccctgcccagccctgtccaggcccccctaagctggtcccctctgctgacctgaaagctccccactccatggtggstgcatttgactacaacccccaggagagktcccccaatatggacgyggaggcagagctgcccttccgggcaggggatgtcattactgkgtttgggggcatggacgatgacggtttctactatggggaattaaatggacaaggggcctggttccatccaacttcctggagggccctgggcctgaggcaggcggcctggacagggaacccaggacaccccaggctgagagtcaggactggggctgcaccacacaagggtccccagggcccccaggtgggccttgtacccccagctctggcagcgcccccaggattgaacgtggggagccccagggcagaagcgagaaggtgtggggtttcttctccaaggggaagcagctcctcaggaggctgggctctgggaagaaggagtgaagctgtggcccatcctgcaggcagaagaggccctgagaggcccccagatcactgtctctgctgagcagggaaggctcagactgggcccagagcccccgttcttctgcgttaacactgtggcattcagagggaatcaaagagccttggtgaaggtcagagctaaatggctccttaaggatgaactctctagagaagcaccttcctcctacaggaggggaaactgagcccacagtgagtatgtaacttgaccaaggtcactgagccaggactggacccaggaccctcgcgtcctggtccacccacctcgtctactagtgtcccacagtgctgcgctagtcccttctgccacccttcccagtcccaggacgggccctggagggagaaaggagcctgtgccccctgatggctctggctgtcctgatcctgtcttccctcccctgaaggaaagtttgcactggattttattggagccccatctccccagcgggcaggcgggcggagcctgtatatatgtatatactcagtgcctcagttcagcttcctccacctcgcttccactgcacaggcccaggaaggagaaaggccaagccaaagtgggccccaccctgcccccgtcgtgctccatccttccctgccggggcctgctggcccctgtaaggtcccgcccccaaagaccctggggccagcggggccgaaagcggagttgggtttgccttattttgctcattggattcaagttcttttgcatagttttcttctaacccctgttggagtccaggggctggagaaaaggacagatttatgcagctattttcatacattccctgttcagagtggggtaggggttctccgccgttacccgatccactccatcccccaccctctgaggggtgagtgtgtctttgcatgtttcctttgctgtggtgggagatagtttgactgaacccccaccttgaccttggtctccaggggtgtggaatggtgggggaatttgtttaaaaagacattttattataataaagtctattttcacaaaaaaaaaaaaaaaaaag

SEQ ID NO: 99 - DNA, 1639 bp, Homo sapiens
cccacgcgtccgcggacgcgtgggcggacgcgtgggcggacgcgtgggtgagtccagtgagccgacagtccataagaaactcccagaagcacagccccacttcagagcccacccccccgggggatgccctaccaccagtcagctccccacatactcacaggggctaccagccaacaccagccatggccaagtacgtcaagatcctgtatgacttcacagcccgaaatgccaacgagctatcggtgctcaaggatgaggtcctagaggtgctggaggacggccggcagtggtggaagctgcgcagccgcagcggccaggcggggtacgtgccctgcaacatcctaggcgaggcgcgaccggaggacgccggcgccccgttcgagcaggccggtcagaagtactggggccccgccagcccgacccacaagctacccccaagcttcccggggaacaaagacgagctcatgcagcacatggacgaggtcaacgacgagctcatccggaaaatcagcaacatcagggcgcagccacagaggcacttccgcgtggagcgcagccagcccgtgagccagccgctcacctacgagtcgggtccggacgaggtccgcgcctggctggaagccaaggccttcagcccgcggatcgtggagaacctgggcatcctgaccgggccgcagctcttctccctcaacaaggaggagctgaagaaagtgtgcggcgaggagggcgtccgcgtgtacagccagctcaccatgcagaaggccttcctggagaagcagcaaagtgggtcggagctggaagaactcatgaacaagtttcattccatgaatcagaggaggggggaggacagctaggcccagctgccttgggctggggcctgcggaggggaagcccacccacaatgcatggagtattatttttatatgtgtatgtattttgtatcaaggacacggagggggtgtggtgctggctagaggtccctgcccctgtctggaggcacaacgcccatccttaggccaaacagtacccaaggcctcagcccacaccaagactaatctcagccaaacctgctgcttggtggtgccagccccttgtccaccttctcttgaggccacagaactccctggggctggggcctctttctctggcctcccctgtgcacctggggggtcctggcccctgtgatgctcccccatccccacccacttctacatccatccacaccccagggtgagctggagctccaggctggccaggctgaacctcgcacacacgcagagttctgctccctgaggggggcccgggaggggctccagcaggaggccgtgggtgccattcgggggaaagtgggggaacgacacacacttcacctgcaagggccgacaacgcaggggacaccgtgccggcttcagacactcccagcgcccactcttacaggcccaggactggagctttctctggccaagtttcaggccaatgatccccgcatggtgttgggggtgctggtgtgtcttggtgcctggacttgagtctcaccctacagatgagaggtggctgaggcaccagggctaagcaattaaaccagttaagtctcccaggaaaaaaaaaaaaaaaaaaaaaaaaaaaaaaaaaaaaaaaa

SEQ ID NO: 100 - DNA, 703 bp, Homo sapiens
  SITE (680): n equals a,t,g, or c
  SITE (694): n equals a,t,g, or c
gcggacgcgtgggcttgggtgaccctggccgccaccaagctgttctcctctatacacctgcctggcttgaggtccctgaagcagctgagccggcttcccactgcctcagcctgcctgcaggctgtgtctgctctgtcctcggccctcgtggttgctccttacagggcctgtttttcccacaggctggtttccagccaagttcgtggaagtcctggatgagcgcagcaaagagtactccatcgcgggggatgactcggtgacggagggggtcacagacctcgtgcgagggaccctctgcccggcccttaaggccctgttcgaacatggactgaagaagccatccctgcttgggggcgcctgccacccctggctgtttatcgaggaggctgcaggccgggaggtcgagagagactttgcctccgtgtattcccgtctggtgctctgtaagaccttcaggttggatgaagatggcaaagtcctgaccccggaggagctgctctaccgggctgtgcagtctgtgaacgtgacccacgatgcagtgcatgcacaaatggatgtgaagctccgctcactgatctgcgtggggctcaagtgagtktggaaaaggggttggaggaragccytggartkgggggacccarcccarcatcagggggggtccttacagggacccttaaggnccaaagaaccttangggctaagg

SEQ ID NO: 101 - DNA, 318 bp, Homo sapiens
  SITE (269): n equals a,t,g, or c
  SITE (302): n equals a,t,g, or c
  SITE (305): n equals a,t,g, or c
aattcggcacgcggrgatattttacattgtttgaaattagccttcaaaatccaatggacattttatgcttaagcgcatctcaattcagactagtcacattttgggtgctcaagagccactcgtggctatagtggccacttggtggacagcaaagctccaggcttcaagggaggaggggctcaacaggtaacatagtaagtgggctgtgggggaggttggcaggctagaggggcaccttatgcaaagtcccgccaagcaagacacaaagntcctggtttgtttgtgtttttgttttgttttgntgnttttggaactagg

SEQ ID NO: 102 - DNA, 1810 bp, Homo sapiens
ccacgcgtccgcgactccccaagtcccgaagaggataaggaggaacacatttcacttgcgcacagaggagtggacgcgtcaaagaaaacttccaagactgttaccatatcccaagtgtctgacaactttgtaagagaaataaagaaagagatgaagaaagaccctctcaccaacaaagctccagaaaagcccctgcacgaagtgcccagtggaaactctttgctgtcttctgaaacgattttaagaaccaataagagaggcgagcgacggaggcgccggtgccaggtggcattcagctacctgccccagaatgacgatgaacttgagctgaaagttggcgacatcatagaggtggtaggagaggtagaggaaggatggtgggaaggtgttctcaacgggaagactggaatgtttccttccaacttcatcaaggagctgtcaggggagtcggatgagcttggcatttcccaggatgagcagctatccaagtcaagtttaagggaaaccacaggctccgagagtgatgggggtgactcaagcagcaccaagtctgaaggtgccaacgggacagtggcaactgcagcaatccagcccaagaaagttaagggagtgggctttggagacattttcaaagacaagccaatcaaactaagaccatgaaggaccagcagaaacgagagattaaacagttattgtctgagttggatgaagagaagaaaatccggcttcggttgcagatggaagtgaacgacataaagaaagctctacaatcaaaatgaatacttgatcaatgaaatgtcacattattcatcctgagtccgagactcaaattttctgccccagccaaaataatcttgtgccaaaagattaaaggtttgcctcaaaatgtccctgtttgaaagattagcacaaaagtcttgatagcacaacacaaattccatccaagaggagaatcttccccagggtttagtcctggggctggcactcgttgtgacttacacagagcaaaattgtgctaaaggcttttctactctgagatctcaatgcgaaatgaaaactcaggcagtttagtccatagtggtactattttgatgatattttccattaataaaatgtaatttcagattattcgtttacaagctttataattttatgattttttaatcgtgttttgtcacagacttccctagtgtttgtactacacgtagtcagaagcgagtgtccttttcttttgcttcaggctaagagctgcctcgctctttgtccccccattaggattctattacatatgcaattgtaggttcaacctgtccctttccctgccagcaaaccccaccaccctaagagaaattttagcttatatatgacggtatatttacaaaaagagaaagagaaaatctggtatttgcaatgatctgtgccttctttttaccaccctcttgattggagcttttgtgatgcagctaccatgattcaaaaaaattaaaaattaaaaaaaaaaaatctgccacttatccaagtccactagaggccactgtcttcaaagcttctctcaccctagccaaaggtcctaagaggagacagctgtgaagttgggcgtgctctgtggtaccagctgtgacttttctatttctcctagttttaggttgttcatgaaactagaaatgtcatcctgcttgatttttcatcagccaagttaaacccctgctttctgtcctttgcaccttttgcgtgaacagaatatgcattattaaagcaaaaataaataaaagtaaaatgcaaatgaaaaaaaaaaaaaaaaaaaaaaaaa

SEQ ID NO: 103 - DNA, 1050 bp, Homo sapiens
  SITE (942): n equals a,t,g, or c
  SITE (1023): n equals a,t,g, or c
  SITE (1041): n equals a,t,g, or c
gttctagatcgcgatctagaacttagggcagctgaaggctcggttcatgccgtgcccccgggcagttctggtgaggctaagcaagaggcctctgcatcttgacacctaggagagcagggacggagtctcccagggtggaggaccatgctgcgccgcaagccctccaatgccagtgagaaggagcccactcagaagaaaaagctctcccttcagcgctccagcagcttcaaggattttgccaaatccaaacccagctcccccgtggtgagcgagaaggagtttaatctggatgataacattccagaagatgactcaggtgtccccaccccagaagatgctgggaagagtggcaaaaagctggggaagaagtggagggcagtgatttcccgaaccatgaacaggaagatgggcaagatgatggtgaaggccctgtcagaagagatggcagacactctrgaggagggctytgcctccccgacatctccagactacagcctggacagccctggccctgagaagatggcgctggccttttctgagcaagaggagcatgaacttccggtgctcagccgccagcatgcaacaggcagtgagctctgcagccccagcccaggttctggcagcttcggggaggaaccacctgccccccagtacacagggcctttctgtggccgggcacgagtccacaccgacttcactcccagcccctatgaccacgactcgctgaaactgcagaaaggagatgtgatccagatcattgaaaagccacctgtgggcacgtggctgggcctactcaatggcaaggtgggctctttcaaattcatctatgtgggatgtgctgcccgaggargccgtggggcatgcccgccccagccgccgacagarcaarggcaagaggcccaagcctaagacctgcatgagctgstggarcgcatcsgsctnggaaggarcacacatycamcctcctgctcaatggctaccagacacttggaagactttcaaaagaacttgcgagaaacacancttcaatgagcttgaaanatcattgga

SEQ ID NO: 104 - DNA, 461 bp, Homo sapiens
  SITE (10): n equals a,t,g, or c
  SITE (165): n equals a,t,g, or c
  SITE (460): n equals a,t,g, or c
ggacgattcngggcagtgtcgtccccagaggtcggcggccgttgcccgctcaccagcgacgcggggcgcctgcggggacggacactgcccatctctaagataagagcctggaaagaggactctgttggctgttggaaattgcagagtaatgcctcaggtgacatntaatgatgtggctatagacttcactcatgaagagtggggatggctcagttctgctcagagggacttatacaaggatgtgatggtccagaattatgagaacctggtctctgtagcaggyctttctgtaactaagccatatgtgatcacgttattggaggatggaaaagagccctggatgatggagaaaaaactgtcaaaaggtatgattccagattgggaatcaagatgggaaaacaaggaattatcaacaaagaaggataattatgatgaagattcaccccaaacagtaataatng

SEQ ID NO: 105 - DNA, 1904 bp, Homo sapiens
cattagacagcacactgctgactgttttcagttgtttctgtaacagcagaaagtgcactcactaggagtagtcagaattcaaaatgctcaagagaaagccatccaatgtttcagagaaggagaaacatcaaaaaccaaagcgaagcagcagttttgggaatttcgatcgttttcggaataattctttatcaaaaccagatgattcaactgaggcacatgaaggagatcccacaaatggaagtggagaacaaagtaaaacttcaaataatggaggcggtttgggtaaaaaaatgagagctatttcatggacaatgaagaaaaaagtgggtaaaaagtacatcaaagccctttctgaggaaaaggatgaggaagatggagagaatgcccacccatatagaaacagtgaccctgtgattgggacccacacagagaaggtgtccctcaaagccagtgactccatggatagtctctacagtggacagagctcatcaagtggcataacaagctgttcagatggtacaagtaaccgggacagctttcgactggatgacgatggcccctattcaggaccattctgtggccgtgccagagtgcatacggatttcacgccaagtccctatgacactgactccctcaaaatcaagaaaggagacatcatagacattatttgcaaaacaccaatggggatgtggacaggaatgttgaacaataaagtgggaaacttcaaattcatttatgtggatgtcatctcagaagaggaagcagcccccaagaaaataaaggcaaaccgaaggagtaacagcaaaaaatccaagactctgcaggagttcctagagaggattcatctgcaggaatacacctcaacacttttgctcaatggttatgagactctagaagatttaaaagatataaaagagagtcacctcattgaattaaatattgaaaacccagatgacagaagaaggttactatcagctgctgaaaacttccttgaagaagaaattattcaagagcaagaaaatgaacctgagcccctatccttgagctcagacatctccttaaataagtcacagttagatgactgcccaagggactctggttgctatatctcatcaggaaattcagataatggcaaagaggatctggagtctgaaaatctgtctgacatggtacataagattattatcacagagccaagtgactgaacacgcattcccaactatatatctacagatgcattccattttaactcttcttgagctaaaacgtcaaataggagaggaagataagataaatatttgtaaataaaacctaaagtttaaatgttttaatctgaataattgtacataaaattttgtatctctaacattccaaattactgtcaataaaatatatatttattattttaaatgctatgtgttaatatttcacttgcttgtattagaaaggcaaaatgtaagactttggtatgtgtgacatatgctttatttggctttattttacaagtacagtatctgcaaaaaacaaagtaaccttttttcatacctgccagttttgaatttatatatgttattgaacaaatagtaatagaggattcgctgttgaaacaagttgtccaagcaatgttatattcatttttatacttattgggaaagtgtgagttaatattggacacattttatcctgatccacagtggagttttagtaattatattttgttgatttcttcattttgttttctggtataaaagtagagataatgtgtagtcacttctgatttagtgaaaccaattgtaataattgtggaaatgttttgtctttaagtgtaaatattttaaaatttgacataccctaatgttaataataaaaagaactatttgcatagcaaaaaaaaaaaaaaaaaa

SEQ ID NO: 106 - DNA, 723 bp, Homo sapiens
  SITE (565): n equals a,t,g, or c
  SITE (654): n equals a,t,g, or c
  SITE (723): n equals a,t,g, or c
gacgtgagtgtggcttgtatttctggtcctcccctgcttcactgctttcattttactcttatcgtgctttccagaaagtttgcctgctgggagagtctttttgatcgtttcccatgtgttgtcagatagctccatagaattcagtttctgagaaccagccagaagcatgcagtgacattgcacaatctgcctctgaagctggagatactagctgcagagctcaggggagctgctccacatcaccgacatgaagggaacaggcatcatggactgtgcgcccaaggcactcctggccagggcactttatgacaactgccctgactgctctgacgagctggctttcagcagaggggacatcctgaccattctggagcaacacgtrccagaaagcgagggttggtggaagtgtttgctccatgggaggcaaggcctggcccctgccaaccgsctycaaatcctcacggaggtcgctgcagacaggccgtgccccccattcctgagaggcctggaagaagctcctgccagctcagaggagacctatcaggtgcccactctaccccgcctncactccaggccccgtttatgagcagatgaggagttgggcggaggggccccagccccctactgcccaagtctatgaattccccgaccctnccaccagtgccagaaaatcatctgtgaaaagactctcaagcttttccaaaaacaggtaccggctcttcn

SEQ ID NO: 107 - DNA, 555 bp, Homo sapiens
  SITE (393): n equals a,t,g, or c
ggtaaagcttgccagagcccagctgccttcccggtgtatacccttgggatttctaggcaggtcccctggaaggcacctgctaggcactgtctcagctgttctaggacaaaggtgagcctcctccctgccccatctcctgcaggcagtgagctctgcagccccagcccaggttctggcagcttcggggaggaaccacctgccccccagtacacagggcctttctgtggccgggcacgagtccacaccgacttcactcccagcccctatgaccacgactcgctgaaactgcaggtaagatcagcatccgggcttctctggagcctggcaggctgtgcccaaaaaggaagctggactgaaccaggctatgacagtgtcagtggaggccaaggcccnccatatcctctctcccttgctcccttctcctctcctctcccccaacagaaaggagatgtgatccagatcattgaaaagccacctgtgggcacgtggctgggcctactcaatggcaaggtgggctctttcaaattcatctatgtggatgtgctgcccgaggag

SEQ ID NO: 108 - DNA, 804 bp, Homo sapiens
  SITE (14): n equals a,t,g, or c
  SITE (38): n equals a,t,g, or c
  SITE (43): n equals a,t,g, or c
agtaagtgtggggntctccagcgtcatcctatgagcanacacnaaggtggtgggcagtgcccactgttcctcgaccttcaggcctgcctggaagctgatgccgtctgggatggttgtctggaattcggcgatggtgtaatactcttcctccacttggggcgggatgggcggcttcggcaggttgaggcctcgaggaawggtcatgtcccggcgaggagggggtctctgcctcatctttggtgatctctgcttggcgtcaccgtcgggcaccgggcggccttcaaaccgcccgtccctctggctgctgagcagctccttctccctgcccaccgcgttctgctgccgggaaacaccatccaagtcaagggcacccgggtgggagggtgagccagggcctggcttcgggggcaagggctccccactgttcttctttaggtaggaggcgggggcccagccttctttgccctggtacctgatcttccaccagccttccaggtttttctggatgacctccaccacagcccctctctccaggttcatttcatcctggtcccgagctgtgtacgggtagatgactgtgtacttctcctcttcttcaggctgcagagaaaactcatcctgcaccccatcctggccttcgaggcacgttgcagggacccagccttgctcctcggcagtgctgacgaaccaccaacctgactcattcttctcgatgatgtccaccacctgccccacgctgaggctgatctccgaactctcctgcttctggtagttggctaccaccacatactgctcccctgtgcc

SEQ ID NO: 109 - DNA, 721 bp, Homo sapiens
  SITE (484): n equals a,t,g, or c
  SITE (509): n equals a,t,g, or c
  SITE (542): n equals a,t,g, or c
  SITE (598): n equals a,t,g, or c
  SITE (608): n equals a,t,g, or c
  SITE (703): n equals a,t,g, or c
  SITE (720): n equals a,t,g, or c
ggcggtttgcaatgagatcataaacattgccgaaaaatctgttcattactgcagcactgtttctcatccccttgactttcatcacaaggtatccccttctgacaataaatcatctttaatcatttctcagcaacctcaagcccagcagcgaagagtcacccccgacaggagtcaaacctcacaagatttatttagctatcaagcattatatagctatataccacagaatgatgatgagttggaactccgcgatggagatatcgttgatgtcatggaaaaatgtgacgatggatggtttgttggtacttcaagaaggacaaagcagtttggtacttttccaggcaactatgtaaaacctttgtatctataagaagactgaaaaccatggagattatttttattggaggaggaagcatcattcatgaaccgatctttttagttgagtcagtaggaaaattaatacagtggataaagtaagaagcanaagacagggacagagaaagtgttgngtttaaaacccaagcctggtctaaggttactgngtattaagacagggccgaactagtgtgctgagcaaaaagaattgaagcaaattggnatttacttancccgcttctgggagccaacttcaaccctttccccttcccctttcacttcttggggtaaatcctggacctggaagccataagtcccaaggaaaccnagaaggtttaggccccng

SEQ ID NO: 110 - DNA, 929 bp, Homo sapiens
  SITE (897): n equals a,t,g, or c
  SITE (900): n equals a,t,g, or c
attaaattgaaagctgaagcccggttggacctgctaaagcagattggtgtttctgtggacacatggctaaagagtgccatgamccaagtaatggaagaactggaaaatgagcgatgggcccgccctcctgcagtgaccagtaatggcactttacactcgcttaatgcagataccgaaagagaagaaggcgaasagtttgaagataacatggatgttttcgatgacagcagttccagcccttctggcaccttaagaaattatccactcacctgcaaagttgtttattcctacaaggcttctcaaccagatgagttgaccattgaggaacatgaggtgttagaagtgattgaagatggagatatggaagactgggtaaaggctcgaaataaagttggccaagtgggttatgtgccagaaaagtacctacagtttcccacctcgaacagcctcctgagcatgctgcagtccctggccgctttggacagtcggtcacacacgtccagcaattccacggaagcagaactcgtttcaggcagcctcaacggagatgccagtggtaaagactgaaacaaggcactctttatttggtcacgtttgacctaaactgtattgccctggagtaagccttcagtaggataaaaagcacaactttcctcctgtcctataatatgcttttctttatatggtcacgtttgtcctgcacagtagaaccctaaagttaatcattcatcagtgagtaaaaaaattacaactttaatcctattctgtatgatgctcttttagttgtcatgtgagcataggggtggttgcaaaagcaaccggctgttaattatcttaccagatttgtttttctcttgctccctagtatgttttgtgaaagcactttatgattatganggncagacagatgatgagttatcttttcctga

SEQ ID NO: 111 - DNA, 2109 bp, Homo sapiens
cgggctcaggatgagtgtggatggcatgaactcacactagcactggctccacctgtgctccttcggaaggagccctcagccctgagccccaaggctccagtgccctccccttgcggggcgggggcctcacaccctctgccgccctgtgctgagggccctgtggcctcccctttcttgcagtgtgagcagctacgagaagacccagagctatcccaccgactggtcagacgatgagtctaacaaccccttctcctccacggatgccaatggggactcgaatccattcgacgacgacgccacctcggggacggaagtgcgagtccgggccctgtatgactatgaggggcaggagcatgatgagctgagcttcaaggctggggatgagctgaccaagatggaggacgaggatgagcagggctggtgcaagggacgcttggacaacgggcaagttggcctatacccggcaaattatgtggaggcgatccagtgatgagtcggggacaggccagcggggggacggaggcggcgggcccaggagcctcagccagccacgtgggcatccactccttttcctgcaagagatgatggttccattgctcttggcttcatggtgttcctggaaggcagatgagctggtcatttcgcctgggactcggcacctttccgagtgcagctggagggatctgagcgcaggaagacgcagaacaacagaaatagccgcccctccccgcccactgtgcctgttggcctatcatagatctctatgttcttgactttgtctctcctttccgagtcaatggtgggttacactgatcttgttccactgattactctctctgacgagtccatcacctgcaacttaaatgaacaagcttacatcccattttgagtgaagattttgaggtttttaatttaaaggctgtgtacagttatacttttttatacacctgttcatttctacttaaattatggcacagattgatgcgcaccagtcttgaggaaacgatctccctattcccttaccctgttactcagccacgccgtgtgtaggcttagcctcaggtggcagatgtttgaggaaaggaattatgccaggaaggtgggaccgggttatggtcgggtttctattgggaatgctctttgtgcttttgggcatctgaatggaagctttacatagaaccttaggtagaactcccccaaatcgccatatttaaaaattattttcactctattcttgcttaaaactgtactcttttgcaaattaacaattttatcactgattcagagttaaaaagaagactaacttttcaagcaaatgcatctgtaaagatgctttagattagactgtcatgtctcagtgtctatctgtatatattatttgatattcagagaatctaaagcactcgtctactgttttaatgagatttaacagcttttaacagtgagtttcgtttgtaaactgcttgaagtctgtggcattcaggcacacrtctggctggccggctgggtctcctcccgggctcagtgggcctggggcctctctgacgtggtgcctgctggagggaggctcgtcgtcaccagctgactgctggtccggcttctgaccggcctttgtcctggctccgtagcagaacactgtaaaagtgcccgcgtctttgcagtagttgcagatttcagtcgtcgtgttacttgtgcacaaacagaagctgggtcttacccgcagcacgagtgtctcgggctgcccggagtcgcccgggagcaggtgctgcagccagagttacgcgggggccacgcgggccggcgggggtggggggaacgtgggggaacctgtgtttcacgtgactcagcagtgcccgccgccgtcaccagctatgcattcactccgtttccagtgagcagatgtcttgcttggaaagtggacctgtgtctgtgtctgtcctgagaacttaccagcagaaatcctcatttctgtgctacggatttaccaaaaattgtcaagtctttttcagtttaacagttcctttamatgtgtagtatttgaggaaaaaaatcaataaacagttgatctcgtgcaaaaaaaaaaaaaaaaaaaaaaaaaaaaaaaaaaaa

SEQ ID NO: 112 - DNA, 490 bp, Homo sapiens
  SITE (101): n equals a,t,g, or c
  SITE (305): n equals a,t,g, or c
  SITE (452): n equals a,t,g, or c
  SITE (473): n equals a,t,g, or c
gcactgtggctaattgtagctcaaaagatctgcagagctcccagggcggacagcagcctcgggtgcaatcctggagccccccagtgaggggtatacctcanttaccatgtgccaaagcattatacaactatgaaggaaaagagcctggagaccttaaattcagcaaaggtgacatcatcattttgcgaagacaagtggatgaaaattggtaccatggggaagtcaatggaatccatggctttttccccaccaactttgtgcagattattaaaccgttacctcagcccccacctcagtgcaaagcnttttatgactttgaagtgaaagacaaggaagcagacaaagattgccttccatttgcaaaggatgatgttctgactgtgatccgaagagtggatgaaaactggggctgaaggaatgctggcagacaaaataggaatatttccaatttncatatgttggagtttaactcnggctgctaacactggat

SEQ ID NO: 113 - DNA, 381 bp, Homo sapiens
  SITE (321): n equals a,t,g, or c
  SITE (360): n equals a,t,g, or c
  SITE (380): n equals a,t,g, or c
agaaatatgcttgttttagcatctaaaatgattattggatactgttcataatcatcatgggagctacaatttttaattgcttcaactcaattttagtataaatatgacctaatcatttgttcagctgaagaaacttttctgctggtgacactgcaattagcaaatacttcgggttaattcctgaaaacctgatgcagaaaatcagattttcttctaagcttgtaatgatgctttgcaaaggtttccttaaggcttgaaatagtattcactattttccatttagctttaaagcatactgtattcagaagttgatatccacantctttcttttagggaaacaaattaggcagcccaggatanggatttttaattgggcaganc

SEQ ID NO: 114 - DNA, 887 bp, Homo sapiens
  SITE (201): n equals a,t,g, or c
  SITE (715): n equals a,t,g, or c
  SITE (786): n equals a,t,g, or c
  SITE (805): n equals a,t,g, or c
  SITE (824): n equals a,t,g, or c
  SITE (863): n equals a,t,g, or c
gcccggattgcccgagacttgcagggatccccagagcacaagactaaacctggaaaagccccagaaaaatcgagagagttttccccctacatcgacatcaatggtacttgtgacaagctgactcccttctggttcaccctctggagccaacggggaaagtgtgaagaccagaaggtggaatgcctgtacgaggcgctgaanagagctggagacaggctcctgggctccttccccacggccgtgcctctggctctccactcctccatcagctacctcggcttcttcgtcagtggcagccccgcagacgtcatccgggaattcgccatgaccttcgccacggaagcatctctcttarcagactgctccgtgaagccttgcaccaaacagctgcatctgaccttggcccacaagttctacccccaccaccagaggacgctggagcagctggccagagccatccccctgggccacagctgccagtggaccgcagcactctactcccgagacatgcgctttgtgcactaccagaccctgagagccctattccagtacaaaccccagaacgtggatgagctgacgctaagtcctggtgactacatctttgtggaccccacgcagcaggacgaagccagcgagggctgggtgattgggatctcacagcggacgggctgccggggcttcctgccggaaaattacacgggttcgagccagtgantttggacacgtgggtgaagcacaggatgttacaccttcagtctaagccacagacctgaattccagaaaggntggtgaagccagcagcagntgcagcgggggatttcttncacaaacggcaaagatcttagcagtttacaaggctttgnaggttacgtttgcaaggaagaatt

SEQ ID NO: 115 - DNA, 2803 bp, Homo sapiens
gcggccgccaatttttttttttttttttttttttgctttctcaaagacagacacagtttatttataaaccaaagaggccaggagcctactagccacccccatccccttccctcttcctgagcacagacatggctcccccacctcctcacaaggtttttggtacaaactgtggtttggcctaragcatccctaaggaccctggtggggcagggtaccctctgctcccaccacctgggatgtgctggggaacgtggagtggggcagcctgatattgatatcccgcggccccggccagggctctggagctgctcttccctgggctctgcagcttggggtcctgggccacctcagacgcaggcccgaggttgggctggggaggagggggtcacccgtccacatcccagctgaagaggtggtgcttcaccagcatgtcccggacgccctccttcaggggctgctgcgcctctctcttcgcagggagctcccagtcctgggagaggctgaaggcaaagcagcagaggactcggagctcacacttgatctggacccagcccgggctgcgcaggaaggaccagggctggtaccacttctccacggtgggcaggctggagcagagcacctccagccacaggtgcagcacctgctcattgagccccacgcagatcagtgagcggagcttcacatccatttgtgcatgcactgcatcgtgggtcacgttcacagactgcacagcccggtagagcagctcctccggggtcaggactttgccatcttcatccaacctgaaggtcttacagagcaccagacgggaatacacggaggcaaagtctctctcgacctcccggcctgcagcctcctcgataamcagccaggggtggcaggcgcccccaagcagggatggcttcttcagtccatgttcgaacagggccttaagggccgggcagagggtccctcgcacgaggtctgtgaccccctccgtcaccgagtcatcccccgcgatggagtactctttgctgcgctcatccaggacttccacgaacttggctggaaaccagcctcgcaggccgttgagctcccccacccagcagtgctcgtccttctgagacacgattgtgatgatgtcgttcttgcggaagcccagctcgtcgtcgtcgtgccgctcaaagtccagcagggccttggctcggcgccggtggctgcgtgagcacgccacgtagttctcgtggtcccgctggtggctctccatgctatagtctggagtcagctccacgctgcagtttttggggtctgtgcactggaagtggcgtgccacgcgcaggatggcttcccggaggtcagccaccagttccgtctgcttgatgttcttggccttgagtgcctccaggtcatcctccccgaagagcagagcagtgatggtggacttcctccgctgggtcctgcggcgaacaacctgagagaggttggtgagggtgccggcccccaggagctggccctggtctgcaatgagataggccaggtgcttgcggcgctgagtctccacggccacatcggtgagggagccggccagccgcatggccacccccagaagcagctccgcgtcctccatctgcgacgggatatccgatagcgtgttgaagatggaggccgagttctctgactggatcagctcttcctccttgaggtgcagcatgcccagcgtgagctggaacagcacccgggagccctcgtagaaaaacaggtcccagatgcgcaggagcagcttgatgtccaccacgctggcgaaggccgtgaggaaccagtgcagtgtgatcagggacagctcaatgtcatgctcctggagcagcttgtccaggcgaggcaggtactggacaatgaggtggcgcaggacccgctggtcagtctggacacccagcagggtggtgctgaagtaggaggcggggagcaggtcctcgatgatggcagacatcatccagaaggcgtcctcctcctccaggaacagcaggaggcaggcggccaccatgccggtgccctggcagtagccgatctctgggtagagccaggccagggcccggagcaccctgcgcaggcggggcaccccgatgctacccatgctggcgaagcaggcgttgctgggcatggtgcggagcaggtccttctcgatctgcttggcagcgatggtctcatcgttggagctgttcttcacaatctcgcggtaggacagctcagagttcctcttcttctgcagggccccagagagccgcatccacagctgtggcctcatgccatgtgggatgccggccagcaccagggagcggagcttctcagagcggggtagggagacggcaatcttgtcccaggtgagatcccccacatcgtggttatgggtgaactccaggtgggcctgccaccgcagcctctgtggagcatcctccatcagaggggagttcgccagcagactggagccaggctcatcaccttcttccttgtacacacggaaaccaaactcatcgtagtagaactctggttgctctgctgactcttccttctgcgtgtacttggccaagatctcctggggccatatgctcggagtcagggctgagaaagggccacaggcaggtgtatggcttcctgacattgtgctggtgggctggcaagtcttctgcagctccaatcttagaagtctcctatcctgctatcttagagctggaaggctcctcaggcttcatctggtccagaatcatctgccctgccccacgggccacctcagcgccaatccgggtcgggttagcagcttccccrctcc

SEQ ID NO: 116 - DNA, 520 bp, Homo sapiens
  SITE (421): n equals a,t,g, or c
  SITE (512): n equals a,t,g, or c
gctggcgacgtcatcaaagtcttggatgcttccaacaaggattggtggtggggccagatcgacgatgaggagggatggtttcctgccagctttgtgaggctctgggtgaaccaggaggatgaggtggaggaggggcccagcgatgtgcagaacggacacctggaccccaattcagactgcctctgtctggggcgggcactacagaaccgggaccagatgcgggccaatgtcatcaatgagataatgagcactgagcgtcactacatcaagcacctcaaggatatttgtgagggctatctgaagcagtgccggaagagaagggacatgttcagtgacgagcaactgaaggtaatctttgggaacattgaagatatctacagatttcagatgggctttgtgagagacctggagaaacagtatnacaatgatgacccccacctcagcgagataggaccctgcttcctagagcaccaagtagaattcagcttggacttaaccaggctgaacttgcnaaaggggg

SEQ ID NO: 117 - DNA, 530 bp, Homo sapiens
  SITE (515): n equals a,t,g, or c
  SITE (525): n equals a,t,g, or c
gtcatatctctgtagatttttgtgtatttaaactatttcacaattttttaaagtattaattttaaaaagcttgtgtttggagatgtgagtattcttccctccttttttcaacaaactagggcttagaaaagtgcttgtatcttaatgcagtatgcaggtttccagggaaaatgtgtaaatgtctttatacccttcgatgctgctgcccaccagtgatgtaaatcacaaagcataacycttgttttgttctgttgagcagcatgagatactttgatagagcagccttatttgtggaagcttgcctcaagtatggagcatttgaagtcactgaggacacagagaaactcatcactgctatatatgcagattatgcccggagtttgaagaacctcggttttaagcagggagcagttctctttgcttcaaaagccggagcagctggcaaagacttattgaatgagcttgagttccccaaggaagaacccatggaagagtgacagcctaataaatgccanggaatctganctgga

SEQ ID NO: 118 - DNA, 3103 bp, Homo sapiens
ggaagaagggtctcgggtccctaagccacgggagaacctgcagttttggaggatttgacttgacgaatcgctctctgcacgttggcagtaataattctgacccaatgggtaaagaaggagactttgtgtacaaagaagtcatcaaatcacctactgcctctcgcatctctcttgggaaaaaggtgaaatcagtgaaagagacgatgagaaagagaatgtctaaaaaatacagcagctctgtctctgagcaggactcgggccttgatggaatgcctggctcccctccgccttcacagcccgaccccgaacacttggacaagcccaagctcaaggccgggggttctgtagaaagtcttcgcagttctctcagtgggcagagctccatgagcggtgcaaacagtgagcaccactgattcctgcaaccagcaaccgggaaagcgtcaagtcggaagatggggatgacgaagagccgccttaccgaggcccgttctgcgggcgtgccagggtgcacaccgacttcacccccagtccctatgacacagactcactcaagctcaagaaaggagatatcatcgatataatcagcaagccacccatggggacctggatgggcctgctgaacaacaaagtcggcacgttcaagttcatctacgtggacgtgctcagtgaagacgaggagaaacccaaacgccccaccaggaggcgtcggaaaggacgaccaccccagcccaagtctgtggaggatctcctggatcggattaacctaaaaragcacatgcccactttcctgttcaatggatatgaagatttggacacctttaagctgctggaggaggaagacttggatgagttaaatatcagggacccggaacacagagctgttctcttgacagcagtggagctgttacaagagtatgacagtaacagcgaccagtcaggatcccaggagaagctgctcgttgacagccagggcctgagtggatgctcaccccgagactcaggatgctacgaaagcagtgagaacctggaaaacggcaagactcggaaagctagcctcctatctgccaagtcatccaccgagcccagcttgaagtcttttagcagaaaccagttgggcaattacccaacattgcctttaatgaaatcaggggatgcactgaagcagggacaggaggagggcaggctgggtggtggccttgccccagacacgtccaagagctgtgacccacctggtgtgactggtttgaataaaaaccgaagaagcctcccagtttccatctgccggagctgtgagaccctggagggcccccagactgtggacacttggccccgatcccattccctggatgaccttcaagtggagcctggtgctgagcaagacgtgcctaccgaggtgacagaaccgccccctcagattgtacctgaagtgccacagaagacgaccgcctcttccacgaaggcccagcccctggagcaagactctgctgtcgacaatgcattgctactgacccaaagcaagagattttctgaacctcagaaattgacaactaagaaactggagggctcaatcgcagcctctggtcgcggcctgtcaccccctcagtgtttgcccagaaactatgatgctcagcctcctggagctaaacacggtttagcaaggacgcctctggagggccacagaaaaggacacgagtttgaaggaacacaccatcccctgggcaccaaagaaggggtagatgctgagcagagaatgcagcccaaaattccatcacagcctccacctgttcctgccaaaaagagcagagaacgccttgctaacggactccaccctgttcccatgggccccagtggggccctccccagtcccgatgcgccatgcctgccagtgaaaaggggcagccccgccagccccaccagccctagcgactgtcccccagcactggctcccaggcctctctcagggcaggcgcctggcagcccaccaagcacaaggccgcccccctggctctcagagctccccgagaacacaagcctccaggagcacggtgtgaagctgggcccggctttgaccaggaaggtctcctgtgcccggggagtggatctagaaacgctcactgaaaacaagctgcacgctgaaggcatcgatctcacggaggagccgtattctgataagcatggccgctgtgggattcctgaagccctggtgcagagatacgcagaggacttggatcagcccgagcgggacgtcgccgccaacatggaccagatccgggtgaagcagcttcggaagcagcaccgcatggcgattccaagtggtggactcacggaaatctgccgaaagcccgtctctcctgggtgcatttcgtctgtgtcagattggctcatttccatcggtctgcccatgtacgccggcaccctctccaccgcgggcttcagcacactgagccaagtgccttctctgtctcacacttgccttcaggaggccggcatcacagaggagagacacataagaaagctcctatctgcagccagactcttcaaactgccgccaggccctgaggccatgtagccaggcccggaatgggcctctctggacaagagccaccctttcactgtgcatatgatgctgatgcaattcctccatcatctctggacgtgcagaccagatccagaagaaaggcctggcgtgtggccaaacagcgtgaaaccttggcacaggactgaggatcctctcctccagaaaagccccctcgaggaaataaattagtgcggttctctttgacctccaaagacaagacaagcacttatttttattttcagaagacaaaagaaccaagatgccaactggctgcgaatgctctatctccagtctgtctctgtgtactggtagaggctgggaggagtagggggcagcctgttccatttctgatagtgcccttgctcttctgtctgtcatcttgcaggatgcccgagggccagatgggcttagctaggccaaagtaacagactcaagagttattgtacattactgaccacgctcatttgttcaaaagttagaacatctggctgcaccaggaaaaaaaaaaaaaaaaaactcgagacc

SEQ ID NO: 119 - DNA, 351 bp, Homo sapiens
  SITE (85): n equals a,t,g, or c
  SITE (341): n equals a,t,g, or c
ggcagaggaggaaatcagcatccagcaggatgaggacctggtcatctttagcgagacctcactggatggctggctgcagggccanaacagccgtggggagacagggctctttcctgcctcttatgtggagatcgtccgttctggcatcagcaccaaccatgctgactactccagcagccctgcaggcttctcccggagcccaggtgagcttgtgacaacagccccagtgtggccagcccagctaggagtggtgggggcagtggcttcctctcaaaccagggtagctttgaggaggatgatggatgatggactggggatgactggggacgacggatgcacantggtgggagg

SEQ ID NO: 120 - DNA, 1237 bp, Homo sapiens
  SITE (320): n equals a,t,g, or c
  SITE (1225): n equals a,t,g, or c
  SITE (1231): n equals a,t,g, or c
  SITE (1236): n equals a,t,g, or c
aattccgattgcaccacagcactctggcctgggsaacaagagcaagactccatcccccacaacccccccaaaaaataacagacaaaagagaagcagttggagccacgagggtacctttctcctgagagagatccaagtgmgacagaagaagactagagaagagaaccaaagatttatccagtgagaaatacttaccattctgggagggaggagaaagagggccctggaggacttagagagggtccctagagagacakggtaagaacctggacatttctgtgcagaaggagatggttttgaggcagtgggtgaggggtccntgcatytkagaagktccgagtggggtgaattttgtgtggacttcatcttcgacgacacttgtttcattgcgaaggccactgtttgcttcctccctgcatttgccaagacatctaacatatcctgatattgctttttsaggtcagaatgaaggaacgatttccgtagttgaaggagaaacattgtatgtcatagaggaagacaaaggcgatggctggacccgcattcggagaaatgaagatgaagagggttatgtccccacttcatatgtcgaagtctgtttggacaaaaatgccaaaggtgctaagacttatatttaataccataaaaaaaaaaaacttaaaaaaaatggagttgtttctccccacaaccgtgactgttacaggcagttcctcaagagactggctggcaagcaccataatgcacgttctcctgtagtctcacgtggacttcagggtccgggcacctgaattgccttgtctagtttgggctgtaatcaagtttcacttgctgatgaaattttatgtggaaagctgccaaccgccaacttacagctatgtcattcaaaatctgataaacatttcttcttttggcggtatctgtagattaaaaaaaaagttgcattgtagcttctcatctttctgaatttaaaagccggcacgcatcatgcaggtgccaaagacttccctactcttgtttatatctagtatccaccatacactgagctacattaggtggttacagattgtaacttaataaactgaactgtgttagtttgttaaattgtatactcattcacttgggaggaagtcacaagtgaaataacatctccttcttgactaaagcagtaaataagattcttatattggcaaaaaaaaaaaaaaaaraaagggcgcccttttaaagnacccangtttnc

SEQ ID NO: 121 - DNA, 412 bp, Homo sapiens
cgtgggctcctgaagcttctagccggagcatccaccaagaagaagtcacgctccccgccatctgtgtctccaacccacgacccccaggtggccgtggacgccctgctccaaggtgcagtgggccccgaagtgtcctcactgtccatccacggcagggcagggtcctgccccatagagagcgagatgcagggtgccatggggatggagcctctgcacaggaaggcaggctccttggatctaaacttcacatctccttcccggcaagctccgctgtccatggctgccatccgccccgagcccaagctgttgcccagagagaggtaccgcgtggtggtctcgtamccamcccagagtgaggcggagatcgagctgaaggaaggcgacatcgtctttgtgcacaagaagcgtgatg

SEQ ID NO: 122 - DNA, 501 bp, Homo sapiens
  SITE (222): n equals a,t,g, or c
  SITE (225): n equals a,t,g, or c
  SITE (491): n equals a,t,g, or c
  SITE (498): n equals a,t,g, or c
  SITE (500): n equals a,t,g, or c
gccatagtggagtttgactaccaggcccagcacgatgatgagctgacgatmagcgtgggtgaaatcatcaccaacatcaggaaggaggatggaggctggtgggagggacagatcaacggcaggagaggtttgttccctgacaactttgtaagagaaataaagaaagagatgaagaaagaccctctcaccaacaaagctccagaaaagcccctgcacgaagtnmcnagtggaaactctttgctgtcttctgaaacgattttaagaaccaataagagaggcgagcgacggaggcsccggtgccaggtggcattcagctacctgccccagaatgacgatgaacttgagctgaaattggcgacatcatagaggtggtaggagaggtagaggaaggatggtgggaaggtgttctcaacgggaagactggatgtttccttccaacttcatcaaggastgtcaagggatccgatgagcttgctttcccagatgagcanttccaancna

SEQ ID NO: 123 - DNA, 1023 bp, Homo sapiens
  SITE (18): n equals a,t,g, or c
  SITE (145): n equals a,t,g, or c
gggtacgccgtgcaaggntaccggggtccggaattcccgggtcgacccacgcgtccgcgggactcagcgggttctcctggataacgtcctgtcggaagaacagtgccgggagctccacagcgtggccagtggaatcatgcttgtnggtgatggatacagaggaaaaacttcaccccatacacccaatgaaaagtttgaaggtgcaactgtcctgaaagcactcaaatctggttatgaaggtcgagtcccactgaagagcgctcgtctgttttatgacatcagcgaaaaggctcgaaggattgtagaatcttattttatgctgaactcaactctgtatttttcctatacacacatggtctgccgaacagccctgtctggtcagcaggatagaagaaatgacctcagtcatcccatccatgctgacaactgtttgttggatccagaggccaacgaatgctggaaggagcctcctgcttacacatttcgagactatagtgctctcctatatatgaatgatgactttgaaggaggagaattcatattcacagagatggatgctaagactgtgactgcctctataaaaccaaaatgtgggcgcatgatcagcttctcatctggaggagagaaccctcatggggtgaaggcagtcaccaagggaaagaggtgtgctgtggctctgtggttcaccttggacccactttatagagaattggagcgaatacaggctgatgaagtgattgcaattctggatcaagaacagcaagggaagcatgaactgaatatcaaccctaaagatgagctataaaaatgagaaagaatgttctatcaaatatttatttaaattgttaatcttatgagaacctttttatttttgtacagagccatggtataaattaacaggttaatgtcagtcatcagatcttccttctcttcctaaggatgcttgtgttgcctcaatctatcaatctatctttcttgttttgggktgktttctctctctctctctctctctctcgtcctaaa

SEQ ID NO: 124 - DNA, 1558 bp, Homo sapiens
ccacgcgtccgagaaatcatcaggaatgtgaaaaagctacaggaggaagggtggctggaaggagaactaaatgggagaagaggaatgttccctgacaatttcgttaaggaaattaaaagagagacggaattcaaggatgacagtttgcccatcaaacgggaaaggcatgggaatgtagcaagtcttgtacaacgaataagcacctatggacttccagctggaggaattcagccacatccacaaaccaaaaacattaagaagaagaccaagaagcgtcagtgtaaagttctttttgagtacattccacaaaatgaggatgaactggagctgaaagtgggagatattattgatattaatgaagaggtagaagaaggctggtggagtggaaccctgaataacaagttgggactgtttccctcaaattttgtgaaagaattagaggtaacagatgatggtgaaactcatgaagcccaggacgattcagaaactgttttggctgggcctacttcacctataccttctctgggaaatgtgagtgaaactgcatctggatcagttacacagccaaagaaaattcgaggaattggatttggagacatttttaaagaaggctctgtgaaacttcggacaagaacatccagtagtgaaacagaagagaaaaaaccagaaaagcccttaatcctacagtcactgggacccaaaactcagagtgtggagataacaaaaacagataccgaaggtaaaattaaagctaaagaatattgtagaacattatttgcctatgaaggtactaatgaagatgaacttacttttaaagagggggagataatccatttgataagtaaggagactggagaagctggctggtggaggggcgaacttaatggtaaagaaggagtatttccagacaattttgctgtccagataaatgaacttgataaagactttccaaaaccaaagaaaccaccacctcctgctaaggctccagctccaaagcctgaactgatagctgcagagaagaaatatttttctttaaagcctgaagaaaaggatgaaaaatcaacactggaacagaaaccttctaaaccagcagctccacaagtcccacccaagaaacctactccacctaccaaagccagtaatttattgagatcttctggaacagtgtacccaaagcgacctgaaaaaccagttcctccaccacctcctatagccaagattaatggggaagtttctagcatttcatcaaaatttgaaactgagccagtatcaaaactaaagctagattctgaacagctgccccttagaccaaaatcagtagactttgattcacttacagtaaggacctccaaagaaacagatgttgtaaattttgatgacatagcttcctcagaaaacttgcttcatctcactgcaaatagaccaaagatgcctggaagaaggttgccgggccgtttcaatggtggacattctccaactcacagccccgaaaaaatcttgaagttaccaaaagaagaagacagtgccaacctgaagccatctgaaaaaaaaaaaaaaa

SEQ ID NO: 125 - DNA, 4210 bp, Homo sapiens
gagaagttagttgcaatttattgaatgtaggagtactcacacagtttatttgaatatgaaatagatccagatttcttatgtatggtctccggttttccataccgattgatagttcagggctgctttgacataaatactgtgcttctactgccacctacagatgattagtgggtcttggagctcttcacctttaccccttctaaagtctctttgaaattgaaataattttttttaaaagctattaattggtagaatattataaaatattttaatgttactttatgaatatttctatattatattacataatactatataatatgtagctttatataatagatatgaatgtattcctctaaaacaaggtggccaatcttctggcttcccttggccacattgggagaactgtcttgggccacacataaaatacactaacactaatgatagctgatgatcaaaaaaaaaatcatggaaaaaactcataatattttagaaaggaggaagaagaaaaacaaaagcgactccaggaagaaaaaaaacacaagaaaaaattcaagaagaggaacggaaagctgaggagaaacaacgtgagacagctagtgttttggtgaattatagagcattatacccctttgaagcaaggaaccatgatgagatgagttttaattctggagatataattcaggttgatgaaaaaaccgtaggagaacctggttggctttatggtagttttcaaggaaattttggctggtttccatgcaattatgtagaaaaaatgccatcaagtgaaaatgaaaaagctgtatctccaaagaaggccttacttcctcctacagtttctttatctgctacctcaacttcctctgaaccactttcttcaaatcaaccagcatcagtgactgattatcaaaatgtatctttttcaaacctaactgtaaatacatcatggcagaaaaaatcagccttcactcgaactgtgtcccctggatctgtatcacctattcatggacagggacaagtggtagaaaacttaaaagcacaggccctttgttcctggactgcaaagaaagataaccacttgaacttctcaaaacatgacattattactgtcttggagcagcaagaaaattggtggtttggggaggtgcatggaggaagaggatggtttcccaaatcttatgtcaagatcattcctgggagtgaagtaaaacgggaagaaccagaagctttgtatgcagctgtaaataagaaacctacctcggcagcctattcagttggagaagaatatattgcactttatccatattcaagtgtggaacctggagatttgactttcacagaaggtgaagaaatattggtgacccagaaagatggagagtggtggacaggaagtattggagatagaagtggaatttttccatcaaactatgtcaaaccaaaggatcaagagagttttgggagtgctagcaagtctggagcatcaaataaaaaacctgagattgctcaggtaacttcagcatatgttgcttctggttctgaacaacttagccttgcaccaggacagttaatattaattctaaagaaaaatacaagtgggtggtggcaaggagagttacaggccagaggaaaaaagcgacagaaaggatggtttcctgccagtcatgttaaacttttgggtccaagtagtgaaagagccacacctgcctttcatcctgtatgtcaggtgattgctatgtatgactatgcagcaaataatgaagatgagctcagtttctccaagggacaactcattaatgttatgaacaaagatgatcctgattggtggcaaggagagatcaacggggtgactggtctctttccttcaaactacgttaagatgacgacagactcagatccaagtcaacagtggtgtgctgatctgcaagccctggacacaatgcagccaattgagaggaaaagacagggctatattcatgagctgattcagaccgaagagcggacatggctgaccttcagctcgtcgtcgaggtttttcagaaacgcatggcagagtcaggctttctcactgaaggggagatggccctgatttttgttaactggaaggagctcatcatgtccaacacaaagctgctgaaggctttgcgggtgcggaagaagaccgggggcgagaagatgccggtgcagatgattggggacatcctggccgctgagctgtcccacatgcaggcttacatcaggttctgcagctgccagcttaatggagcagctctgttacagcagaagacagatgaagacacagatttcaaagaatttttaaagaagctggcatctgacccgcggtgtaaaggaatgcccctctccagcttcctgctgaaacccatgcagaggatcacccgctacccactgctcatcagaagtattctggagaacaccccggagagccatgcagaccattcctccctaaagctggccctcgagcgggcagaggagctgtgctctcaagtgaatgagggagttcgggagaaggaaaactcggaccgactggagtggatccaggcgcacgtgcagtgtgaaggcctcgcggagcaacttattttcaactctctcaccaactgcctggggccccggaagctcttacacagtgggaaaytatacaagaccaagagcaacaaggaactgcacggattcctcttcaatgacttcctgcttcttacctacatggtcaagcagtttgctgtttcctctggctctgagaaacttttcagctcgaagtccaatgctcaattcaaaatgtataaaacgcccattttcctgaatgaagtcttggtgaaactgcccacagacccttccagcgatgagcctgtcttccacatttcccacattgatcgggtctacaccctccgaacagacaacattaatgagaggaccacctgggtgcagaagatcaaggcggcgtctgagcagtacatcgacaccgagaagaagaagcgtgagaaagcttaccaagcccgctcccaaaagacttcaggcattgggcgcctgatggtgcatgtcattgaagctacagaattaaaagcctgcaaaccaaatggaaagagcaacccatactgtgaaatcagcatgggctcccagagctacaccaccaggaccatccaggacacactcaatcccaagtggaattttaactgccagttctttattaaggatctctaccaagacgtgctgtgtctcaccctgtttgacagagaccagttttcaccagatgatttcctgggtcgtactgaaattccagtggcaaaaattcgaacagaacaggaaagcaaaggccctatgacccgccgactgctgctgcatgaggtccccaccggggaggtctgggtccgttttgacctgcagctttttgagcaaaaaactctcctgtaggggttctaaaggacagcaccagcgggacagcccacaaggctggggctggagaatgagagactgcgctctcttggggctgagggagcaccatgcagcttcacccctcacaaagccatgcacgctgggggctctgttttcctgcacactaaatagctagcaatctatgcaaacacctttcccataaagaaaccaaaccccatagtacagtgccttgtcctagtgttcacatgttcagctctgtttgtttagatgccaaggtttccattttcagggctataaaaagtattacttggaaatgaggcatcagaccaccagatgttaccgctcggttgaatgtgtccaccgtggagtggtttggtgacgctgtaaccattccacgccagtgacctctgctgggtcacagccactcaggaggggaagggtcaggatgagaggctgcagcctcgacacttggcgcggcctgatactgaaatagcgtctactcgtgcactgaataaaaacagaaacttgatcattttattcctgattagattttatcactctctgctaagacaatatagtctggagtataagtgggaaagcttgatttaaatactgtgaactctaataatgtggaaaatatttttcaactttaattttctgaagtataaattatttatgtaaattcattgtttttgcatatttcttaggacatgcatctttaagctttatcattgcccatatgtacagaaagagaataaagacatatgtttatggatggaaaaaaaaaaaaaaaaaaaaaaaaaaa

SEQ ID NO: 126 - DNA, 529 bp, Homo sapiens
tcgagtttttttttttttttttttktacttatttgctttataacctgtttgggtaaatttacttcagaggtatcattttctggagatactttctcaggtccatattttaactccaaatctggataccrtctgcttgtttctttmcttacaacmatccagggctctttctcttgctctagtaaygtaatyacatctggyttagaaatggaacttcccagtgakatcaggtggctgtagttctccaacatcacatccctgtacaaggtcctctgatcaggctgcaggcactcccactcctcctgagagaagtcaatggccacatccctgaatgtcactgatccatggaccatgttkctagaattacaaaaytggtcaatcttcctcgggcttctcccccttgactttaggtgtgcagcagtaacgctctcatcctcctccaggtccttcttttggataaaaatacgakctgagcgcctccccctaggccacccgcactgtcgggtcagtcaggctggagccccaatccgca

SEQ ID NO: 127 - DNA, 846 bp, Homo sapiens
ctcgtgccgaattcggcacgaggagaatcctattgtaaaatcacttgctaaggctcatgagaggctagaagattccaaactagaagctgtcagtgacaataacttggaattagtcaatgaaattcttgaagacatcactcctctaataaatgtggatgaaaatgtggcagaattggttggtatactcaaagaactcacttccagtcactgttggaggcccatgatattgtggcatcaaagtgttatgattcacctccatcaagcccagaaatgaataattcttctatcaataatcagttattaccagtagatgccattcgtattcttggtattcacraaagagctggggaamcactgggtgtgacatttagggttgaaaataatgatctggtaattgcccgaatcctccatgggggaatgatagatcgacaaggtctacttcatgtgggagatataattaaagaagtcaatggccatgaggttggaaataatccaaaggaattacaagaattactgaaaaatattagtgkaagtgtcaccctaaaaatcttaccaagttatagagataccattactcctcaacaggtatttgtgaagtgtcattttgattataatccatacaatgacaacctaataccttgcaaagaagcaggattgaagttttccaaaggagarattcttcagattgtaaatagagaagatccaaattggtggcaggctagccatgtaaaagagggaggaagcgctggtctcattccaagccagttcctggaagagaagagaaaggcatttgttagaagagactgggacaattcaggacctttttgtggaactataagtagcaaa

SEQ ID NO: 128 - DNA, 466 bp, Homo sapiens
  SITE (450): n equals a,t,g, or c
gcacgagaaaaattgtgtctgtctttcttccttaaacaatacagtataacagtaatttgcatagcatttacattaggcattttgtgtagcattgtattaggtataagtaatctagaaatgatttaaattatacaggaggatgtgcataggttatatgcaaatactaggacatttcatatcaaggacttgagcatctgcatgcagattttggtatccatcagagttcctggaaccaattcaccacagataccaagggacaactgcacagattaaaaccttaatgcattactaccgtgtacccaccataataactaaaatgggaagaaatagaaatgctaggtattggtgacgatatggggccactgggaactcgagtactggtgaatataccccakgaccyagcattccttcccymagtattttccccamcagaagtgtgtagcctttttnaccacaagacctatac

SEQ ID NO: 129 - DNA, 457 bp, Homo sapiens
  SITE (3): n equals a,t,g, or c
  SITE (17): n equals a,t,g, or c
  SITE (78): n equals a,t,g, or c
ctnaggcccaagtttangattgatttgatttgataggataagttttacagttcagacccctttgattaccctggattnaagactcttacacaatatcgggggggaaccacagttaatgcctgcttctgactgaagycctcttgaacaggcagagacatcctcctgacaaccaggatggcataatcttagttcaggatctggggaaaagctattttgaatgtaaaactgggtacaggtggtaccattccagtgtcttacgtgaagatcccaggaaagttggacctaagttttcctcaagagggcagactaaaatacaaccagggcatatgccggtcctgcagcctaataaatagccccaaagactggtgtaaaaagaaggcttttccatcaactacagaagaggaaaatagtggtggacaaaaatcagcagcagctaccaaaggaatgctcccagtgg

SEQ ID NO: 130 - DNA, 1626 bp, Homo sapiens
  SITE (94): n equals a,t,g, or c
  SITE (1268): n equals a,t,g, or c
  SITE (1274): n equals a,t,g, or c
  SITE (1448): n equals a,t,g, or c
  SITE (1583): n equals a,t,g, or c
  SITE (1604): n equals a,t,g, or c
cccgtttgatttcagagcatttcctgaacattgtatttcatagacttctctgattttttcaaaaatgaggtgagcaatggcaagcagccttgtnctcccaatttggtgcttttccttttggtgtggggtgggcatggggggttgggggtggtgtgggtgtgtttagaaaaaagatgcattcctgaagatctctggtgctgaagggcctcgagttcctttcagagactgtatttgacacactttaggtacacacaaacgaatggtatcacatgcaatattttaatggagcaatgggagaggctctttgaaatggggtttgcatctttttgtaacattttgatttctctggtgccttattcctacttgatgctggcactcacatacccacaagaagctgacacagaagtcagccttaggcgtggggacatatgggtgatgtttgagcatgcaggggccatggggagtttggtgtcagttggtggagaagggactagatggcatctcttagccgaggccaacaggaactgcacaagtccattatagtcaaagttagcaattttgatacgtaaacacaatacttcattcttcctcatctgagctttccttccttcttccttttctatctctaccttctcataaaggtgctgctgctgctgctaaggtgcccggagtccagaatgtccattaatcactcaggcacgagcctggcactgccacgtcagcccccagcatgaccaaacccaggtttctcttgcttggggctgagaactgtcagatttttctcatcaaaaatgttttccaaggaatcagtggattacagtttttctgcattgaaaatgcactttaaaaaataaattaaagctccagactgtttaaaatatacagagggagcaggggaaagttaagcatgtgctagtgtctgaacccagttcagtttatctccagttgaaacgatatacactatattatgtataaatgtatacacacttcctatatgtatccacatatatatagtgtatatattatacatgtataggtgtgtatatgtgcatatatacacacatgcacataacaaaatcagatgctcattacaaatccagatgctcattacaaaaccagatgctacacaaacagcagcagaggaaacaaggttggactcttgcaacagatcacaaaaaataaaaacagctacttgcagtgactttggtcatttctgtatgttcataaagaatggattgtaacaaggaaaaaaaggaacagtgttagtngaaaanggaaaaatgggcgaaaccatcttgatccgatgcgaatsmgtaatgktctatataccatttcatcagtattcwtttagtcatgtgattgattcagttctgctatgaaacattktaacwcgtacccacaactgacaactactcgtgagcsttcattaggagtgacctaactttgcntgcctgctcatgggacgagctccttaggtggagataccggggaatagagaaagatgcacgtctctgcgttgtcgcgtgctttgaggggcggtctttaccttccgtgttggagtcctccctgagtccggcgctggntgcgggacacggcccttctcngtgtcccaggcgctgcctcatt

SEQ ID NO: 131 - DNA, 2278 bp, Homo sapiens
  SITE (2097): n equals a,t,g, or c
  SITE (2246): n equals a,t,g, or c
ttcatgatttcccagcagagcaagttgatgatttgaacctcacttctggagaaattgtttatcttctggagaagatagatacagattggtacagagggaactgtagaaaccagattggcatatttcctgccaactatgtcaaagtgattattgatatcccagaaggaggaaatgggaaaagagaatgtgtttcatctcattgtgttaaaggctcaagatgtgttgctcggtttgaatatattggagagcagaaggatgagttgagtttctcagagggagaaattattattcttaaagagtatgtgaatgaggaatgggccagaggagaagttcgaggcagaactgggattttccccctgaactttgtggagcctgttgaggattatcccacctctggtgcaaatgttttaagcacaaaggtaccactgaaaaccaaaraagaagattctggctcaaactctcaggttaacagtcttccggcagaatggtgtgaagctcttcacagttttacagcagagaccagtgatgacttatcattcamgaggggagaccggatccagattctggaacgtctggattctgactggtgcaggggcagactgcaggacagggaggggatcttcccagcagtgtttgtgaggccctgcccagctgaggcaaaaagtatgttggccatagtaccgaaggggaggaaggccaaagccttatatgatttccgaggggagaatgaagatgaactttycttcaaggctggaratataataacagagctggaatctgtagatgatgactggatgagtggagaacttatgggaaaatctggaatatttcccaaaaactacatacagtttctacagatcagctagaggagaagcttgtctgtgttccttggcacaagaactcacttgaactatcaccttgactatcagatatgtttttgcactattttttttaactgaaaaagaaatatctaagctgtacatggtacactagaattttctgaaagcagaaaacgttcagattttgtagttaattttcattacaatagaaacatgcacatggaaacccatgagctaggattctaccgaggaaaacatctagtgggattagcaaggtgaagggaaagcatctggtggcatggcagcatggggaggctcacacacagaagttgcacgtggacatctgttttaatcagcacaagtgaattaaccatgcttcttcatttttttactttagttaaaaaagaggacatttaatattctacatgctgtaactatcaggacatggttagcaatctcaatttcatttttgatattcaaattaattcttacagcttgagcatatcagccttattaccagagcaaatccttccttcagatgggatagtttactgactagttggagcatttgtaagcacatggtgaaatcagcccctgcccaccaaaataatctttatgttaccaagtgattcccatttgtctaaggatttgaagggggtctaaattggatgtatcttagtctaaagaaccaaaaccatccctgaaatgccttgctaatacaactaatccttccatatatgtgccatacttatttttttcctcagtgtatactttatgttaacagggttattacaaagcacattttctgaatctgcaatcattcctttgacaattactggacccaaaggaaaattcattttctttgcattattccagtaatatataaaaactgtgtcttgttatagtagtacattatgaatcacatataaaatcttacaatacagaacaactgttaagatggaaaacagtgccaaacctccacagctcatttctttgtaatataatcagaatgaaaaataatttaagaggacagaagactggtacttttttgttttattttttctctagcttatccctgcacaattattagagtgaatgaaaaaccactttcctgctttccattgttataaattctaagcttaagataaaagtggttctttacatgactgaatcaattacaatttatgggctagagccaaataggttgaagacaatcatccaaacagatcaatggaatagaatttcattggaaatgtwnaaacacttycccaacaatggtcatgactttcttctgtttttgagaagagtttcawawgctgggrccmcattttarcttttawtgttttttttttcccatkgyccaaaarrtttagcaacaagkggccmmcttttacggggatacccccnggatttttccaaaaagggaaaatttccttggg

SEQ ID NO: 132 - DNA, 545 bp, Homo sapiens
  SITE (25): n equals a,t,g, or c
  SITE (51): n equals a,t,g, or c
  SITE (71): n equals a,t,g, or c
  SITE (208): n equals a,t,g, or c
caatttgccatttcgccattcaggntgcgcaactgttgggaagggcgatcnggtgcggggccttcttcggntattacggccagctggcgaaagggggatgtgctgcaaggcgattaagttgggtaacggccagggttttcccagtcacgacgttgtaaaacgacggccagtgaattgtaatacgactccctwtrgggsgaattgggtnccgggcccccccysgrgtttttttttttttttttttttttttggcagcagtctgatgcatcatcacacatccaactcaatgtgtgatgtgcatcatacagtgctcttacaagaggagtaaacagtgagacgagcaagcggctgttatttgtctcaaaatgtcttcattctgagaattgcagactgcagataagagctgtcaatcagcagtcatgaacattgttaaaactagcgaagactcttttcaaacttctataaagaagaaaatccaaactccttagccaagcccttataatcaaggtctcccctcgtgccgaaatcctaaagcccgggggatc

SEQ ID NO: 133 - DNA, 362 bp, Homo sapiens
  SITE (248): n equals a,t,g, or c
  SITE (296): n equals a,t,g, or c
  SITE (347): n equals a,t,g, or c
aattcggcacgaggttaaattctgtgataattgttggtttccattatttttattttttatcctcagtgatttaattttatcatacaagatctatcaaatattttccatgttttaagttgtcctgaagcagatccacgttattaatagactaattttaatcttgacaaaatcaaatgcaaagtgatcccaagtttatttctggttctaaatgatcaaaaagaccatcatatttctggcttatctcaatnttctctcatgtggcttcccttgtctagtagctttatattcgtatagtncaattatagctgatacactcttggtaagggttgggggtaaaagttcattgngtaatagcctttttt

SEQ ID NO: 134 - DNA, 984 bp, Homo sapiens
tttttttagagacaggggtctcagaatgttgcccaggctggtcttgaactcctaggctcaagtgatccttctcccacttcatcctcccaaagtgctgagaggaatgcttgagctcaagagtttgagaccagcctggacaacatagcaagactccatttctacttaaaaaaggttgggggtggggggcagaatttcaaaaattattctacagggttatagcaaaaacaaaatatttgtaattttcccataatactagttattataggattctgcccacacacaagtagtactgggttttctctttattttgcattaggatttattccaagttataaaatcacttcattctttaaaatggtgacatcattttccagagtaaaaagagtttcagaaccatttccatactcatggatgtttagcttgtttccctatttttcttctgtttacattacaaacaacactccaaacgacagacaggagaaaaaatagaatgaggtggaagagaagtaagaataaaaacctgggaagttgaggttaattttaaaaaaaaagtacttaaaaaagaacaaatatgatggttaacaataattcccaatatgtaaattacaacaaatatagtcaataaaagttagctcaaaaagagaacgttctgagcacttattacgtgccaagttttcaggacttagaaacaagacaaagtcccagctcttctagattccagggtgaatataagaacactctagggtgaatgtataacttttgaaaaatatttctataaataaattaagcaattcactgaaaaacagaaacaccttaccttacttatcaaatggattatctccccctctttaaaagtaagttcatcttcattagtaccttcataggcaaataatgttctacaatattctttagctgaaataaagaatgtaaataatgtggctcacacaaatggattcattcaacaaatacttatttagcctctac

SEQ ID NO: 135 - DNA, 1303 bp, Homo sapiens
  SITE (1265): n equals a,t,g, or c
  SITE (1267): n equals a,t,g, or c
ttttttttttttttttttttttttttttttacaattgcaaagattttatttagcggctttctgtgcttggcacttagaaacagagttccgtgcataagggcaaatttttgtacaccttttcttcatacatattttacatacccttttattgccccctttttcatattcataatattggattccccactaggcacataaatacatttatctacaacacctcaaaaccagaaactttaataatatctgtattattttacttggtattatttgcatttccacaccatttaaaaattttagcttgcaccaagcttcacttgctttcttaccattaaaagatttgaagggaaagggaaagatgaaggacaaaacccaaaacttcaaaatgcaatgtactatttgataaaaatggagatctaagggcaggtagaagggtatagaagacccatctgcaattccctgggacatgaggggatatttcctgccacagggatagcgggcaggcattytaggtcaggtgtctggatccggcacmtggaggccaggcctctatttgttgcctctgctcttggtatcatcttccgagattataaaactattccttcttcacacccttttattttccttcccctaccaggctgcatgctgtggaatcagcacttcccacgtagtgcacctctcttctggatcacagtggtcaaagctgtgggctcaggatgcattccttgctctgtccytctgaccaatgccctgaccatgytcagtgtgccagagaggtttaytcytcagtaatgccatgattctttccataacctgtagtggggcgggcggggtttggggggacaaaccaaaaacacgtctccttggtgaattaaaattctcatcattgctcacactttctctgtcagtcttgctctccacctcgttcctgttctctattctttctgtttgtctttctcctgttcagcttctctttctccctctttccacgggcaccactgggaatatcaatgatagcatacaagtgaagagagccaaagttcaaaagcaatctttttccggaagccaagtccagttgtactgatgtctttccactctcatccattgggagggtctccaggatacatggttcattccagaagcagaggaagctgcaggggagaaagactggcagctactgctggcccactccatctagagttgtacacagacaaattcttggtgaaagcacccattctgggcctccctccacagagttcacccagttnanagtcagtgtgcatgtatgattgcatgtgtatgaatt

SEQ ID NO: 136 - DNA, 446 bp, Homo sapiens
  SITE (86): n equals a,t,g, or c
  SITE (219): n equals a,t,g, or c
  SITE (417): n equals a,t,g, or c
cacgtggtatttcgctatcaggcagggcgtgaggatgagctgacaatcacggagggtgagtggctggaggtcatagaggagggagntgctgacgaatgggtcaaggctcggaaccagcacggcgaggtaggctttgtccctrascratatctcaacttcccggacctctccctcccaragagcagccaagacagtgacaatccctgcgggcagagcacnagcattcctggcacaggccctgtacagctacaccggacagagtgcagaggagctgagcttccctgagggggcactcatccgtctgctgccccgggcccaaagatggagtagatgacggcttctggaggggagaattttggggccgtgttggggtcttcccctccctgcttggttggaagaactgctttggccccccanggaaacttgaactctctggaccctgaaca

SEQ ID NO: 137 - DNA, 1752 bp, Homo sapiens
gtcaccgatggccagagactccaccctttagctacacttgtggcgacccatccacctacagagtcaccttccccgtctgcccccagaagctgtcactggctcctccgagtgccaaggccagcccccacaaccctggaagctgcggggagccccaggccaagttcctagaagcattctttgaagaacccccaaggaggcaatccccagtgtccaacctgggctcagaaggagaatgtccgagttcaggggctggcagccaagcccaggagcttgcagaggcctgggagggctgtagaaaggacctgctctttcagaagagtccccagaaccacaggccaccttcagtcagtgaccagactggggagaaggaaaattgctaccagcacatgggcaccagcaaaagccctgctccaggattcatccatctacgcaccgagtgtgggcccaggaaagaaccgtgtcaggaaaaggctgcccttgagagggtacttcggcaaaagcaagatgcccaagggttcacacctccccagctgggygccagccaacagtatgcatctgacttccataacgttttgaaggaggagcaggaggcactgtgcttggatctgtggggcacagagaggcgagaggagaggagggagcctgagccccacagcaggcaaggacaagctctgggggtsaagagagggtgccagctccatgagcccagctcggcactgtgtccagctccatccgccaaagtcatcaagatgcccaggggtggcccccaacagctggggacgggggccaacactccagccagggtctttgtggccctctctgattacaaccccctggtgatgtctgccaacctcaaggctgcagaggaggagctggtcttccagaaaargcagttgctaagagtgtggggctctcaggacacccatgatttctacctcagcgagtgcaacaggcaagtgggcaatatccccgggygcctagtggctgagatggaggtggggacagagcagactgataggaggtggcgttctccggcccaagggcacctgccttctgtggcccacctcgaggactttcaggggctcaccatcccccagggttcctccctggtgctccaggggaactccaagagactcccactgtggactccaaagatcatgatagcagctctggactatgatcctggggatgggcaaatggggggccaggggaagggcaggctggcgctgagggcaggagacgtggtcatggtttacgggcccatggatgaccaaggattctattatggagagttgggcggccacaggggcctggttcctgcccacctgctggatcacatgtccctccatggacactgagcaagcatccttgcccaggtagtggcctctggctgctcacaccctgccagaggagaagcaagcgttcagaccctcacaccagcacccctcctcaccaccataagtagcatgtgctccaagtgccactgtgttaaactgatggtagtccttaagygtcccctaggctctgaaagtagcaggacttaagcctgagttatttgcaaaagcaaacacaacaagccaacccctgagagtctgagaagccatttcaaagttgctgataactatggcaggtatacggagaagcgcctttttctgtggccaatgtgtgttttctctgggaggttaaggttatctgtccattgccttgtacgaaagtctcaagaaaagtctacatcttaaaaaaraaaaaaaa

SEQ ID NO: 138 - DNA, 357 bp, Homo sapiens
  SITE (264): n equals a,t,g, or c
  SITE (314): n equals a,t,g, or c
ataggaaaaagaaaagcacacaagttttatttggaatgaaggcaattcacaggtcacaaaataattcatgctgaaagggcctgcagagttcttgcactgtgatgtcttcgagccatctttattgtcatgctgcatgcacgtatagaaaatggaataggtccattctatgtagccatttttgattttctgaaccacctaactacttgtacccacctgcaatgtgtaattcatggggcagtgccctccttacacaaccgcacacgntcacaggcaccaactcacagggattctccttgtccacggtacctgtgagnccaaagtgacagccccacaaaggagctttcacaaatttccaaa

SEQ ID NO: 139 - DNA, 576 bp, Homo sapiens
  SITE (575): n equals a,t,g, or c
gggcccctattcaggaccattctgtggccgtgccagagtgcatacggatttcacgccaagtccctatgacactgactccctcaaaatcaagaaaggagacatcatagacattatttgcaaaacaccaatggggatgtggacaggaatgttgaacaataaagtgggaaacttcaaattcatttatgtggatgtcatctcagaagaggaagcagcccccaagaaaataaaggcaaaccgaaggagtaacagcaaaaaatccaagactctgcaggagttcctagagaggatcatctgcaggaatacacctcaacacttttgctcaatggttatgagactctagaagatttaaaagatataaaagagagtcacctcattgaattaaatattgaaaacccagatgacagaagaaggktactatcagctgctgaaaacttccttgaagaagaaagtaagtgtgtacacctactcttctccccagctgataatcagtttaatgkaaatagtataatcattagaaacaaagccccagtttatttactgrgawcatgaaagcacgcttttcccataaaataggna

SEQ ID NO: 140 - DNA, 857 bp, Homo sapiens
  SITE (291): n equals a,t,g, or c
  SITE (295): n equals a,t,g, or c
  SITE (753): n equals a,t,g, or c
cacttaacaaatgtttcaaatcactccaagcagaacctgatgactgtggcaaacttaggagtggtgtttggaccaactctgatgaggccacaggaagaaactgtcgctgccctcatggacttgaagtttcagaatattgttgtggaaatcttaattgaaaaccatgaaaagatttttcggacgccgcccgatactacattccctgagcccacctgcctgtcagcatcacccccaaatgcgccaccaaggcagtcgaagagacaaggccagagaaccaagaggcccgtggcntkcntacaatctttgtctggagctggaagatggtgacaatccttacccttccaaggaggacacccctaccagcagtctggactcactttcctccccgtctcccgtgactacagctgtccctgggcctcctggaccagacaaaaaccaccttctggcagatggagggagctttggagactgggcatccactatcccaggccagacccgatcgtctatggtccagtggcttaacccacagtctccaaccacaacaagctccaactcagctgtgacacctctttcacccgggtcgtcccctttccccttttctcctcctgctactgtagcggacaagccacctgaaagcatccgcagtcggaaggctcgagccgtgtatccgwgwgaagcagaacacagctcggaattatcttttgaaataggagcaatttttgaggatgtacaaacctccagggaacctggctnggctagaagggactctgaacggcaagagggggctgattccacagaactacgtcaagctgctgtagctcctggcctcagagcccctgctgaccctggcacccagg

SEQ ID NO: 141 - DNA, 455 bp, Homo sapiens
  SITE (247): n equals a,t,g, or c
  SITE (448): n equals a,t,g, or c
caaagccccccgaaaagggcaaaggttggagcaaaacgtcccactcactggaggcacctgaggacgacgggggctggtcaagtgcagaggagcagattaactcgtccgacgcagaggaggacggcgggttgggccccaagaagctggttccaggtaaatacacggtcgtggcggaccacgagaagggaggccccgatgcgctgcgctgaggagcggggacgtggtggagctggtgcaggagggcgangagggcctctggtaagaccccgcgctcagccccggactgccccgcacgtggctgccgctgaccctcgccccttgcagtacgtcagggacccgaccamtggcaargagggctgggtgccggccagcagcctgtccgtmcggmtcggcccgtccggctcggcccagtgcttgagcagctcagattcgagcccggggtcggccntgctgag

SEQ ID NO: 142 - DNA, 2928 bp, Homo sapiens
  SITE (491): n equals a,t,g, or c
gggacaaccgcggcgcggctcggcgctcccggcctggcgttgtggcgccgcagcccttgccaccttccctgcacctgccctgcccggcctcatgtaccgcgcgctgtacgcgttccgctcggcggagcccaacgcgctggcgttcgccgcgggcgagaccttcctggtgctagagcgaagcagcgcgcactggtggctggccgcgcgggcgcgcagtggtgagacgggctacgtgccgccagcctacctgcgccgcctgcagggcctggagcaggatgtcctccaggccattgaccgggccatcgaggctgtacacaacacagccatgcgggatggtggcaagtacagcctggaacagcgtggagtcctccagaagctgatccaccaccggaaagagaccctgtcacgcagaggcccttcagcctccagtgttgcagttatgacctcatcaaccagtgaccaccacttggatgctgctgcagccaggcagnccaatggggtgtgtcgagctgggttcgagcggcagcacagcctacccagttctgagcatcttggggcagatggaggcctctaccagatcccacttccatcttcccagatcccaccacagcctcgccgagcagcacccaccacaccgcccccaccagtgaagcgccgagaccgcgaggccctgatggcctctgggagtggtggccacaacaccatgccctccgggggtaactctgtgtccagcggctcctcagtcagcagcacctccctggacacgctctataccagctccagcccatctgaaccaggctccagctgctcacccacacccccacctgtgccccgccgaggcacccacaccaccgtgtcccaagtccagccccctccctccaaggcatcagcacctgaaccccctgcagaagaagaagtggcaactggtacaacctcagcctctgatgacctggaagccctgggtacactgagcctggggaccacagaggagaaggcagcagctgaggcggctgtgcccaggaccattggggccgagctgatggagctggtgcggagaaacactggcctgagccacgaattatgccgggtggccatcggcatcatagtgggtcacatccaggcctcggtgccggccagctcaccagtcatggagcaggtcctcctctcactcgtagagggcaaggacctcagcatggccctgccctcagggcaggtctgccacgaccagcagaggctggaggtgatctttgcagacctggctcgccggaaggacgacgcccagcagcgcagttgggcactatatgaggatgagggtgtcatccgctgctacctagaggagctgctgcatattctgactgatgcagaccctgaagtttgcaagaaaatgtgcaagagaaacgagttcgagtctgtcctggccttggtggcstattaccaaatggaacaccgagcatcactgcggctgctgctcctcaagtgctttggcgccatgtgcagcctggatgcagccatcatctccacgcttgtgtcatccgtgctgcctgtagagctggcgagggacatgcagacagacacgcaggagcacctgggcacgcctttcgcccagttcctactgaacatcgtcgaggatgggctgcccttggacaccacagagcagctgccggacctctgcgtgaacctgcttctggctctcaacctgcacctgccagctgctgaccagaatgtcatcatggctgccctgagcaaacacgccaatgtcaagatcttctccgagaagctgttgttgctcctgaacagaggggatgaccctgtgcgcatcttcaaacatgagccacagccaccacactctgtcctcaagttcctgcaggacgtgtttggcagcccggccacagctgccatcttctaccacacagacatgatggctctcattgacatcactgtgcggcacatcgcagacctgtcaccaggagacaagctgcgcatggagtacctctccctgatgcatgctatagtccgcaccacaccctacctgcagcaccgccaccggctacccgacctgcaggccatactgcgacgcatcctgaatgaggaggagacctcaccccagtgccagatggaccgcatgattgtccgagagatgtgcaaggaattcctggtgctgggggaggctcccagctagcaccttgctgtcctcccttccctgcagctccagtcagtgtgcaggggactcaggggcttggccctaagaatgttttgcactgacagtgggaggggataaggtggcagaaggaacctgagcaggacccccacctgaagtagaacttaagagaggggccaagtgtaggattggggaccatggtctgggagctgttctggggcagggggaatatgcaagctaaagcccctctataccctggtaggcttcctcttcagcatgcccccctcttcaccccacacccatgtgtacactcagagtcctgctgccgctccaggctggaccagacccccatccccacccctcctggtctgtatcctgggcctcagcaagccatgcccctggggtgaggggaggcatctcccaccagctctattctttgccttagctttgcagtgagtgctgctcatgtcctcccctccacccgcacatgggggtcgctgcccttcactcctacccccagaggccttggccaagctgctgctttgaaagcgggatcttggagacaggccatccatcctggagcctcatggaacaggatgatggcactgagaaagccaatgaccgaatctcttttctctgtaaaaatgtagactgaaaagccatgtgtattttcctatgtgctgtagctctcctttggaaataaatcacaggcatctggaaaaaaaaaaaaaaaaaaaaaaaaaaaaaaaaaaaaaaaaaaaagggcggcc

SEQ ID NO: 143 - DNA, 1265 bp, Homo sapiens
  SITE (1263): n equals a,t,g, or c
cttttwttttttttttttacaagcttgaagatgcttttattgagaaggagagggactgaacagattcttgacaagcctaggcataaatgctccaggtttgggaaagaggtaaaataaataggtggttactggggaggctccaacacagccagaagggacactgtttgcttcascctctgggcctgtccattgtttttgctgtgtgagctggggtgtggggtttgctgcaaactgggatccagaagaggaattctcggggctctaatgggtatcagatctgccatcttgcatcagcggggcctggttcttggaggtgtctaagctggtgcctaagggcttatccccagcatccttctgacagcctccagccgggacaggattcgtggggcctcctgtggacatagcatctgtagctccccaggtcttatgcgaagtagctggctccccgtcagggacccaagtgtcctcaccgtggcagtggagaagttctctgcctgcagccagtctgtgacctcttcaggcctcgagctaagtcgaagcattggaacccgagagggtgactggccctgggtcccaggggtccccggctgtaggggctccaggatgttgcttggaatgtagccgctccgtcccgcctcattcttcaccagccaccaccgcttgctgtggtccagaacctgccaaragtcaccmcctcagtcccctgagcctctttccagccarmmwtcmctmmmcacacaaggctttctccctccagctctttcctaccctccttctccctctctaggccacccaccttggcagctccatccctggaccatccacccttggctgcctgtagctcccaccaaccaccacctccttttctagcctatggcccaagcctcacctccagcttctctccctggaccacagtcmgttcccgtgggttcctagcttcaaactcgtacaagacttgcattttcagggctggctgggcaggtttggggctggagggcctggagttggggtccccaggctgagggtcatggttgtgtgtcttctcctgaggaaagtgtgaggtgctccctaacctatgacttccccgcctaagaaacagagtcaggatggctggagaatggggcctcagaaattaagcctatgtcccagccctgagattcccctcaggtatctccggcctgcagtctgatggtgacttttgggtttctttagagtttgctgrcaggtcagtgttaggtggggctttctgcaggcaggaggggncc

SEQ ID NO: 144 - DNA, 872 bp, Homo sapiens
  SITE (865): n equals a,t,g, or c
  SITE (867): n equals a,t,g, or c
  SITE (870): n equals a,t,g, or c
gaagcacccttaggataccaggaccctgtttcccttcggagaagacacacaaccatgaccctcagcctggggaccccaactccaggccctccagccccaaacctgcccagccagccctgaaaatgcaagtcttgtacgagtttgaagctaggaacccacgggaactgactgtggtccagggagagaagctggaggttctggaccacagcaagcggtggtggctggtgaagaatgaggcgggacggagcggctacattccaagcaacatcctggagcccctacagccggggacccctgggacccagggccagtcaccctctcgggttccaatgcttcgacttagctcgaggcctgaagaggtcacagactggctgcaggcagagaacttctccactgccacggtgaggacacttgggtccctgacggggagccagctacttcgcataagacctggggagctacagatgctatgtccacaggaggccccacgaatcctgtcccggctggaggctgtcagaaggatgctggggataagcccttaggcaccagcttagacacctccaagaaccaggccccgctgatgcaagatggcagatctgatacccattagagccccgagaattcctcttctggatcccagtttgcagcaaaccccacaccccagctcacacagcaaaaacaatggacaggcccagagggtgaagcaaacagtgtcccttctggctgtgttggagcctccccagtaaccacctatttattttacctctttcccaaacctggagcatttatgcctaggcttgtcaagaatctgttcagtccctctccttctcaataaaagcatcttcaagcttgtaaaaaaaaaaanantanaa

SEQ ID NO: 145 - DNA, 1247 bp, Homo sapiens
actgcctctgcccgaggacccagggaccctttcagcagagcgtcgttgcttgacacagcccgtggaggaccagggggtctccacccagctactcgcgccctctggcagcgtgtgcttctcctacaccggcacgccctggaagttgttcctacgcaaggaggtgttctacccacgggagaacttcagccatccctactacctgaggctcctctgtgagcagatcctacgggacaccttctccgagtcctgtatccggatttcccagaatgagcggcggaaaatgaaagacctgctgggaggcttggaggtggacctggattctctcaccaccaccgaagacagcgtcaagaagcgcatcgtggtggccgctcgggacaactgggccaattacttctcccgcttctttcctgtctcgggcgagagtggcagcgacgtgcagctgttagccgtgtcccaccgtgggctgcgactgctcaaggtgacccaaggccccggcctccgccccgaccagctgaagattctctgctcatacagcttygcggaggtgctgggtgtggaatgccggggcggctccaccctggagctgtcactgaagagcgagcagctggtgctgcacacagcccgggcaagggccatcgaggcgctggttgagctattcctgaacgagcttaagaaggactccggctatgtcatcgccctgcgcagctacatcactgacaactgcagcctcctcagcttccaccgtggggacctcatcaagctgctgccggtggccaccctggagccaggctggcagtttggctctgccgggggccgttccggactctttcctgccgacatagtgcagccggctgccgctcccgacttttccttctccaaggagcagaggagtggctggcacaagggtcagctgtccaacggggaaccagggctggctcggtgggacagggcctcagaggtgaggaagatgggagagggacaagcagaggcaaggcctgcctgagactgaggaaggaaaggggtttgaccactcccgaggctgccatgcggtgggaccaccctgctgtccgtctcctgtggctgcccctctgcccsctcctgatggmtcgccttgtctctccagcaagactgtgcactccttgcaggcaggggctgggctggrtgctgctcttgtgtcccacgtggtacttagttcaaggctgccccagcagatgcttaataaacagctcttcactttaaaaaaaaaa

SEQ ID NO: 146 - DNA, 908 bp, Homo sapiens
aggtccgggtgcaccccatccctttggagtcgggaggctccagtgatgttgtccttgtcagctatgtcccatcctcccagcgacagcagggtgagcagagcaggtctgcaggggaggaggtgcccgtgcacccaagaagtgagaaccgaccacctcccatgacccaccccagccccctgaacccccttcatggacagatcccccacagcctggggcagaagaggcgtcgagggcgccagaagtggcggcagcagcagccgcagcagccaaagagaggcaagagaaagagaaagcgggcggtggaggggtcccggaagagctggtccccgtggttgagctggtccccgtggttgaattggaagaggccatagccccaggctcagaggcccagggcgctgggtctggtggggacgcgggggtgcccccaatggtgcagctgcagcagtcaccactagggggtgatggagaggaagggggccaccccagggccattaacaaccagtactccttcgtgtgagccaaccccacccgctccaccctttttaaaccccccagccctgctcgtgagattgggctgggtagggacagaggaggccgaaatccctcccccatgcttcctgacccttgttggccaagggcatctttgatggtacaagcagaggctcgggagaggctcccgtcacacactacaggtcccctccccagggcaggggatttgggctccatgagctccttgaggggctcttctggtcagccccaccctgggggccatttccccattaactacccccagcccgaggcagggtgagggggaagggctgtcagttacattaaggtggttgttgttgttgttttaaacaaaatggagaagcataaataaataaaaaggtttatctcgaaaaaaaaaa

SEQ ID NO: 147 - DNA, 644 bp, Homo sapiens
  SITE (502): n equals a,t,g, or c
  SITE (542): n equals a,t,g, or c
  SITE (628): n equals a,t,g, or c
ggcacgagtgggtttaggaggtccccgggttgccggcgggacagcgggggaagcatgactgctgtgggccgaagtgccccgcgctggggtcccgaggggctgctggagagccagaggctggcagcgactatgtgaagttctccaaggagaagtacatcctggactcatcgccagagaaactccacaaggaattggaggaggagctcaaactcagcagcacggatctccgcagccatgcctggtaccatggccgcatcccccgagaggtctcgragaccttggtacaacgcaacggcgacttcctcatccgggactcactcaccagcctgggcgactatgtgctcacgtgccgctggcgcaaccaggccttgcacttcaagatcaacaaggtggtggtgaaggcaggcgagagytacacacacatccagtacctgtttgagcaggagagctttgaccacgtgcccgccctcgtgcgctatcatgtggggcagccgcaagygtngtcagagcagagtggtgccatcatctactgcccggtgaancgcaccttcccatgcgctaacttcgaagccagctatggcctggggacaggggagtagcaagcctgctaagccccgtcagcccctcnaggccccaagggcagc

SEQ ID NO: 148 - DNA, 2086 bp, Homo sapiens
ggcacgagagcacactgcctcggtctccccgagatgccccatgcagtgcttcgtcagagttgtctggtccctccacgcccctgcacaccagcagtccagtccagggcaaggaaagcacccggcgacaggacaccaggtcccccacctcagcgcccactcagagactgagtcctggcgaggccttgccccctgtttcccaggcaggcaccggaaaggcccctgagctgccgtcgggaagtgggcctgagcctctggcccctagcccagtctctccgaccttccctcccagctcgcccagtgactggcctcaggaaaggagtccagggggccactcagatggcgccagtcctcggagccctgtgcccaccacacttcctggcctccgccacgccccctggcaaggccctcgaggcccccccgacagcccagatgggtctcccctcactcctgtgccttcccagatgccctggcttgtggccagcccagagccgcctcagagctcacctacacctgctttccccctggctgcctcctatgacaccaatggccttagccagcccccacttcctgagaaacgccacctgcccgggccggggcaacagccaggaccctggggcccagagcaggcatcatcgccagccagaggcatcagtcaccatgtcaccttcgcacctctgctctcagataatgtcccccaaaccccagagcctcctacacaagagagccaaagcaatgtcaagtttgtccaggatacatccaagttctggtacaagccacacctgtcccgtgaccaagccattgccctgctgaaggacaaggaccctggggccttcctgatcagggacagtcattcattccaaggagcttatgggctggccctcaaggtggccacaccgccacccagtgcccagccctggaaaggggaccccgtggaacagctggtccgccatttcctcatcgagactgggcccaaaggggtgaagatcaagggctgccccagtgagccctactttggcagcctgtccgccttggtctcccagcactccatctcccccatctccctgccctgctgcctgcgcattcccagcaaagatcctctggaagagaccccagaggctccagtgcccaccaacatgagcacagcggcagacctcctgcgtcagggtgctgcctgcagcgtgctctacttgacctcagtggagacagagtcactgacgggcccccaagctgtggcccgggccagctctgcagctctgagctgtagcccccgcccgacaccagctgttgtccacttcaaggtgtcagcccagggcattacactgacggacaaccaaaggaagctcttctttcgccgccattatccagtgaacagcatcaccttctccagcactgaccctcaagaccggagatggaccaacccagacgggaccacctccaagatctttggtttcgtggccaagaagccgggaagcccctgggagaatgtgtgtcacctctttgcagagcttgacccagatcagcctgctggcgccattgtcaccttcatcaccaaagttctactgggccagagaaaatgaaggaaggccacaagctcagagcccacatcaacactgcccccctcccagcaccccacagccctcacatcccctggcctggacccaggagacccaggagaaagcaccctcccttaggaatgaggagtgggcatcaggcctgggacactgctctccttccccgcccccagcctgctaagttaagtggacaggcccacaagatgaccttgcatgtgagcagatggcagagatgggtgtgtgaggggtgaggaggcatcagcagttgagccccgaaggagatcaggcagccccacctgcaggagaacgtcagccctccaggggatcagcccctgccagttccacccagctgcaggtgccagcacggcagggatgggagaggggtggggagcgagtcactgcctcctctgagcagagattcagagtaggatcacatgaataggggaaaaaaaagagagtctatttttgtctaataataaagaatttctataaactttaaaaaaaaaaaaaaaaaa

SEQ ID NO: 149 - DNA, 1375 bp, Homo sapiens
  SITE (1374): n equals a,t,g, or c
cgaagcagatttgtaagagctggaaagaagactcggaatggcaggcatctctgcgaaaatccaragcagctgatgagaagagacgctccttggctaaacaagcacgagaagactacaagaggttatccctcggggcccagaaaggaagaggcggtgagaggctgcaaagccccttgcgtgttccgcagaaaccagaaagacctccccttccacccaagcctcagttcctaaactcaggggcatatcctcaaaaacctcttagaaatcagggagtggtgaggacactgtccagctctgcccaagaggacatcatccggtggtttaaagaggagcagctaccacttcgagcgggctaccagaaaacctcagacaccatagccccctggttccatggaattctcacactcaagaaagcaaatgaacttcttctgagcacaggcatgcccggcagttttctcatccgagtcagtgaaaggatcaaaggctatgccctgtcctatctgtcggaggacggctgtaaacatttcctcatcgatgcctctgcagacgcctacagcttcctgggcgtggaccagctacagcatgccaccttggcggatttggtggaatatcacaaggaggaacccatcacttccctggggaaggagctccttctctatccctgtggtcagcaggaccagctgcctgactacctggagctgtttgagtgacagcctccatcagggtcatcctacagcctccaagcgggctttcccctggacaaatgccactgcaacatttatgtgtgaagccaaaatcaccctgcagcagagccaatactgatcaactgaaagtatccatggagtcctcattgacacctcttttctgcacaaatactggaattcaatgtcaagagaaaatgacctctgctcaaaagggagaagagtctcaatttcagcaagtacctgtcatgaagggtatgaccttaatgatgtacataaaataaaacaaatgaagaaatggaaaacttttagaaattaaggtgtacttgaaaacgaatatctatcatatgacccctgcactccctctgtatcatctcaggaggtttcaggggcctgttgacatgaagtttcgaagtttcatgttggctttggaatggtagcaaaagcctttcctggctgagatgatgcttaaaacacacctcacttattgtacatgttggaaccaggacatgagagacatagaaaaacagaagtcatgaatgtaaattgaatgagaggcttaacatgcatgaaaatacagatggacctgcaggaaagtgagcaaacatcgctgagtttgttttcttgttcgggagaatggggccgggctggcctggcctccccgggatataant

SEQ ID NO: 150 - DNA, 4100 bp, Homo sapiens
  SITE (12): n equals a,t,g, or c
  SITE (22): n equals a,t,g, or c
  SITE (1576): n equals a,t,g, or c
tggaaattcccncctcactaangggaacaaaagctggagctccaccgcggtggcggccgctctagaactagtggatcccccgtctgcaggaattcggcacgagagaagcgggcctcggagggggatcgttctttgggctcagtctctccctcctccagtggcttctccagcccgcacagcgggagcaccatcagtatccccttcccaaatgtccttcccgacttttccaaggcttcagaagcggcctcacctctgccagatagtccaggtgataaacttgtgatcgtgaaatttgttcaagacacttccaagttctggtacaaggcggatatttcaagagaacaagccatcgccatgttgaaggacaaggagccgggctcattcattgttcgagacagccattccttccgaggggcctatggcctggccatgaaggtggccacgcccccaccttcagtcctgcagctgaacaagaaagctggagatttggccaatgaactcgtccggcactttttgatcgagtgtaccccgaagggagtgcggttgaaagggtgctcgaatgaaccatatttcgggagcctgacggccttggtgtgccagcattccatcacgcccttggccttgccgtgcaagctgcttatcccagagagagatccattggaggaaatagcagaaagttctccccagacggcagccaattcagcagctgagctgttgaagcagggggcagcctgcaatgtgtggtacttgaactctgtggagatggagtccctcaccggccaccaggcgatccagaaggccctgagcatcaccctggtccaggagcctccacctgtgtccacagttgtgcacttcaaggtgtcagcccagggcatcaccctgacagacaatcagaggaagctcttcttccggaggcattaccccgtgaacagtgtgattttctgtgccttggacccacaagacaggaagtggatcaaagatggcccttcctcaaaagtctttggatttgtggcccggaagcagggcagtgccacggataatgtgtgccacctgtttgcagagcatgaccctgagcagcctgccagtgccattgtcaacttcgtatcaaaggtcatgattggttccccaaagaaggtctgagaactcccctccctccctggacccaccgatgcctctcgaagccctggagacagccgttgggtgagggtggggcccccactttttaccaaactagtaaacctgacattccaggcccatgaggggaaagaggatcttccagctctgcaaaaacaagaacaaacaacatcaccgtgaattggcctttcctgaaagtgacttatctgacacatctctgtagccacatgctttttgggtagaagaagctgggcatgggtgcaccccaccccctagggtccccatgggaaagggacatgcaaggaaacagcacagaacacgaggtggtccccatgtccctggcacaytagcattccgggggatgaggawtccccagcccttgaggcagaggtgccgagtgactgccatgcttcgcccgtccgcatgggsgcttctgtccagntgcacccgaggmcgggggtttccctcacctcggtcttcccaagatggagatgctaacgaaactgagaagggggcgtatgtttgacgaaggtttgtgcaagtcaggcccttctggaacacagcagggcctacaacgaggggcctttgcgatgggctgtgaggatgggggtggtgggaagaattggccacgttrgagaccccatgccaccccaccatggtgagtgctctgtgcctcctgctcacctgtggtgagctgggcgagctgggcgagctgggcgagctgggctggggagagcctgtgaggaccgagaggagaaatgagaagaaggaacaaaaatattatttctatgtaatttatattttacttatgccaaattatttatgataatttgccattgctatactgtaccagtgtcaaatgctgcagcctgccaagctgtgattttgtgaggcttgtccctatgtaggatgcaccgcaggcccctggccactgaaagagtgtgcagtggactgtgggtctcccatatgcggtgccgcccaaaggtggctttgcctcaagcaacctaccctgatgttttactcattggaatgtttttccccgattgtggatgacttcttttctgatggagagagtccaggagggatggaaaacgcctggatttaagctcagcatcccccacatgggcttttcgatcatcttcaggcctgaagctgcacgacctgaagttcgcctgcatttatcagccctctttgtgctgctccttgccaccttggggttcctgctggggaccatgtgtggttgtggcatgtgtgagcagaagggaggatgaggaaaaagagaagaaaccccggtactgacaagctgtttttgagtgccactgtttgccatcatctaagccactgaatcaagtgtatttcaggcttatttcaacattccaatgccctggttttcctgcttgaatctgttcgtggtcaaaggtttgggggaatttgtgaccctggaacatccccagagtgaaagatggagctgggccacatcagaataaggccttggccccatcctctcacagcctaggtgctctgcaggcatgctgactgtcctgattgcgatccagcccgaaattccctcctctgctttcaaaagtcaaatcccccattcttaggccacactggtgtcacaagctcctgtcagggagctggggtttgggaatgtgctttgtgaactctgctttaaagtgaggggccgaggaaaacttagaaacaggcagagttggaagcagccaaatcacagtgggtgttgtgtgtgtgtgcgtgtgtgcatgcgtgcgtgtatgcgtgtgtgaaagcaggtggaccattccactttttagctcctattgatgcaccaaaccaagtgcctcatttctgtgccaaatgtttgccttggtcgttgtggacctccttctctaacttgcggtggcatgactgtcaggaggtgctggcattttcagcagatcctcatgtgttgaccctgatgtctttagcagaggcctctagcatctcggtttttcatccactgcaggaatgtggccacagggagcagaggtttgtactttccccaagaggtcctcatcctgagacggtctctacccatgtttaacccaaagagtgcaggccaggttccttatccttctgatgaaggatgagagagctcatttagaagtcagagcaaactagggtctcagtattgagaaacgcagcctgccagggaatcacagagacatcggggtgcccgcgatggccctcatgaagccatgcctcgacggcattcaggaagccctgcaaacgtgctttttgaactcattggccaggtgtgatttttacacaaggtaaacgtggtcaagggcatcggggaatttgctccaagcagatagctccctctgaggaaccaaaggaagcaagtttccacgatttctgaagagctggtataggaagtttctttcttccttttgtgttacatgtgcattaaacagaacaagctgtgtgtcatcacagattgtactgtgggctcagaaaccgtgagagagcccccaccgtggacaccggctctagggccacaggaaaaggaacgtttccaggcattttgtctccagggctcccgctggacaggcacgtactgccctggggagtaaatgcggagagttcacgaactgtgcccaacgcatgttatagccagggtcctactaactactcagtaaaagaacgtattgttgtattcctccagtgttaagctatagccatgttaaaagtcactgtgcatttattctcagcatcaaataccttgtaacgtcttctctgccttgttagtgcatatttttacttttctgatactgtaaagaatatatccagtatgtaaatgaatgttctataaatcttttgtatagtcattttctctgctccttaaatatcatctctattcagagtataataaaattatgaacttggtaaaaaaaaaaaaaaaaaaaaaaaaaaaaaaaaaaactcga

SEQ ID NO: 151 - DNA, 1428 bp, Homo sapiens
  SITE (1376): n equals a,t,g, or c
  SITE (1379): n equals a,t,g, or c
  SITE (1384): n equals a,t,g, or c
  SITE (1399): n equals a,t,g, or c
gcgccttttgagctacgtttccatcgattcgaacttcgtatctagggaccctgcatgcaagagcttatagtgaagaaatacttggtcccatttcttttcgcctgggaggtatctttccactattagcaatgcgattattgcaaatcatcatatgcagtctatttcatttgcctctggaggggatcctgatactacagactatgttgcctacgtagctaaagatccagttaatcaacgagcctgtcacatattggaatgccacaatggaatggcccaagacgtcataagtaccatagggcaggcttttgaactccggtttaaacagtacttgaaaaatccttctttgaatacttcttgtgaaagtgaggaggtgcatattgatagccatgccgaggagagagaagatcatgaatattacaatgaaattccagggaagcagccaccagtaggtggtgtttcagatatgcggatcaaagttcaagccacggaacaaatggcttactgccccatacagtgtgaaaagttgtgctatttgcctggaaactccaagtgcagcagtgtatatgagaactgtttagaacaaagcagggcaataggtaatgtccatccaagaggggtgcagtcccagcgagatacctcattattgaagcacacgtgccgagtggatctctttgatgacccctgctacattaatacacaggctcttcaaagtacacctggctctgctggaaatcaaaggtcagcccaaccactggggagcccatggcactgcggaaaggcaccagaaactgttcagccgggtgccacagcccagcctggcagctcacattctttgccacacattaagcagcagctgtggagcgaagaatgctatcatggcaagctgagcaggaaggcggcagagagcctcttggtaaaggatggggactttttggttcgagagagtgcaacatcccctggccaatatgtgctgagtggactacagggaggccaagcaaaacatcttctcctggtggatcctgaaggcaaggtgaggaccaaggatcatgtatttgataatgtcggccaccttatcagataccatatggatwacagtttgccaatcatctcctctggaagcgaartaagccttaaacaaccagtgagaaaagataataatccagcacttttgcattccaacaaatgacagtattgaagcaccatcacactgatatttcaagaaaccccattttgtattaggacacaaagataatttaaactttgtttatagataaaatagagcacaaactgtggaagtgcatctttccaacgaccatcatggaccacggtctctataaaatgaagactwacmaaaattagtcttcaraaatgacccnccnccagncccaggcccccccanttttaaagaaattatatgtatgcacgggt

SEQ ID NO: 152 - DNA, 1966 bp, Homo sapiens
ggcacgagccgccgtcgctgccgccgctgtccccgcgccctgcgcccggtggccccccacctccgccccgcggccgtacctggcgccccctggctcccccggcccccgcgcggcgtggagccatcttccctcacctcctaccggcaccctagcttgctcccggcccatgcggcccccgcgggctcccggccccggcttcagaactcagccctgcacctgagcgcggggcccggcggggcgtggcggcggcgatggggaaactgcagtcgaagcacgccgccgccgcccgcaagcggagagagagcccggaaggtttcccgcgcgtccgcccccggaccgcaggggacagcttcgtggcgtccgcgtacgcgagcggccgcaaaggcgcggaggaagcggagcggcgcgcgcgggacaagcaggagctgcccaatggggaccccaaggaggggcctttccgggaggaccagtgtcccctacaggtggcactccccgctgagaaagctgagggccgcgagcacccgggacaactcctcagcgcagatgacggagagagggcagcaaaccgcgagggcccgcgaggaccgggcgggcagcgcctcaacattgacgcactccagtgcgatgtctcggtggaggaggacgaccgccaggagtggacgttcacgctctatgactttgacaactgcgggaaggtcaccagggaggacatgtccagcctcatgcacaccatctatgaggtcgtggatgcctcggtcaaccactcctcgggcagcagcaagaccctccgtgtgaagctaaccgtcagccctgagccctccagcaagaggaaggagggtcctcctgctggccaggaccgggagcccacccgttgcaggatggagggtgaactggcagaggagccaagggtggctgacaggaggttgtctgcacacgtcaggaggcccagtactgacccccagccctgctcggagcgggggccctactgcgtggacgagaacacggagcgcagaaaccactacctggacctcgccgggattgagaactacacgtccagattcggccctgggtcccctcctgtgcaagcaaagcaggagccccagggcagggcctcgcacctccaggcccggtcccgctcccaggagccagatacacatgccgtacaccaccgcaggtcacaggtgctggtggaacacgtcgtgccagcctcggagcctgctgcccgggccctggacacgcagccccggccgaaggggccggagaagcagttcctcaagtcccccaagggctccgggaagccgcctggggtgccagccagcagcaagtccgggaaagccttcagctactacctgccggccgtcctgccgccccaggcccctcaggacggccaccacctcccgcagcccccaccgccaccctacggccacaagcggtaccgccaaaagggcagggagggccactcgccactcaaggccccacacgctcagcctgccacagtggagcacgaggtggtgcgggacctgccgcccacgccagcaggagagggctacgcggtgccagtgatccagcggcacgagcaccaccaccaccacgagcaccaccaccaccaccaccaccaccacttccacccgtcctagcgccactgccaagcacacctcgctcccagcacaccacggcccgcgacctcagggcagggagcagagcagctgccggctgtgtgcccatggggagcccagcccccaccccccacctccgacagcaaacagcaactgactgcaggtgctggcatgatggaggtggtgcaccttggacacgtggacaaggcccaggcgccctctgctcttctgccctcgatgccacatggcggtgaacacatctgaagccactatgtttcctggctctaaggctcgtctgtgtaacccataaaacctgctttgattccaaaatgaaaaaaaaaaaaaaaaaa

SEQ ID NO: 153 - DNA, 858 bp, Homo sapiens
  SITE (658): n equals a,t,g, or c
  SITE (693): n equals a,t,g, or c
  SITE (719): n equals a,t,g, or c
  SITE (797): n equals a,t,g, or c
  SITE (833): n equals a,t,g, or c
  SITE (834): n equals a,t,g, or c
ttacgccagttcgaaattaaccctcactaaagggaacaaaagctggagctccaccgcggtggcggccgctctagaactagtggatcccccggkctgcaggaattcggcacgaggagaagccaagcacgctgacgaggttctgtgagagcatgtggagattttcattttacctttatgtatttacctacggagtcagattcctgaaaaagaccccctggttgtggaatacgaggcattgctggtacaactacccctatcagccactcacaactgaccttcactactattacatcctggagctgtcgttttattggtctttgatgttttctcagttcactgatatcaaaagaaaggactttggcattatgttcctgcaccaccttgtatctattttcttgattaccttttcatatgtcaacaatatggcccgagtaggaacgctggtcctttgtcttcatgattcagctgatgctcttctggaggctgycaaaatggcaaattatgccaagtttcagaaaatgtgtgatctcctgtttgttatgtttgccgtggttttyatcaccacacgactgggtatatttcctctctggcctttgctctgktgcccagatggaagtgcagtgtaggcttatagctcactgcagccttgaactcctgngctcaaagtgatccttctgcgctcaaggggatctnctggcttccggcttcttcaagtaacntggggacctaccagggcattgtgcctgggcaacaaccccgggtttaaattttttaacttttttgggaagaagaccaangggtcccccaacttattggtttggcccccaaggggnngggttcctttgggaaaccttccct

SEQ ID NO: 154 - DNA, 807 bp, Homo sapiens
gttttatggccagtgttgaggtcagacgcgttcagtggactgacggccttacctcggagcatccttttatttggacctcgggggacaggcaaaacattattgggcagatgcatcgctagtcagctgggggccacatttttcaaaattgccggttctggactagtcgccaagtggttaggagaagcagagaaaattatccatgcctcttttcttgtggccaggtgtcgccagccctcggtgatttttgttagtgacattgacatgcttctctcctctcaagtgaatgaggaacatagtccagtcagtcggatgagaaccgaatttctgatgcaactggacactgtactaacttcggctgaggaccaaatcgtagtaatttgtgccaccagtaaaccagaagaaatagatgaatcccttcggaggtacttcatgaaacgacttttaatcccacttcctgacagcacagcgaggcaccagataatagtacaactgctctcacagcacaattactgtctcaatgacaaggagtttgcactgctcgtccagcgcacagaaggcttttctggactagatgtggctcatttgtgtcaggaagcagtggtgggccccctccatgccatgccagccacagacctttcagccattatgcccagccagttgaggcccgttacatatcaagactttgaaaatgctttctgcaagattcagcctagcatatctcaaaaggagcttgatatgtatgttgaatggaacaaaatgtttggttgcagtcagtgataacttctttagaaaaaaaaaaaaaaaaaa

SEQ ID NO: 155 - DNA, 503 bp, Homo sapiens
tggtgggggaatctggtgtcggtaaaaccgcgattgcggaaggtcttgcctggcgaattgttcagggcgatgtgccggaagtgatggctgactgtacgatttactctctcgatatcggttctctgttagcgggcacaaaatatcgcggcgactttgaaaaacgttttaaagcgttgctcaagcagctggagcaggacactaacagcatcctgtttattgatgagatccacaccattatcggtgcgggtgcagcgtctggtggtcaggtcgatgcggctaacctaatcaaaccgttgctcgacgsccttaatccgcgctttcccttcgttgtaatatttcagggtgtgatcatcataatcgatcaagtcactgacatcgttacgatatccggaaatacgccagttcamcccagcggttaagccttcaaacgcgccttcccactgtttgcttttctccgggtccagattcggatttccgtagaagccatacagttgccccagatt

SEQ ID NO: 156 - DNA, 698 bp, Homo sapiens
  SITE (698): n equals a,t,g, or c
tgcagacatcatccgcgagcagatccgcctgaaggggccggagcaccgtcagaccgtcttggagtccatcaggacggctggcaccttgtttggggaaggattccgtgcctttgtgacagactgggacaaagtgacagccacggtggctgggctgacgctgctggctgttggggtctactcagccaagaatgccacgcttgtcgccggccgcttcatcgaggctcggctggggaagccgtccctagtgagggagacgtcccgcatcacggtgctkgaggcgctgcggcaccccatccaggtcagccggcggctcctcagtcgaccccaggaygcgctggagggtgttgtgctcagtcccagcctggaagcacgggtgcgcgacatcgccatagcaacaaggaacaccaagaagaaccgcagcctgtacaggaacatcctgatgtacgggccaccaggcaccgggaagacgctgtttgccaagaaactcgccctgcactcaggcatggactacgccatcatgacaggcggggacgtggcccccatggggcggggaaggcgtgaccgccatgcacaagctctttgaactgggccaataccagccggcgcggcctcctgctctttgtggatgaagcggacgccttccttcggaagcgagccaccgagaagataagcgaagacctcagggccacactgaacgn

SEQ ID NO: 157 - DNA, 1684 bp, Homo sapiens
gatctgcacaatggggtgacgtcagcccgggtcgtagatattcgagctgttcatctaccagactgcgtagaccccgctttgagacgcgagggaaggttcgacagasaaatatgccyaggtatcccagawgaagcatccagggaaagaatacttcaaacattgtgcagaaaactgaggcttcctcaagcttttgatttctgtcacttagcacacctaactccaggctttgttggtgctgatctcatggcactgtgccgagaggagcaatgtgtgcagtcaatagagtcttaatgaagctacaggaacagcagaagaaaaatcctgaaatggaagatttgccatctaaaggagtccaggaggaaaggctgggaactgagcccacttctgaaacacaggatgaattacaaaggctgctggggttgctaagagaccaagatcccctctcagaggagcagatgcaaggactgtgcattgaactgaatgatttcattgttgctctatcctcagtccaaccctctgccaaaagggaaggctttgtcactgtccctaatgtgacatgggcagatattggtgccctggaagacattagagaggagctcaccatggcaatattggcaccagtacgcaacccagaccagttcaaagctcttggattggtgactccagctggggtcctccttgctggtcctcctggctgtgggaagactctgctggcgaaggctgttgcaaatgagtccggactaaattttatatctgtcaagggccccgaattactaaacatgtatgttggtgagagtgaacgtgctgtgcgacaagtttttcaacgagccaagaactcagcaccctgtgtgatattctttgatgaagtggatgctttatgtcctcgaagatcagaccgagagacaggggcaagtgtccgagtggtgaatcagctacttacagagatggatggtctggaagcacgccagcaggtttttattatggcagccactaacaggccagatataattgaccctgcaatcctgcgcccgggccgcctggacaaaacactgtttgtgggtttaccgccccctgcagatcgccttgccatcttaaaaactatcacaaaaaatggtaccaaaccaccactggatgcagatgtaaatttggaagcaattgctggtgaccttcgctgtgattgctatacgggcgcagatctctctgctttggtacgagaagcttctatctgtgccctgagacaggaaatggcaagacagaagagtggaaatgaaaaaggtgaactcaaggttagtcataagcattttgaagaagctttcaagaaagtaagatcatctatatcaaaaaaggatcaaatcatgtatgaacgtttgcaggagtccctcagccggtgatgtctccagcagccggcttagaggagctagcccatcaagccggcagagaatcccccacacgctctgaaggacccactttcagctggacacaggcgcggcctcatgtaaacattttattttcaaatgaatgaggccaagctgaagctgaagctgaagattcttcccatctggccagccttgtgtgaaaatgccttcttcctctttaagaaaaaggacaatttttaaactgctgaaataaaatgactgttacatttttcaaataaaacttttactttgaamwaaaaaaaaaaaaa

SEQ ID NO: 158 - DNA, 691 bp, Homo sapiens
  SITE (642): n equals a,t,g, or c
  SITE (670): n equals a,t,g, or c
ggccggctgagggcacttgctcttgctgtttctgcccctgggttaacattcaagatggtacatgctgaagccttttctcgtcctttgagtcggaatgaagttgttggtttaattttccgtttgacaatatttggtgcagtgacatactttactatcaaatggatggtagatgcaattgatccaaccagaaagcaaaaagtagaagctcagaaacaggcagaaaaactaatgaagcaaattggagtgaaaaatgtgaagctctcagaatatgaaatgagtattgctgctcatcttgtagaccctcttaatatgcatgttacttggagtgatatagcaggtttagatgatgtcattacggatctgaaagacacagtcatcttacctatcaaaaagaaacatttgtttgagaattccaggcttctgcagcctccaaaaggtgttcttctctatgggcctycaggctgtggtaaaacgttgattgccaaggccacagccaaagaagcaggctgtcgatttattaaccttcagccttcgacactgaccgataagtggtatggagaatctcagaaattggctgctgctgtcttctcccttgccataaagctacaaccatccatcatctttatwgatgaaatagatgcngattgaacatctgttatccaaaaatccnagataccaagtatcccaaatc

SEQ ID NO: 159 - DNA, 727 bp, Homo sapiens
  SITE (16): n equals a,t,g, or c
  SITE (18): n equals a,t,g, or c
  SITE (148): n equals a,t,g, or c
attcggcacagcccgntntgccatcctcaaggctaacctgcgcaagtccccagttgccaaggatgtggacttggagttcctggctaaaatgactaatggcttctctggagctgacctgacagagatttgccagcgtgcttgcaagctnscawtccgtgaatccatcctgtgagccaccatgcccagcccaggtcatcttttgagggcatggagagaagactttgagcatcccacttttgagattgtgtaccagtcgcaagcccctatgacacactttttccccaaagtagagggctctgactatgttgatcccaagagagatgggaaagagcattgaatgaggattccaaagtattgggccttagttcgtttcctcatgttggtgttgtgaagattctggttaggataacagcatgtgtgcaggaggctttgtgaactgctgagagtgaggcgtggcaatgtcagtgctaggtttgtccttactaaccyggggccatgggaattgataagaccagattcccaactctaccccacaatgtgatccctgtggtgaccccctcacagggctctttgggtcgagcttccccagaagggatcacccatctggccattgtatgttgaacccccattcattcattcattcattcagccaaccagcaactatttgttgagctcttattgtgtgagaagcagtcttcaaggaactgggtgaataaaaaaaacaaaa

SEQ ID NO: 160 - DNA, 772 bp, Homo sapiens
  SITE (2): n equals a,t,g, or c
  SITE (481): n equals a,t,g, or c
  SITE (488): n equals a,t,g, or c
tnggtaaaaccgcgattgcggaaggtcttgcctggcgaattgttcagggcgatgtgccggaagtratggctgactgtacgatttactctctcgatatcggttctctgttagcgggcacaaaatatcgcggcgactttgaaaaacgttttaaagcgttgctcaagcagctggagcaggacactaacagcatcctgtttattgatgagatccacaccattatcggtgcgggtgcagcgtctggtggtcaggtcgatgcggctaacctaatcaaaccgttgctctccagcggtaaaattcgtgtaattggttcgacaacctatcaggagttcagcaacattttcgagaaagaccgtgctctggcgcgtcgcttccagaaaattgatattactgaaccgtcgatcgaagaaactgttcaaatcatcaatggcctgaaaccgaaktatgaagcgcaccacgacgtgcgttataccgcaaaacggtncgtgcgncggtaraagctggcggtgaaatacattaacgatcgtcatctgccggataaagccattgatgttatcgacgaagcgggcgctcgcgcacgyctgatgccggtaagcaaacgcaagaaaaccgttaatgtggcggatattgagtccgtggtggcccgtattgcacgcattccagagaagagtgtttctcagagtgatcgtgataccctgaaaaacctcggcgatcgcttgaaaatgctggtcttcggtcaggataaagccattgaggcgctgactgaagccattaa

SEQ ID NO: 161 - DNA, 1921 bp, Homo sapiens
ggcacgagccagtgatgttttgctggatgttacacagagccctggagatggcagtggacttatgctagaggaagtcacaggtcttaaatgtaattttgaatctgccagagaaggaaatgagcaacttactgaagaagagagactgctaaagttcagcataggagcaaagtgcaatactgatactttttattttatttcttcaacaacaagagtcaattttacagagattgataaaaattcaaaagagcatgacaaccaattcaaagtaacttatgacatgataggaggattaagtagccagctgaaagcaattagagaaataattgaattgcccctcaaacagcctgagcttttcaagagttatggaattcctgcccctagaggagtgttactttatggtcctccaggtactggaaaaacaatgatcgccagggctgttgctaatgaagttggagcctatgtttctgtaattaatggtcctgaaattataagcaaattctatggtgagactgaagcaaagttacgtcagatatttgctgaagccactctacgacacccatcaattatttttattgatgagctggatgcactttgtccgaaaagagagggggcccagaatgaagtggaaaaaagagttgtggcttcactcttaacactgatggatggcattggttcagaagtaagtgaaggacaagtgttggttcttggggccacaaatcgccctcatgccttggatgctgctctccgaagacctgggcgatttgataaagagattgagattggagttcccaatgctcaggaccggctagatattctccagaaactgcttcgaagggtaccccatttgctcactgaggctgagctgctgcagctggcaaatagtgctcatggatacgttggagcagacttgaaagtcttgtgtaatgaagcaggtctctgtgccttgcggagaatcctgaaaaaacagcctaacctccctgatgtcaaggtggctggactggtgaagattactctgaaggatttcttgcaggcaatgaatgatatcagacccagtgccatgagggaaatagcaattgatgtcccaaatgtatcctggtcagatataggaggactggaaagtatcaaactgaagttggaacaggctgtggaatggcccttaaaacatccagagtctttcattcgaatgggtattcagccacctaaaggagttcttctctatgggccacctgggtgctctaaaacaatgatagcaaaggctttggccaatgagagtggactgaattttctagctataaaggggcctgaattaatgaataaatatgttggtgaatctgaaagagcagttagagagaccttccgaaaagcaagagcagtggcgccttccattattttctttgatgaactggatgccttagcagttgaaaggggcagttctttaggtgctgggaatgtagccgatcgtgttttggctcagctcttaacagaaatggatgggattgaacagctaaaggatgtgaccattttggcagctactaaccgtccagataggatagacaaggctttgatgcggcctggaagaattgatagaatcatctatgtgcctttaccggatgcagcaacaagaagggaaatatttaagctgcagtttcactccatgcctgtcagtaatgaagttgacctggatgaactcatccttcaaaccgacgcatactcaggagcagagtaaaagggaccatctgcccttacctctgaagataaactcttgacaagaacagcaagacctctgtgaaaatatgaaaatgacttttatgtatggcagattaacattttttctctcttaccaactctttacttatgctatttttatttaccacataaaattccatgaaataattctgcaaaaaaaaaataaaacaaaaaa

SEQ ID NO: 162 - DNA, 688 bp, Homo sapiens
aggacctcagggccacactgaacgccttcctgtaccgcacgggccagcacagcaacaagttcatgctggtcctggccagcaaccaaccagagcagttcgactgggccatcaatgaccgcatcaatgagatggtccacttcgacctgccagggcaggaggaacgggagcgcctggtgagaatgtattttgacaagtatgttcttaagccggccacagaaggaaagcagcgcctgaagctggcccagtttgactacgggaggaagtgctcggaggtcgctcggctgacggagggcatgtcgggccgggagatcgctcagctggccgtgtcctggcaggccacggcgtatgcctccgaggacggggtcctgaccgaggccatgatggacacccgcgtgcaagatgctgtccagcagcaccagcagaagatgtgctggctgaaggcggaagggcctgggcgtggggacgagccctccccatcctgagtccacagggagatccacagctcacggagcctggccgcggacccctcccacccctgccttgccggcccctgcacatttaggatatgctcctggatggggactgggctgtgccagggcctctgtcccccaggatgtcttgtggtgcgggtcggccgttytgccccccagggcaccccctgttgtaggcatggctarggagggcaggc

SEQ ID NO: 163 - DNA, 2225 bp, Homo sapiens
ctgcaggaattcggcacgaggcggccgccctgcccgcgcaccgcgctcagcgcccaccgccgggcttcccgcgccggacccagtacctcggctccccggggccggaccgaggccgcaagcagcgccgcggggtgtggggcggacccaggagatgaaatgacaacgtcaaccctccagaaagccattgatctggtgacgaaagccacagaggaggacaaagccaagaactacgaggaggcgctgcggctgtaccagcatgcggtggagtacttcctccacgctatcaagtatgaggcccacagcgacaaggccaaggagagcattcgagccaagtgcgtgcagtacctagaccgggccgagaagctgaaggattatttacgaagcaaagagaaacacggcaagaagccagtcaaagagaaccagagtgagggcaagggcagtgacagtgacagtgaaggggataatccggagaaaaagaaactgcaagaacagctgatgggtgccgtcgtgatggagaagcccaacatacggtggaacgacgtggccgggctggagggggccaaggaggccctcaaagaagctgtcattttgccaatcaaattcccacacttgttcacaggcaagcgcaccccctggcgggggattctgctgttcggaccccctggcacagggaaatcctacctggccaaagccgtggcaacagaggccaacaactccaccttcttctctgtgtcctcctcagatctgatgtccaagtggctgggggagagtgaaaagctggtcaagaacctgtttgagctggccaggcagcacaagccctccatcatcttcatcgatgaggtggattccctctgcgggtcccgaaatgaaaatgagagtgaggccgcccggaggatcaaaacggagttcttggtccagatgcagggggtggggaataacaatgatgggactctggttcttggagccacaaacatcccatgggtgttggattcggccatcaggaggaggtttgaaaaacgaatttatatccccttgccggaggaagctgcccgcgcccagatgttccggttgcatctcgggagcactccccacaacctcacggatgcaaacatccacgagctggcccggaagacggaaggctactcgggcgcggacatcagcatcatcgtgcgggactctctcatgcagcccgtgaggaaggtgcagtcggccacacacttcaaaaaggtctgtggcccctctcgcaccaaccccagcatgatgattgatgacctcctgactccatgctcaccaggggacccaggagccatggagatgacttggatggatgtccctggggacaaactcttagagcctgtggtttgcatgtcggacatgctgcggtctctggccaccacccggcccacggtgaatgcagacgacctcctgaaagtgaagaaattctcagaggactttgggcaagagagttaaaagctgcttcacttgggcaatggtgaaggtgggaggttgattggggcaaatccaggcactccccatgtcaacagccagacagggctccagggcttgtcccagtcaatacagagttccctctgctgtctggccgtctgccagggagccagaaggaagggccttgcagccacagagacactccactgccctggggcacacagtggacactgctcttcctacttcctcctctcctggatgctcatcagctccttctgcctcccccccttttttttccatcttttgttcccctaaattaatgctgcttggattttcatcttatttataaagataaaatcacctggaagtgtcaaggagtggggcggggtggcgggggagaagcagccgtgctgccaggtcacccagacctccagacagccggctagccccactgcccgttccttttacgcccaagttttgctccttgagagcagattggctgatgcccctgcaaccccagcccaagctctgcctcaaagaccgagtgacataagccattcccaccctcctaggttcacatccagggctgtgtcttccttgggggaggagatggtgtcgtttagatcagggtaaggcagtcaggcgggtgttcaccactgccttttcttcctctgagcgtgagaacactgaacccagccactgcccctgggtccctgtcctggaaatggtctaataaatccttttcccttcttgagctacccaaaaaaaaaaaaaaaaaa

SEQ ID NO: 164 - DNA, 1251 bp, Homo sapiens
ggcacgagagaggcagagtttacaaaggtctaggatgacatctggtgtattgactgtggccagtcttaaagctagtttttgctatgtggaacatgctgctctaattcagatttaaagagtttcttcctgttaattcgaagctcactgtgcctcttgtttccgagggaagaaggactgattaagtcatctaaatggatgcaatactgaattacaggtcagaagatactgaagattactacacattactgggatgtgatgaactatcttcggttgaacaaatcctggcagaatttaaagtcagagctctggaatgtcacccagacaagcatcctgaaaaccccaaagctgtggagacttttcagaaactgcagaaggcaaaggagattctgaccaatgaagagagtcgagcccgctatgaccactggcgaaggagccagatgtcgatgccattccagcagtgggaagctttgaatgactcagtgaagacgtcaatgcactgggttgtcagaggtaaaaaagacctgatgctggaagaatctgacaagactcataccaccaagatggaaaatgaggaatgtaatgagcaaagagaaagaaagaaagaggagctggcttcaaccgcagagaaaacggagcagaaagaacccaagcccctagagaagtcagtctccccgcaaaattcagattcttcaggttttgcagatgtgaatggttggcaccttcgtttccgctggtccaaggatgctccctcagaactcctgaggaagttcagaaactatgaaatatgaaatatctctgcttcaaaaaatgaggaagagcaagactgtcccctatgctgccaacatgcagtctttgtttatgtcttaaaaatgtcatgtttatgtcatgtctgtgaattgctgagtactaattgattcctccatccttgaatcagttctcataatgctttttaaataagaaaaattcagaagatgaatttcttccaatatttgaataaattaaagctcttagatacagagtagattgtattatatgctttttcctattaatactacttatagaaatccattaaaaagcaatctctgtacagtgtatttaaatatttcattgacatactgtgatctctattagtgatggatgtacaaaaaatgttttcttacccttgacttacaatgaaatgtgaaattacttgtctgaaccccgtggggagaaataaataattttcccaaagttcaaaaaaaaaaaaaaaaa

SEQ ID NO: 165 - DNA, 764 bp, Homo sapiens
  SITE (758): n equals a,t,g, or c
atgctccgcgccaggccccgccccggctcgccgtggagaccggcgcgtgaggaacctaccggtaccggccgcgcgctggtagtcgccggtgtggctgcacctcaccaatcccgtgcgccgcggctgggccgtcggagagtgcgtgtgcttctctcctgcacgmggtgcttgggmtcggccaggcggggtccgccgccagggtttgaggatgggggagtagctacaggaagcgaccccgcgatggcaaggtatatttttgtggaatgaaaaggaagtattagaaatgagctgaagaccattcacagtgtatatggccrttttagtgggyacagatcaggatttttacagtttacttggagtrtccaaaactgcaagcagtagagaaataagacaagctttcaagaaattggcattgaagytacatcctgataaaaacccgaataacccaaaygcacatrgyrattttttaaaaataaatagagcatatgaagtactcaaagatgaagatctacggaaaaagtatgacaaataygragaaaagggacttgaggataatcaaggwggccagtatgaaagctggaaytattatcgttatgattttggtatttatgatgatgatcctgaaatcataacaytggawagaagagartttgatgctgctgttaattctggagaactktggtttgtraayttttactccccaggmtgktcacactgccatgatttagctcccacagtatgtatttttcacatcctcnttacta

SEQ ID NO: 166 - DNA, 2217 bp, Homo sapiens
  SITE (636): n equals a,t,g, or c
  SITE (1819): n equals a,t,g, or c
  SITE (1820): n equals a,t,g, or c
  SITE (2163): n equals a,t,g, or c
  SITE (2176): n equals a,t,g, or c
  SITE (2180): n equals a,t,g, or c
accgtaaccagggtgacaaagaggccgaggcgaaatttaaagagatcaaggaagcttatgaagttctgaccgactcgcaaaaacgtgcggcatacgatcagtatggtcatgctgcgtttgagcaaggtggcatgggcggcggcggttttggcggcggcgcagacttcagcgatatttttggtgacgttttcggcgatatttttggcggcggacgtggtcgtcaacgtgcggcgcgcggtgctgatttacgctataacatggagctcaccctcgaagaagctgtacgtggcgtgaccaaagagatccgcattccgactctggaagagtgtgacgtttgccacggtagcggtgcaaaaccaggtacacagccgcagacttgtccgacctgtcatggttctggtcaggtgcagatgcgccagggattcttcgctgtacagcagacctgtccacactgtcagggccgcggtacgctgatcaaagatccgtgcaacaaatgtcatggtcatggtcgtgttgagcgcagcaaaacgctgtccgttaaaatcccggcaggggtggacactggagaccgcatccgtcttgcgggcgaaggtgaagcgggcgagcatggcgcaccggcaggcgatctgtacgttncaggttcaggttaaayagcacccgattttcgagcgtgaaggcaacaacctgtattgcgaagtcccgatcaacttcgctatggcggcgctgggtggcgaaatcgaagtaccgacccttgatggtcgcgtcaaactgaaagtgcctggcgaaacccagaccggtaagctattccgtatgcgcggtaaaggcgtcaagtctgtccgcggtggcgcacagggtgatttgctgtgccgcgttgtcgtcgaaacaccggtaggcctgaacgaaaggcagaaacagctgctgcaagagctgcaagaaagcttcggtggcccaaccggcgagcacaacagcccgcgctcaaagagcttctttgatggtgtgaagaagttttttgacgacctgacccgctaacctccccaaaagcctgcccgtgggcaggcctgggtaaaaatagggtgcgttgaagatatgcgagcacctgtaaagtggcggggatcactcccataagcgctaacttaagggttgtggtattacgcctgatatgatttaacgtgccgatgaattactctcacgataactggtcagcaattctggcccatattggtaagcccgaagaactggatacttcggcacgtaatgccggggctctaacccgccgccgcgaaattcgtgatgctgcaactctgctacgtctggggctggcttacggccccggggggatgtcattacgtgaagtcactgcatgggctcagctccatgacgttgcaacattatctgacgtggctctcctgaagcggctgcggaatgccgccgactggtttggcatacttgccgcacaaacacttgctgtacgcgccgcagttacgggttgtacaagcggaaagagattgcgtcttgtcgatggaacagcaatcagtgcgcccgggggcggcagcgctgaatggcgactacatatgggatatgatcctcatacctgtcagttcactgattttgagctaaccgacagcagagacgctgaacggctggaccgatttgcgcaaacggcagacgagatacgcattgctgaccggggattcggttcgcgtcccgaatgtatccgctcacttgcttttggagaagctgattatatcgtccgggttcactggcgaggattgcgctggttaactgcagaaggaatgcgctttgacatgatgggttttcnncgcgggctggattgcggtaagaacggtgaaaccactgtaatgataggcaattcaggtaataaaaaagccggagctccctttccggcacgtctcattgccgtatcacttcctcccgaaaaagcattaatcagtaaaacccgactgctcagcgagaatcgtcgaaaaggacgagtagttcaggcggaaacgctggaagcagcgggccatgtgctattgctaacatcattaccggaagatgartattcagcagagcaagtggctgattgttaccgtctgcgatggcaaatttgaactggcttttaagcggctcaaaagtttgctgcacctggatggtttgcgtggnaaaggaacctggncctnggggaaggtggggttattttggtaatctacttggccg

SEQ ID NO: 167 - DNA, 479 bp, Homo sapiens
  SITE (454): n equals a,t,g, or c
  SITE (465): n equals a,t,g, or c
gcgacggccttgagcgaggaggagctggacaatgaagactattactcgttgctgaacgtgcgcagggaggcctcttctgaagagctgaaagctgcctaccggaggctctgtatgctctaccatccagacaagcacagagacccagagctcaagtcacaggcggaacgactgtttaaccttgttcaccaggcttatgaagtgcttagtgacccccaaaccagggccatctatgatatatatgggaagagaggactggaaatggaaggatgggaggttgtggaaaggaggagaacccctgctgaaattcgagaggagtttgwgcggctgcagagagagagagaagagaggagattgcagcagcgaaccaatcccaagggaacgatcagygttggagtagatgccaccgacctttttgatcgytatgatgrggrgttgaagatgtgtccggcagtanctttcccgcanattgaaattaataa

SEQ ID NO: 168 - DNA, 625 bp, Homo sapiens
  SITE (488): n equals a,t,g, or c
  SITE (501): n equals a,t,g, or c
  SITE (526): n equals a,t,g, or c
  SITE (549): n equals a,t,g, or c
  SITE (570): n equals a,t,g, or c
cctacacttataggagttaccttacaggggttccttcaatttgtgttgatttacgcgagataacgctatggaattaaaggattattacgccatcatgggcgtgaaaccgacggacgatctcaagacaatcaagaccgcctatcgtcgacttgcccgcaaataccrtcctgatgtcagcaaagaaccggatgccgaagcccgcttcaaagaggtcgctgaagcctgggaagtgttaagtgatgaacaacgtcgcgctgagtatgatcagatgtggcaacatcgcaacgatccgcaatttaaccgtcagttccaccatggcgacggtcagagtacttctagagcggccgcgggcccatcgattttccacccgggtggggtaccaggtaagtgtacccaattcgccctatagtgagtcgtattacaattcactggccgtcgttttacaacgtcgtgactgggaaaaccctggcgttacccaacttaatcgncttgcagcacatncccctttcgccagctggcgtaatangcgaaaaggcccgcaccgatcgnccttccaacagttgcgcaagnctgaatggcgaatgggagatccaatttttaaagcggataatggggtaaacctaac

SEQ ID NO: 169 - DNA, 997 bp, Homo sapiens
  SITE (846): n equals a,t,g, or c
ggtgacaagaggtgcctcatttcagtctcttctgcaggctgatttaattcttccactaagagcctaggacgaaagaaaagtaaagaaggcgtataggcagaaggccctctcctgccacccagacaaaaatccagataatcccagagcagctgaactcttccaccagctttctcaggccttggaggtgctgaccgatgctgcagccagggctgcatatgacaaggtcaggaaagccaagaagcaagcagcagagaggacccagaaacttgatgagaaaaggaagaaagtgaagcttgacctggaggcccgggagcggcaggcccaggcccaggagagtgaggaggaagaggagagccggagcaccaggacactagagcaagagatcgaacgcctgakagaagagggttcccggcagctgkaggaacagcagaggctcatccgggagcagatacgccaggagcgtgaccagaggttgagaggaaaggcagaaaatactgaaggccaaggaacccccaaactaaagctaaaatggaagtgcaagaaggaggatgagtcaaaaggtggctactccaaagacgtcctcctacggcttttgcagaagtatggtgaggttctcaacctggtgctttccagtaagaagccaggcactgctgtggtggagtttgcaaccgtcaaggcagcggagctggctgtccagaatgaagttggcctggtggataaccctctgaagatttcctggttggagggacagccccaggatgccgtgggccgcagccactcaggactgtcaaagggctcagtgctgtcagagagggactacgagagcctcgtcatgatgcgcatgcnccaggcggccgagcggcaacagctgatcgcacggatgcagcaggaagaccaggaggggccgyctacgtagccccagstycagccatccacccctyagsccttttytttcacggttcmcccamtaaattttttttttttttaagaaaaaatt

SEQ ID NO: 170 - DNA, 910 bp, Homo sapiens
tcgacccacgcgtccgggactgattaagtcatctaaatggatgcaatactgaattacaggtcagaagatactgaagattactacacattactgggatgtgatgaactatcttcggttgaacaaatcctggcagaatttaaagtcagagctctggaatgtcacccagacaagcatcctgaaaaccccaaagctgtggagacttttcagaaactgcagaaggcaaaggagattctgaccaatgaagagagtcgagcccgctatgaccactggcgaaggagccagatgtcgatgccattccagcagtgggaagctttgaatgactcagtgaagacggtgggtttctcgctgggtgcgacgtgaatttgtgaagctcaggatgcccatggattagactcatgtagtagcttaaagagtcattaggcgataggagggagaaaaccaagaagttagcagagtctggatataattcagtgtccgtaaatcccatgaagagaagctcatcagaataaaggcaatgaatttgtgccagaagagcctgtgactacatttctttcaatctctttggctgtttgtttcagtatacacactccctgttattgcttactattttatgagctctaataaatgtacttctcaagttgctcatgaattgctgagttttaaccattgtaaattcacattctccatctttttagtttatgtcagcttgctctcttttcaaggcttagaattttcattaaaaaggcaggatctgattagtcagagaaagccatgaattattcctattaaacattctggtgaaagaattgttagactttaaaaacattgtgttatctttcttcatgtcattaaaaggcataaatatcaaaatattcactataaaaaaaaaaaaaaaaaaaaaaaaaaaaaa

SEQ ID NO: 171 - DNA, 447 bp, Homo sapiens
tgctcgctggcgagatcaaagccgtgcaaagaaagcaaatattccgcgcgcattaacggatgacgcagcgtttgccaggcctggttaatggttgcagattgctgtacggcggcgagttgttccgcctggcttccgctggcgaatttatcaggatgatactgacgttgtagatcctgaaaacgcaggctcagcgcctgggtatcgagttgatagcgggcaggcaagccaaagagggtgaagtaatccataacattctcagggctgcgatccgccgcgataacggcgaatcaggtaaaacaaaccccacgcgcaggcgaccacggtggggttatcggtatgcgcatcaaacgtggaagctttcgccgcaaccacactcatctttgacgttcgggttggtgaatttaaaccttcgttcaggccttcttttacgaagtccagctgcgtacc

SEQ ID NO: 172 - DNA, 1259 bp, Homo sapiens
gcccacgcgtccgcgaatccgtcaggccggaaccatggcagtgaccaaggagctcttacagatggacctgtacgcgctgctaggcattgaggagaaggcagcggacaaagaggtaaagaaggcgtataggcagaaggccctctcctgccacccagacaaaaatccagataatcccagagcagctgaactcttccaccagctttctcaggccttggaggtgctgaccgatgctgcagccagggctgcatatgacaaggtcaggaaagccaagaagcaagcagcagagaggacccagaaacttgatgagaaaaggaagaaagtgaagcttgacctggaggcccgggagcggcaggcccaggcccaggagagtgaggaggaagaggagagccggagcaccaggacactagagcaagagatcgaacgcctgagagaagagggttcccggcagctggaggaacagcagaggctcatccgggagcagatacgccaggagcgtgaccagaggttgagaggtgcaggtctatcaccccgcctatctcccctccaaggaaaggcagaaaatactgaaggccaaggaacccccaaactaaagctaaaatggaagtgcaagaaggaggatgagtcaaaaggtggctactccaaagacgtcctcctacggcttttgcagaaggagctggctgtccagaatgaagttggcctggtggataaccctctgaagatttcctggttggagggacagccccaggatgccgtgggccgcagccactcaggactgtcaaaggtgaggagtcaggcctcgcccggctgggcgctcaggtctcggagctcttcctacctgggctcctctcaggctctttccttccaaattcagatcttggggcctagagtgagcttggcaggtccaccaacccaggcaagaggggctgtgatttcacgttgaacccttttcctctctgagggccagagaggccccacccacactgtattcttagaccttgctttctctccatatctggcctcctgttgggactctccttctcaccaaagggatcttcctggccctcaggttgcttggttgtggtgtgtgaagcatttggagcttagacgacccagtgctgcagagaaggggcaggtgactaggacagccacttccttcccagcacttcagttttctggatgtgtctctggctgccccagaaagggaccgactgtcaagaggcaatatctcctcttgaagtaaccctggcaggctgggcgca

SEQ ID NO: 173 - DNA, 416 bp, Homo sapiens
  SITE (13): n equals a,t,g, or c
  SITE (372): n equals a,t,g, or c
tggtgcggctgtntcacggaccacggcggcgcccgcagctcctcaccgcagcacccccactgcaggctcgaggagctttccggagcttcccacactcctggggagaagacttcttagccagcttgatgtttaaaattcagctggagcccttaaaacttcgagcgtggacgctgaatgggtttgtaaagtttcgaaacaaggagaccagtgctggtccagtggctgtgatgggaaaagattattacaagattcttgggatcccatcgggggccaacgaggatgagatcaagaaagcctaccggaagatggccttgaagtaccacccagacaagaataaagaacccaacgctgaggagaagtttaaggagattncagaggcctatgatgtgctaagtgaccccaaagaaacgggggcc

SEQ ID NO: 174 - DNA, 697 bp, Homo sapiens
  SITE (658): n equals a,t,g, or c
  SITE (674): n equals a,t,g, or c
  SITE (682): n equals a,t,g, or c
  SITE (686): n equals a,t,g, or c
gccgcggagccggcgggagggcgggcgggcgggcggacgggcagcctaacatggcagaccagagacagcgctcactgtctacctctggggagtcattgtaccacgtccttgggttggacaagaacgcaacctcagatgacattaaaaagtcctatcggaagcttgccttgaaatatcaccccgacaagaaccccgacaacccggaggccgcggacaagtttaaggagatcaacaacgcgcacgccatcctcacggacgccacaaaaaggaacatctacgacaagtacggctcgctgggtctctacgtggccgagcagtttggggaagagaacgtgaacacctacttcgtgctgtccagctggtgggccaaggccctgtttgtcttctgcggcctcctcacgtgctgctactgctgctgctgtctgtgctgctgcttcaactgctgctgcgggaagtgtaagcccaaggcgcctgaaggcgaggagacggagttctacgtgtcccccgaggatctggaggcacagctgcagtctgacgagaggggagggcactgacactgtgccgcgagtgtttgtggtggcagctgggactgttgaggtgtgaacgtggaccctgagaggccacagacacgccgatcgtcatacagcccggaatccgncaccgagaccacccancttacagncgantccaccccagt

SEQ ID NO: 175 - DNA, 1030 bp, Homo sapiens
  SITE (776): n equals a,t,g, or c
  SITE (923): n equals a,t,g, or c
  SITE (1002): n equals a,t,g, or c
tcgctcgcccggcctccccctccctggttccgcgttctggttccgccatggaatccaacaaggatgaagctgagcgctgtatcagcatcgccctcaaggccatccagagcaaccagcccgaccgggcgctccgcttcctggagaaggcacagcggctgtatccgacgccgcgagttcgcgccctgattgagtccctcaaccagaaaccacagactgccggtgaccaacccccacccacagacacaacccatgccacccacaggaaagcaggtgggaccgatgccccctcggccaacggtgaagctggaggagagagcaccaaaggctacactgcagaacaggttgcagctgtgaaaagggtcaagcaatgtaaagattactatgagatcctgggggtgagcagaggggcctcggatgaggacctgaagaaggcctaccgcagactggccctcaaattccacccagacaagaaccacgcacctggtgccactgaagccttcaaagccattggcacagcatatgcggtactcagcaacccggagaagaggaagcagtatgaccagttcggcgatgacaagagccaggcggcccggcacggccatgggcatggggatttccaccgtggctttgaggccgacatctcccctgaagacctcttcaacatgttctttggcggcggcttcccttctagtaacgtccacgtctacagcaacggccgcatgcgctatacctaccagcaaaggcaggaccgcagscaaaccagggtgatggcgggntaggggtgtttgtgcagytgatgcctatcctcatcctgattctcgtgtcagcttcttcagccagcttcatggtctccagtccaccctacagtctgagtccaagaccgtccgtgggccacatccacaggcgagttcaatgaccaactnggtgttcgtcttattatgtggggaggacaattttttcccagggttacaaaggtttccagcttcaaaacattcgagcggnattttggaagatgattatattggccaac

SEQ ID NO: 176 - DNA, 1645 bp, Homo sapiens
ggcacgaggagaaatgtgtcgagatcgcccgggaggccctgaacgccggcaaccgcgagaaggcccagcgcttcctgcagaaggccgagaagctctacccactgccctcggcccgcgcactattggaaataattatgaaaaatggaagcacggctggaaatagccctcattgccgaaaaccatcaggtagtggcgatcaaagcaagcctaattgcacaaaggacagcacatctggtagtggtgaaggtggaaaaggctataccaaagaccaagtagatggagttctcagcataaacaaatgtaaaaattactatgaagtacttggagttacgaaagatgctggtgatgaagatttgaaaaaagcttatagaaagcttgctttgaagtttcatccagacaaaaaccatgcacctggagcaacagatgcttttaaaaagattggaaatgcttatgctgttttaagtaatccagaaaagcgaaaacagtatgacctcacgggcaatgaagaacaagcatgtaaccaccaaaacaatggcagatttaatttccatagaggttgtgaagctgatataactccagaagacttgtttaatatattttttgggggtggatttccttcaggtagtgtacattctttttcaaatggaagagctggttatagccaacaacatcagcatcgacatagtggacatgaaagagaagaggaaagaggagatggaggtttttctgtgtttatccagctgatgcccataattgtattgatcctcgtgtcattattaagccagttgatggtctctaatcctccttattccttatatcccagatctggaactgggcaaactattaaaatgcaaacagaaaacttgggtgttgtttattatgtcaacaaggacttcaaaaatgaatataaaggaatgttattacaaaaggtagaaaagagtgtggaggaagattatgtgactaatattcgaaataactgctggaaagaaagacaacaaaaaacagatatgcagtatgcagcaaaagtataccgtgatgatcgactccgaaggaaggcagatgccttgagcatggacaactgtaaagaattagagcggcttaccagtctttataaaggaggatgaactggaatttttatttataccttttagcgtactctttattttttctgtaagtaagtttggtttcatcatgagggatgaaggaaaagatttgatactgaaaactaaactgaatagttggttcctgaaatcttggactgtttatgacctactggctcctttaaatagtaactgaaaactaaaatggaatattttagttaacgcttctacaagtattttcattttaaaagcttacatgattcctaactaaagtgtcatgagaaaggattatcacacctgtagcaatttccagttttagtgattctccattttttcccttgtcatgtaaatatttatggaatgatcattttgtgtacatacaggttactgcttttttatttaaattcttttagtgtttagctccatgagacacttcagtttaaattgatggaataaatgttatatgacacatttacattttccttatcaaggtgtcaaatatgtggactttaaacaatgaaactttttcaaaaaaaaaaaaaaaa

SEQ ID NO: 177 - DNA, 364 bp, Homo sapiens
  SITE (306): n equals a,t,g, or c
  SITE (339): n equals a,t,g, or c
  SITE (348): n equals a,t,g, or c
ggcagagcgggccktcaccctgcctcccctgcktcccgccaccggccgcttctktcctcggacccattccaacaatctcgtaaaacatggtggattactatgaagttctaggcgtgcagagacatgcctcacccgaggatattaaaaaggcatatcggaaactggcactgaagtggcatccagataaaaatcctgaggatkaaagaagaagcagagagaaaattcaagcaagtagcggaggcatgatgraagtgcctgtcggatgaagacccttttgaaggacttctttggggawtcgaaggggtnccccgagggaagcagaagccgagggacggggtncgttttttntctgcgtttcaatggg

SEQ ID NO: 178 - DNA, 500 bp, Homo sapiens
ggcacgagaagtaactcagctgtcatcttcattataaaaccacacattttcctctgactctgggcaatgacctgcgtatataagctgttagtcataagggctggatggggcagcatctcaatcatatagggcacaggacagacctcagtatcaccagcaagaatccattacagttcaacatgtaacctcgggcacgggggaggctcggcggacctgctgattgggaaccgatatggcggcgactctgggcagcggggagcgctggacggaagcttacattgacgcagttagaagaaacaaatacccagaagacacacctcctgagagtcatgacccctgtggctgctgtaactgcatgaaggcacaaaaggaaaagaagtctgagaatgagtggactcagacccggcagggtgaggggaactccacgtatagtgaggaacagctgcttggggtacaaaggatcaagaaatgcagaaattactatgaaattctgggagttt

SEQ ID NO: 179 - DNA, 1063 bp, Homo sapiens
  SITE (1061): n equals a,t,g, or c
  SITE (1062): n equals a,t,g, or c
  SITE (1063): n equals a,t,g, or c
ggcacgagcctcccctccccccactcctctcagtgggggcccctccagtccctgagaattggtactacgaaaaggtgaactcctgggcagaatcttgcctagagcttgcggagtccagccaggcccctgctgaagggccccagaccaccggccacttctcccccgtccatctgaccagctgggcccctgcgcccacctggcctccacgttccctctcctctcacccacacccctggccatggctaactactacgaagtgctgggcgtgcaggccagcgcttccccggaggacatcaagaaagcctaccgcaagctggcccttcgttggcaccccgacaagaaccctgacaataaggaggaggcggagaagaagttcaagctggtgtctgaggcctatgaggttctgtctgactccaagaaacgctccctgtatgaccgtgctggctgtgacagctggcgggctggtggcggggccagmacgcctaccacagccccttcgacaccggctacaccttccgtaaccctgaggacatcttccgggagtttttyggtggcctggaccctttctcctttgagttctgggacagcccattcaatagtgaccgtggtggccggggccatggcctgaggggggccttctcggcaggctttggagaatttccggccttcatggaggccttctcatccttcaacatgctgggctgcagcgggggcagccacaccaccttctcatccacctccttcgggggctccagttctggcagctcggggttcaagtcggtgatgtcgtccaccgagatgatcaatggccacaaggtcaccaccaagcgcatcgtggagaacgggcaggagcgcgtggaggtggaggaagacgggcagctcaagtcggtgactgtgaacggcaaggagcagctcaaatggatggacagcaagtaggcgctggccacccsgccctgccttcccaccaccaccaccgtgcatggggcagcaaacacgtggggccgcagacatagcctgatggttaataaatgtgccaagtgagttcatggcaaaaaaaaaannn

SEQ ID NO: 180 - DNA, 630 bp, Homo sapiens
  SITE (546): n equals a,t,g, or c
cacaaaactgcatttcaaattcttacttggaaggcatgtcttctctaactcatgaccattccatacattccagaagcctaggcgttgatgggagctgtctggagcaggggtccccagcccccaggccgcagactgatactagtccatgacctgttgggaactgggctacacagcaggaggatctctaccaccagtcctatgaatgcgtttgtgtcctcttcgcctcagtcccagacttcaaggagttctactctgaatccaacatcaatcatgagggcctagagtgtctgargctgctcaatgagatwattgctgattttgatgagctgctctccaagcccaagttcagtggggtggaraagatcaagaccatcggcagcacctacatggcagccacaggttaaatgccacctctggacaggatgcacaacaggatgctgaacggagctgcagccaccttggcactatggtggaatttgccgtggcctggggtctaagctggacgtcatcaacaagcattcattcaacaacttccgcctgcgagtngggttgaaccatggacccgtagtagctggagttattggggccagaagccgcaatatgcatttgggcaacacagtgaacgtggcc

SEQ ID NO: 181 - DNA, 915 bp, Homo sapiens
  SITE (815): n equals a,t,g, or c
  SITE (852): n equals a,t,g, or c
  SITE (878): n equals a,t,g, or c
  SITE (883): n equals a,t,g, or c
aattcggcacagragwaaagaggagatggaggagctgcagcctacaaccggcggctgctgcacaacatcctgcccaaggacgtggccgctcacttcctggcccgcgagcggcgcaatgatgagctctactatcagtcctgtgagtgtgtggcggtcatgttcgcctccatcgccaacttctccgagttctacgttgagctggaggccaacaacgagggtgtcgagtgcctgcggctactcaatgagatcatcgctgactttgatgagatcatcagcgaggatcggttccggcagctggagaagatcaagaccatcggcagcacctacatggctgcctccggcctcaacgactctacctacgacaaggtgggcaagacccacatcaaggcactggccgactttgccatgaagctgatggaccagatgaagtacatcaatgagcactccttcaacaacttccagatgaagatcgggctcaacatcggccccgtggtggccggggtgataggggcacgaaagcctcagtacgacatctggggcaataccgtgaacgtggccagccgcatggacagcaccggtgtacccgaccgcatccaggtcaccacagacatgtaccaggtgctggctgccaacacgtaccagctggagtgccggggcgtggtcaaggtcaagggcaaaggcgagatgatgacctacttcctcaatggagggcccccgctcagttagcagctgttggccaatggtgccaggcagcckgcyctccacaccctgagatttcagacgtttgcggtttacagaggcagcgcccacagttncagagtgtttacagaaggccaagtgttttgcaggttnggacgaggaagccaagcttccttggntattnatttggccaagtgcaagtggtttttcctggag

SEQ ID NO: 182 - DNA, 330 bp, Homo sapiens
  SITE (272): n equals a,t,g, or c
  SITE (285): n equals a,t,g, or c
  SITE (289): n equals a,t,g, or c
gctgccactctcactgccagaccatgccatcaactgcgtgcgcatgggcctggacatgtgcckggccatcaggaaactgcgggcagccactggcgtggacatcaacatgcgtgtgggcgtgcactcaggcagcgtactgtgtggagtcatcgggctgcagaagtggcagtacgacgtttggtcacatgatgtcacactggctaaccacatggaggcaggcggtgtaccagggcgagtgcacatcacaggggctaccctggccctgctggcangggcttatgctgnggangaccaagcatggagcattgggacccctacctttgggagcta

SEQ ID NO: 183 - DNA, 667 bp, Homo sapiens
  SITE (655): n equals a,t,g, or c
attcggcacgaagattttgcacagagacctgaaaccacagaaccttctgatcagtgacacgggggagttaaagctggcagatttcggtcttgcaagagcaaaatccgtccctagccacacatactccaacgaatggttaccttgtggtacagacctccagatgtccttctaggctcaacagaatattccacctgccttgacatgtggggagtaggttgcatctttgttgaaatgatccaaggagttgctgcttttccaggaatgaaagacattcaggatcaacttgaacgaatatttctggttcttggaacaccaaatgaggacacatggcctggagttcattctttaccacattttaagccagaacgctttaccctgtacagctctaaaaaccttagacaagcatggaataagctcagctatgtgaaccatgcagaggacctggcctccaagctcctacaatgttccccaaagaacagactgtcggcacaggctgccttgagccacgagtattttagtgacctgccgccacggctatgggaactcaccgacatgtcttctatttttactgtcccaaatgtgagattgcaaccagaagctggagaaagcatgcggggcttttgggaaaaacaatagttatgggaaaagttttttnaaacaggaagga

SEQ ID NO: 184 - DNA, 435 bp, Homo sapiens
  SITE (427): n equals a,t,g, or c
ctcgtgccgcaagaatatgctgccaaaattatcaacaccaaaaagctttctgctagggatcatcagaaactagaaagagaagctagaatctgccgtcttttgaagcaccctaatattgtgcgacttcatgatagcatatcagaagagggctttcactacttggtgtttgatttagttactggaggtgaactgtttgaagacatagtggcaagagaatactacagtgaagctgatgccagtcattgtatacagcagattctagaaagtgttaatcattgtcacctaaatggcatagttcacagggacctgaagcctgaggaatttgcttttagctagcaaatccaagggagcagctgtgaaattgggcagactttggsttwgccatagaagttcaaggggaccagccagcgtgggttttgggttttgntgggcaca

SEQ ID NO: 185 - DNA, 1065 bp, Homo sapiens
  SITE (920): n equals a,t,g, or c
  SITE (956): n equals a,t,g, or c
  SITE (1002): n equals a,t,g, or c
  SITE (1045): n equals a,t,g, or c
gaagagaacaaggccagggtcatttttatcacagaatacatgtcatctgggagtctgaagcaatttctgaagaagaccaaaaagaaccacaagacgatgaatgaaaaggcatggaagcgttggtgcacacaaatcctctctgccctaagctacctgcactcctgtgacccccccatcatccatgggaacctgacctgtgacaccatcttcatccagcacaacggactcatcaagattggctctgtggctcctgacactatcaacaatcatgtgaagacttgtcgagaagagcagaagaatctacacttctttgcaccagagtatggagaagtcactaatgtgacaacagcagtggacatctactcctttggcatgtgtgcactggagatggcagtgctggagattcagggcaatggagagtcctcatatgtgccacaggaagccatcagcagtgccatccagcttctagaagacccattacagagggagttcattcaaaagtgcctgcagtctgagcctgctcgcagaccaacagccagagaacttctgttccacccagcattgtttgaagtgccctcgctcaaactccttgcggcccactgcattgtgggacaccaacacatgatcccagagaacgctctagaggagatcaccaaaaacatggatactagtgccgtactggctgaaatccctgcaggaccaggaagagaaccagttcagactttgtactctcagtcaccagctctggaattagataaattccttgaagatgtcaggaatgggatctatcctctgacagcctttgggctgcctcggcccmagcagccacagcaggaggaggtgacatcacctgtcgtgcccccttytgtcaaggacttccacacctgraccagcttaaggtggagactcgcaaggtggtngcttgatgcagtgcaacattggagtccggtggaagnagggagtcaaacaccaactggacacttttggctgaagttggagggncaaactggaccgggaacctgaacttgggaccggtgccaaatgnggaatattcccgagttgcgg

SEQ ID NO: 186 - DNA, 279 bp, Homo sapiens
tagacatagaarggctggttttccatcttgtcatacaggcagaaatactcagtgtcctcagtcacagaaacatcatccagttttatggagtaattcttgaacctcccaactatggcattgtcacagaatatgcttctctgggatcactctatgattacattaacagtaacagaagtgaggagatggatatggatcacattatgacctgggccactgatgtagccaaaggaatgcattatttacatatggaggctcctgtcaaggtgattcacagagacc

SEQ ID NO: 187 - DNA, 504 bp, Homo sapiens
  SITE (486): n equals a,t,g, or c
  SITE (493): n equals a,t,g, or c
gcctgcaccgagacctcaagacccagaacatcctgcttgacaaacaccgcatggtcgtcaagatcggtgatttcggcatctccaagatccttagcagcaagagcaaggcctacacggtggtgggtaccccatgctatatctcccctgagctgtgtgagggcaagccctacaaccagaagagtgacatctgggccctgggctgtgtcctctacgagctggccagcctcaagagggctttcgaggctgcgaacttgccagcactggtgctgaagatcatgagtggcacctttgcacctatctctgaccggtacagccctgagcttcgccagctggtcctgagtctactcagcctggagcctgccagcggcaccactcagccacatcatggcacaagccctytgsatycgkgccttytcaacttcacaccgacgtgggcagtgtcccgcatgcggagggcagagaagtccgtgggccccagcaacacanggagcangaccaccaatg

SEQ ID NO: 188 - DNA, 639 bp, Homo sapiens
gtgatcacctacatgctgctgagcggcctctcccccttcctgggagatgatgacacagagaccctaaacaacgttctatctggcaactggtactttgatgaagagacctttgaggccgtatcagacgaggccaaagactttgtctccaacctcatcgtcaaggaccagagggcccggatgaacgctgcccagtgtctcgcccatccctggctcaacaacctggcggagaaagccaaacgctgtaaccgacgccttaagtcccagatcttgcttaagaaatacctcatgaagaggcgctggaagaaaaacttcattgctgtcagcgctgccaaccgcttcaagaagatcagcagctcgggggcactgatggctctgggggtctgagccctgggcgcagctgaagcctggacgcagccacacagtggccggggctgaagccacacagcccagaaggccagaaaaggcagccagatccccagggcagcctcgttaggacaaggctgtgccaggctgggaagctcggggctccccacgcccccatgcartgamcgcttccccgatgtgagccgctcggartktggcctggatcatcctgctagcactccccagacagggctccagcctgtcggccacacccca

SEQ ID NO: 189 - DNA, 476 bp, Homo sapiens
  SITE (59): n equals a,t,g, or c
gcgcctgcaggtcgacactagtggatccaaagaattcggcacagtggttacggtcctgngaaagaaaactcctgcattcctcccctttaattgggtttattgttaaagcactggagcagctaatgctcacagacctgtaggagctggagtgggagctcaagcaggattcttcccgagtccctggcatcctcagaagcttcaactctggaggcaatgggtcgaaaggaagaagatgactgcagttcctggaagaaacagaccaccaacatccggaaaaccttcatttttatggaagtgctgggatcaggagctttctcagaagttttcctggtgaagcaaagactgactgggaagctctttgctctgaagtgcatcaagaagtcacctgccttccgggacagcagcctggagaatgagawttgctgtgttgaaaaagtttcaagcatgaaaacattgtgaaccctgggaggacatct

SEQ ID NO: 190 - DNA, 392 bp, Homo sapiens
  SITE (46): n equals a,t,g, or c
  SITE (371): n equals a,t,g, or c
accctgccactcccagtaatttcctgcccaagaagacccccttggntgaagagatgacacccccacccaagcccccacgcctctacctcccccaggagccaacatccgaggagactccgcgcaccaaacgtccccatatggagcctaggactcgacgtgggccatctccaccagcctcccccaccaggaaaccccctcggyttcaggacttccgctgcttagctgtgctgggccggggacactttgggaaggtcctcctggtccagttcaaggggacagggaaatactacgscatcaaagcactgaagaagcaggaggtgctcagccgggacgagatagagagcctgtactgcgagaagcggattcctggnaggttgtggggttgcacaggg

SEQ ID NO: 191 - DNA, 316 bp, Homo sapiens
agaagacgctkggcaaaggacagacagggctggttaaactcggggtccactgcatcacgggtcagaaggtcgccatcaagatcgtgaaccgggagaagctgtcggagtcggtgctgatgaaggtggagcgggagatcgccatcctgargctcatcgaacacccacatgtcctcaagctccacgrcgtctacgagaacaagaaatatttgtacctggttctggagcacgtctcggggggtgagctattcgactacctggtcctcccccacgaccttctgtacggatttcctctccggagaattcttgtttcgcgtaa

SEQ ID NO: 192 - DNA, 593 bp, Homo sapiens
  SITE (569): n equals a,t,g, or c
  SITE (586): n equals a,t,g, or c
  SITE (588): n equals a,t,g, or c
ctgcaggtaccggtccggaattcccgggtcgacccacgcgtccggaaggtgctccccctctctgtgacatgcatccaatgagagcactgtttctcattcccagaaaccctcctccccgggctgaagtcaaaaaaatggtcgaagaagttttttagttttatagaagggtgcctggtgaagaattacatgcagcggccctctacagagcagcttttgaaacatccttttataagggatcagccaaatgaaaggcaagttagaatccagcttaaggatcatatagatcgtaccaggaagaagagaggcgagaaagatgaaactgagtatgagtacagtgggagtgaggaagaagaggaggaagtgcctgaacaggaaggagagccaagttccattgtgaacgtgcctggtgagtctactcttcgccgagatttcctgagactgcagcaggagamcaaggaacgttccgaggctcttcggagacaacagttactacaggagcaacagctccgggagcaggaagaatataaaaggcaactgctggcagagagacagaacggattgagcagcanaaagaacagaggcgacngntagaa

SEQ ID NO: 193 - DNA, 994 bp, Homo sapiens
ctctaagaaatgagatggagaagtacgagcggatccgagtggtggggagaggtgccttcgggattgtgcacctgtgcctgcgaaaggctgaccagaagctggtgatcatcaagcagattccagtggaacagatgaccaaggaagagcggcaggcagcccagaatgagtgccaggtcctcaagctgctcaaccaccccaatgtcattgagtactacgagaacttcctggaagacaaagcccttatgatcgccatggaatatgcaccaggcggcactctggctgagttcatccaaaagcgctgtaattccctgctggaggaggagaccatcctgcacttcttcgtgcagatcctgcttgcactgcatcatgtgcacacccacctcatcctgcaccgagacctcaagacccagaacatcctgcttgacaaacaccgcatggtcgtcaagatcggtgatttcggcatctccaaratccttagcagcaagagcaaggcctacacggtgcctgggcatggaagggacctccagggcactagaagtcttgagggccaggacctaaccctgcctcctcccctccccctaaaaaacccttggccctttggcccctgtttgggtggttctgcaggaggaagccccttggcttgctttgagaagaagctgtccccaaatgggcttatgcacagagcccctggtcttccctccctgcagggctgtgatcccagcttctatcctgcaggtggtgggtaccccatgctatatctcccctgagctgtgtgagggcaagccctacaaccagaagagtgacatctgggccctgggctgtgtcctctacgagctggccagcctcaagagggctttcgaggctgcggtgagtgtatgcaccctccaggggacaactgagaaatctactgcctcgcccagcagcccttggctcaagccacctcaggtttctcctctagctgagtcatgtctctcccttatcagattaccccagg

SEQ ID NO: 194 - DNA, 343 bp, Homo sapiens
  SITE (319): n equals a,t,g, or c
  SITE (338): n equals a,t,g, or c
  SITE (340): n equals a,t,g, or c
gagcatccaggagggcaagtacgagttccccgacaaggactgggcccacatctcctgcgctgccaaagacctcatctccaagctgctggtccgtgacgccaagcagaggctgagtgccgcccaagtcctgcagcacccctgggttcaggggtgcgccccggagaacaccttgcccactcccatggtcctgcagaggaacagctgtgccaaagacctcacgtccttcgcggctgaggccattgccatgaaccggcagctggcccagcacgacgaggacctggctgagaaaaaaaaaaaaaaaaaaaaaaaaaaaaaaaanaaaaaaaaaaaaaaaaaananaaa

SEQ ID NO: 195 - DNA, 538 bp, Homo sapiens
  SITE (488): n equals a,t,g, or c
  SITE (513): n equals a,t,g, or c
  SITE (522): n equals a,t,g, or c
agacccggctggtataacaagaggattgcctgatccagccaagatgcagagcacttctaatcatctgtggcttttatctgatattttaggccaaggagctactgcaaatgtctttcgtggaagacataagaaaactggtgatttatttgctatcaaagtatttaataacataagcttccttcgtccagtggatgttcaaatgagagaatttgaagtgttgaaaaaactcaatcacaaaaatattgtcaaattatttgctattgaagaggagacaacaacaagacataaagtacttattatggaattttgtccatgtgggagtttatacactgttttagaagaaccttctaatgcctatggactaccagaatctgaattcttaattgttttgcgagatgtggtgggtggaatgaatcatctacgagagaatggtaatagtgcaccgtgatatcaagccaggaaatatcatgcgtgttataggggaaganggacatctgtgtacaaactcacagntttggtgcngctagagaatagaaga

SEQ ID NO: 196 - DNA, 734 bp, Homo sapiens
ggttggtccagaagaaagatacaggccatatctatgcaatgaagatattgagaaagtctgatatgcttgaaaaagagcaggtggcccatatccgagcagaaagagatattttggtaraagcagatggtgcctgggtggtgaagatgttttacagttttcaggataagaggaatctttatctaatcatggaatttctccctggaggtgacatgatgacattgctaatgaagaaagacwccttgacagaagaggaaacacagttctacatttcagagactgttctggcaatagatgcgatccaccagttgggtttcatccatcgggatattaagccagacaaccttttattggatgccaagggtcatgtaaaattatctgattttggtttatgtacgggattaaagaaagctcacaggactgaattttatagaaatctcacacacaacccaccaagtgacttctcatttcagaacatgaactcaaagaggaaagcagaaacttggaagaagaacaggagacaactggcatattccacagttgggacaccagattacattgctccagaagtattcatgcagactggttacaacaaattgtgtgactggtggtctttgggagtgattatgtatgaaatgctaataggatatccacctttctgctctgaaacacctcaagagacatacagaaaagtgatgaactggaaagaaactctggtatttcctccagaggtacct

SEQ ID NO: 197 - DNA, 1232 bp, Homo sapiens
  SITE (1186): n equals a,t,g, or c
  SITE (1204): n equals a,t,g, or c
  SITE (1206): n equals a,t,g, or c
  SITE (1227): n equals a,t,g, or c
gcggacgcgtgggtggagagtggagggacctggtgaatcatccaagattaaatacgggcaggcactgccaggcttgtgtggagatgaggctgggacactgttcgcaggaagagtccggtgttctggccccctgatgtcaccttcacgggcctgactcacagtcctaaatatctgacagcgagatcgcttttcgtgccctcgtgaggctggcatgcaggatggcaggacagcccggccacatgccccatggagggagttccaacaacctctgccacaccctggggcctgtgcatcctcctgacccacagaggcatcccaacacgctgtcttttcgctgctcgctggcggacttccagatcgaaaagaagataggccgaggacagttcagcgaggtgtacaaggccacctgcctgctggacaggaagacagtggctctgaagaaggtgcagatctttgagatgatggacgccaaggcgaggcaggactgtgtcaaggagatcggcctcttgaagcaactgaaccacccaaatatcatcaagtatttggactcgtttatcgaagacaacgagctgaamattgkgctggagttggctgacgcargggacctctcgcagatgatcaagtactttaagaagcagaagcggsttmatcccggaraggacagtatggaagtactttgtgcagctgtgcagcgccgtggagcacatgcattcacgccgggtgatgcaccgagacatcaagcctgccaacgtgttcatcacagccacgggcttcgtgaagctcggtgaccttggtctgggccgcttcttcagctctgagaccaccgcagcccactccctagtkgggacgccctactacatgtcaccggagaggatccatsagaacggctacaacttcaagtccgacatctggtccttgggctgtctgctgtacgagatggcagccctccagagccccttctatggagataagatgaatctcttctccctgtgccagaagatcgagcagtgtgactaccccccactccccggggagcactactccgagaagttacgagaactggtcagcatgtgcatctgccctgacccccaccagagacctgacatcggatacgtgcaccaggtggccaagcagatgcacatctggatgtccagcactgagcgtggatgaccgtgcttatcaaagncacacattttgcttattngntcgttttttttgggtggcacnggtag

SEQ ID NO: 198 - DNA, 1294 bp, Homo sapiens
  SITE (1078): n equals a,t,g, or c
  SITE (1270): n equals a,t,g, or c
  SITE (1283): n equals a,t,g, or c
ggcggcactcattcactgcacttggtccgagacagaaaacgtttgagttgttccacacacaccccctctaaatgtcgagaagccccaggttgcatgatggaatttgaacattacttcaagaggttttgtattttggattagttaattgggtttgtcctctgctgactgtttcttcggatgcattttttggtgtgctcttgagggattaaatgcaaagagatcacaccatggactacaaggaaagctgcccaagtgtaagcattcccagctccgatgaacacagagagaaaaagaagaggtttactgtttataaagttctggtttcagtgggaagaagtgaatggtttgtcttcaggagatatgcagagtttgataaactttataacactttaaaaaaacagtttcctgctatggccctgaagattcctgccaagagaatatttggtgataattttgatccagattttattaaacaaagacgagcaggactaaacgaattcattcagaacctagttaggtatccagaactttataaccatccagatgtcagagcattccttcaaatggacagtccaaaacaccagtcagatccatctgaagatgaggatgaaagaagttctcagaagctacactctacctcacagaacatcaacctgggaccgtctggaaatcctcatgccaaaccaactgactttgatttcttaaaagttattggaaaaggcagctttggcaaggttcttcttgcaaaacggaaactggatggaaaattttatgctgtcaaagtgttacagaaaaaaatagttctcaacagaaaagagcaaaaacatattatggctgaacgtaatgtgctcttgaaaaatgtgaaacatccgttttkggttggattgcattattccttccaaacaactgaaaagctttattttgttctggattttgttaatggaggggagctttttttccacttacaaaggaaagagaatagctctctgttgcagagaggggtcctggagaaatgggttaccccagttggtcttatttaaatggttacccatcaagattttaattttatcttctcttnggagagcttggtaataagaagcacttaaatcactccaaagaagactttaaaaagggagcagtgaaaaggtcttaataatttattgattgaattaagaaatactagctaattaagaatctgagtctaaacagcacagattttttctttctgcttttaaattgtgttttaaaaaaaaaaaaaaaaaaaaaaaanaaaaaaggaggtngagccagggag

SEQ ID NO: 199 - DNA, 2277 bp, Homo sapiens
gcccacgcgtccgcccacgcgtccgcccacgcgtccgagatctttgagatgatggacgccaaggcgaggcaggactgtgtcaaggagatcggcctcttgaagcaactgaaccacccaaatatcatcaagtatttggactcgtttatcgaagacaacgagctgaacattgtgctggagttggctgacgcaggggacctctcgcagatgatcaagtactttaagaagcagaagcggctcatcccggagaggacagtatggaagtactttgtgcagctgtgcagcgccgtggagcacatgcattcacgccgggtgatgcaccgagacatcaagcctgccaacgtgttcatcacagccacgggcgtcgtgaagctcggtgaccttggtctgggccgcttcttcagctctgagaccaccgcagcccactccctagtggggacgccctactacatgtcaccggagaggatccatgagaacggctacaacttcaagtccgacatctggtccttgggctgtctgctgtacgagatggcagccctccagagccccttctatggagataagatgaatctcttctccctgtgccagaagatcgagcagtgtgactaccccccactccccggggagcactactccgagaagttacgagaactggtcagcatgtgcatctgccctgacccccaccagagacctgacatcggatacgtgcaccaggtggccaagcagatgcacatctggatgtccagcacctgagcgtggatgcaccgtgccttatcaaagccagcaccactttgccttacttgagtcgtcttctcttcgagtggccacctggtagcctagaacagctaagaccacagggttcagcaggttccccaaaaggctgcccagccttacagcagatgctgaaggcagagcagctgagggaggggcgctggccacatgtcactgatggtcagattccaaagtcctttctttatactgttgtggacaatctcagctgggtcaataagggcaggtggttcagcgagccacggcagccccctgtatctggattgtaatgtgaatctttagggtaattcctccagtgacctgtcaaggcttatgctaacaggagacttgcaggagaccgtgtgatttgtgtagtgagcctttgaaaatggttagtaccgggttcagtttagttcttagtatcttttcaatcaagctgtgtgcttaatttactctgttgtaaagggataaagtggaaatcatttttttccgtggagtggtgattctgctaacatttttatctacgttttataacttggtgagtgacgatgagagccctgcacctggccagagtgtcacaggcaaaaggcatcgggaagcaggagcatcttcttggcagccaggctgggccatcttctcctggacacctgctgtgtaccaggaacttcgtcacctccttgaatgctggcggttcatttcatgatcagtgttaagcattttcctccatgggaaggaagcatgggatatagaaaagcgaagggctgtcctttacaaattctggttctgcaacttcctagcgtgactttgggcttgggcaagtttcttagccgttctgagccttcatttcctcatctgtacaatgagattaatagtacctatcatctaccttcaggattgctgacagacagaatttgaaataaaatatgcaagttagctaatacaaaaagtagatgatccaaaaatggtagccactcacccttcacaaactgaagtccatggaccacggaagtcgagaattaatgtacacctgtatcatgtgtaggaaaccagaaatgtgttccttatttcttgttcccaaacaggattaactgtgaagactaatttataaatgtgaacctaagaaaactccacctctgaaggaaatcatttgaattttgtttttgtacgtaaagttaaccttccaattgtctgagctgtcgtcactgacttcatgacagtctggccctccagacaagagcagcgctggcatcgggcaggtgattcctgacacctgctgcctgcaggcattcactgaccaggcctttcctggaggaaacacccagggccgggcggctgctgtttccacacgtggactcggatctgctgtgacaccgtcagcccgacagtctctccatatgcagcctttcctctgtacttttctccatggttgaaataaaacagggtgactgggagttacttagaattcatgaagattttaaaaaaaaaaaaaaaaaaaaaaaaaaaaaaaaaaaa

SEQ ID NO: 200 - DNA, 509 bp, Homo sapiens
  SITE (487): n equals a,t,g, or c
gaaaacctgagaatattttagtatcccagtcaggaattactaagctctgtgattttggttttgcacgaacactagcagctcctggggacatttatacggactatgtggccacacgctggtatagagctcccgaattagtattaaaagatacttcttatggaaagtatgtgtattttgggatcctgtcagcctttcctagacctgtggatatctgggctttgggctgtatgatcattgagatggccactggaaatccctatcttcctagtagttctgatttggatttactccataaaattgttttgaaagtgggcaatttgtcacctcacttgcagaatatcttttccaagagccccatttttgctggggtagttcttcctcaagttcaacaccccaaaaatgcaagaaaaaaatatccaaagcttaatggattgttggcagatatagtycatgcttgttacaattgatcctgctgacaggatatcanctatgaacttttgcatcatgat

SEQ ID NO: 201 - DNA, 1181 bp, Homo sapiens
  SITE (465): n equals a,t,g, or c
gtgtctctggcccccagccccagagctcttggagcagaaaccctacgggaaggccgtagatgtgtgggccctgggcgtcatctcctacatcctgctgtgtgggtacccccccttctacgacgagagcgaccctgagctcttcagccagatcctgagggccagctatgagtttgactctcctttctgggatgacatctcagaatcagccaaagacttcatccggcaccttctggagcgagacccccagaagaggttcacctgccaacaggccttgcggcacctttggatctctggggacacagccttcgacagggacatcttaggctctgtcagtgagcagatccggaagaactttgctcggacacactggaagcgagccttcaatgccacctcgttcctgcgccacatccggaagctggggcagatcccagaggcgarggggcctctgagcagggcatggccgcncacagccaytcaggcctccgtgctggccagccccccaaktggtgatgcccagttgagaatgggacccagagtagatgctgacctgggcactccaccattccggggccaccacagagatgccagcaggatgccactttgccagcccgacacacggacctttgtaaagaacagcaacaggcaggagaggcagcgtgtgaccagattgtgtcccgtcattgggtggcatatgttaactagctgccaaacaacttcaacccgtgtaattcatgtacatttgcaacagccagcccggtacagcctgtgtgacttctctgtatgtgtgtgtgtgtcgtgaccagcctaagtagttagcataactcaagatgctgatgtgcagtcacccatcagagaaaataaaaatggaaaccacgttcacagcattttaaaagtttttactttttttcttgattatggaagtaatccatgtacatagtaaatcattttaaaagtacaaaaagtatgaagaagtttgtcttaaaaaaaaaaaaattattcctccaactagagaccactctgatgtttcgacgttttaaaaaagtctttttttgtgcattttttcatcgttgacatcatattgtgrtatcatttataaccagttttttcctacttattataccaccatcttccacatcattaaaagctctttgtaaacattaaacactcttcataaatcaaaa

SEQ ID NO: 202 - DNA, 567 bp, Homo sapiens
  SITE (528): n equals a,t,g, or c
  SITE (556): n equals a,t,g, or c
gattggacagttttcactgttggcagctggctttgggttatttctccatttatggcctatggttcagcaagtcaactcttgaggacctattttcctgaaggaatgagtgaactttaataagaaacattctctttggagccgtgagagggttgaactatctgcaccaaaatggctgtattcacaggagtattaaagccagccatatcctcatttctggtgatggcctagtgaccctctctggcctgtcccatctgcatagtttggttaagcatggacagaggcatagggctgtgtatgatttcccacagttcagcacatcagtgcagccgtggctgagtccagaactactgagacaggatttacatgggtataatgtgaagtcagatatttacagtgttgggattacagcatgtggaattaagccagtgggcaggtgccttttccaggacatgcattagaactcagcttggkacagctctgttgcaacaagatcctgagaaaaggcccttcagcaagcagtttattgtncccatgttttcttcaaacagttgaaagnagaaagccagg

SEQ ID NO: 203 - DNA, 990 bp, Homo sapiens
  SITE (713): n equals a,t,g, or c
ggtgagagtgaataaatatcaaaaatctgttgggtggagatacagtgatgaggaagaggatctcaggactgaactcaaccttctgaggaagtactctttccacaaaaacattgtgtccttctatggagcatttttcaagctgagtccccctggtcagcggcaccaactttggatggtgatggagttatgtgcagcaggttcggtcactgatgtagtgagaatgaccagtaatcagagtttaaaagaagattggattgcttatatctgccgagaaatccttcagccaaaagtcatatttctgggaacgggttgtagtgattccagcctaaagaaagaattgtgtctgaaacatcaaaattaagctgtttctcttatcaaaagtttttccaaaaatactaagaactgtaccagaaagaaagaaagaaagaaagaaagaaagaaatatatactgatgtggctttttaaaaaatatatacagggcttagctcaccttcacgcacaccgagtaattcaccgggacatcaaaggtcagaatgtgctkctgactcataatgctgaagtaaaactggttgattttggagtgagtgcccaggtgagcagaactaatggaagaaggaatagtttcattgggacaccatactggatggcacctgaggtgattgactgtgatgaggacccaagacgctcctatgattacagaagtgatgtgtggnctgtgggaattactgccattgaaatggctgaaggagcccctcctcttgtaaccttcaacccttggaagctctcttcgttattttgcgggaatctgctcccacagtcaaatccagcggatggtcccgtaagttccacaatttcatggaaaagtgtacgataaaaaatttcctgtttcgtcctacttctgcaaacatgcttcaacacccatttgttcgggatataaaaawtgaacgacatgttgttgagtcattaacaaggcatcttactggaatcatt

SEQ ID NO: 204 - DNA, 463 bp, Homo sapiens
  SITE (421): n equals a,t,g, or c
ggcagagctcatagcttgttggttacctccatggggcacataaagctgacagattttggattatctaaggtgggactaatgagcatgactaccaacctttacgagggtcatattgagaaggatgctagagagttcctggataaacaggtctgtggcacacctgaatacattgcaccagaagtgattctgaggcagggttayggaaagccggtggactggtgggccrtggggattatcctctatgaatttctggttggatgcgtgccattctttggggatactccagagggctatttggacaagtcatcartgatgagatcaactggcctgagaaggatgaggcaccccacctgatgccaggatctgattaccttactcctcaggcagaatccctggagagctgggacaggtggtgcatatnaagyaaacagcatcgattttccgtctttagctggacagtttc

SEQ ID NO: 205 - DNA, 418 bp, Homo sapiens
  SITE (209): n equals a,t,g, or c
  SITE (390): n equals a,t,g, or c
  SITE (417): n equals a,t,g, or c
gggagcaccccttcctggtcaatctgtggtactmcttccaggatgaggaggacatgttcatggtggtggacctgctcctgggaggcgacctgcgctaccatctgcagcagaatgtgcatttcacagaggggactgtgaaactctacatctgtgagctggcactggccctggagtatcttcagaggtaccacatcatccacagagacatnaagccagacaatatcctgctggatgaacacggacatgttcacattacagacttcaacatagcgacggtagtgaaaggagcagaaagggcttcctccatggctggcaccaagccctacatggctccagaagtattccaggtgtacatggacagaggccccggatactcgtaccctgtcgacnggaggtccctgggcatcacagcctatna

SEQ ID NO: 206 - DNA, 1118 bp, Homo sapiens
  SITE (1117): n equals a,t,g, or c
ttgccaagaaaagacctcaccaaaaggtgtcgagaaccctgctgtacaagagagtaaccaaaaaatgttaggtcctcctttggrgtggctgaaaacgttagcctctaaaagaaatgctgttgcttttcgaagttttaacagtcatattaatgcatccaataactcagaaccatccagaatgaacatgacttctttagatgcaatggatatttcgtgtgcctacagtggttcatatcccatggctataacccctactcaaaaaagaagatcctgtatgccacatcagaccccaaatcagatcaagtcgggaactccataccgaactccgaagagtgtgagaagaggggtggcccccgttgatgatgggcgaattctaggaaccccagactaccttgcacctgagctgttactaggcagggcccatggtcctgcggtagactggtgggcacttggagtttgcttgtttgaatttctaacaggaattccccctttcaatgatgaaacaccacaacaagtattccagaatattctgaaaagagatatcccttggccagaaggtgaagaaaagttatctgataatgctcaaagtgcagtagaaatacttttaaccattgatgatacaaagagagctggratgaaagagctaaaacgtcatcctctcttcagtgatgtggactgggaaawtctgcagcatcagactatgcctttcatcccgcgcagccagatgatgaaacagatacctcctattttgaagccaggaatactgctcagcacctgaccgtatctggatttagtctgtagcacaaaaattktccttttagtctagcctcgtgttatagaatgaacttgcataattatatactccttaatactagattgatctaagggggaaagatcattatttaacctagttcaatgtgcttttaatgtacgttacagctttcacagagttaaaaggctgaaaggaatatagtcagtaatttatcttaacctcaaaactgtatataaatcttcaaagcttttttcatctatttattttgtttattgcactttatgaaaactgaagcatcaataaaattagaggacactattgaaaaaaaaaaaaaagggggggccnc

SEQ ID NO: 207 - DNA, 300 bp, Homo sapiens
  SITE (282): n equals a,t,g, or c
  SITE (294): n equals a,t,g, or c
  SITE (298): n equals a,t,g, or c
gccgacgcgcccaaggaccctgtgcctgccctgcccacacacccccctgcccaggagcaggactgcgtggtggtcatcacccgagaggtgccacatcagaccgcctccgacttcgtgcgggactcggcggccagccaccaggcggagcccgaggcgtacgagcggcgcgtgtgcttcctgcttctgcaactctgcaacgggctggagcacctgaaggagcacgggatcatccaccgggacctgtgcctggagaacctgctgctggtgcactgcaccctccangtcggcccggcncggnta

SEQ ID NO: 208 - DNA, 822 bp, Homo sapiens
  SITE (39): n equals a,t,g, or c
  SITE (56): n equals a,t,g, or c
  SITE (597): n equals a,t,g, or c
  SITE (762): n equals a,t,g, or c
  SITE (777): n equals a,t,g, or c
  SITE (800): n equals a,t,g, or c
  SITE (810): n equals a,t,g, or c
  SITE (817): n equals a,t,g, or c
tttaaaacatcccaacagtatataatacaaaggctgttntttacgtgaacacacancatggcttgtaatggaatattgtttaggatctgcttcggatttactagaagttcacaaaaagccattacaagaagtggaaatagcagcaattacacatggtgctcttcagggattagcctacttacattctcatactatgattcatagagatatcaaagcaggaaatatccttctgacagaaccaggccaggtgaaacttgctgactttggctctgcttccatggcatcacctgccaattcctttgtgggaacgccgtattggatggccccagaagtaattttagccatggatgaaggacaatatgatggcaaagtagatgtgtggtctcttggaataacatgtattgaactagcggaaaggaagcctcctttatttaatatgaatgcaatgagtgccttatatcacatagcccaaaatgaatcccctacactacagtctaatgaatggtctgattattttcgcaactttgtagattcttgcctccagaaaatccctcaagatcgacctacatcagaggaacttttaaagcacatatttgntcttcgggagcgccctgaaaccgtgttaatagatctcattcagaggacaaaggatgcagtaagagagctggacaatctgcagtatcgaaagatgaagaaactccttttcaggaggcacataaatggaccagcagtagaagcacaggaaggaagaagaggaaccangatcatgggtgttgnccggacaggaacaggtaatagtngttggaaggnaatcaantccat

SEQ ID NO: 209 - DNA, 910 bp, Homo sapiens
  SITE (877): n equals a,t,g, or c
  SITE (882): n equals a,t,g, or c
  SITE (887): n equals a,t,g, or c
  SITE (890): n equals a,t,g, or c
  SITE (902): n equals a,t,g, or c
gcggacgcgtgggcggttgcgctgcggagcgcagctgtgagggagtcgctgtgatccggggccccggaacccgagctggagctgaagcgcaggctgcggggcgcggagtcgggagtgcaggcctgagtgttccttccagcatgtcggagggggagtcccagacagtacttagcagtggctcagacccaaaggtagaatcctcatcttcagctcctggcctgacatcagtgtcacctcctgtgacctccacaacctcagctgcttccccagaggaagaagaagaaagtgaagatgagtctgagattttggaagagtcgccctgtgggcgctggcagaagaggcgagaagaggtgaatcaacggaatgtaccaggtattgacagtgcatacctggccatggatacagaggaaggtgtagaggttgtgtggaatgaggtacagttctctgaacgcaagaactacaagctgcaggaggaaaaggttcgtgctgtgtttgataatctgattcaattggagcatcttaacattgttaagtttcacaaatattgggctgacattaaagagaacaaggccagggtcatttttatcacagaatacatgtcatctgggagtctgaagcaatttctgaagaagaccaaaaagaaccacaagacgatgaatgaaaaggcatggaagcgttggtgcacacaaatcctctctgccctaagctacctgcactcctgtgacccccccatcatccatgggaacctgacctgtgacaccatcttcatccagcacaacggactcatcaagattggctctgtggctctgattgtgggtgtctccccctactcccagtggcttcttgacactatcaacaatcatgtgaagacttgtcnagaanagcanaanaatctacacttntttgccca

SEQ ID NO: 210 - DNA, 511 bp, Homo sapiens
  SITE (489): n equals a,t,g, or c
  SITE (507): n equals a,t,g, or c
tgcaggtaccggtccggaattcccgggtcgacccacgcgtccgctttgcctgactcagggcagctcagagtgtggggcagaaggtgaccagccagctcagggcaggagatgcagagcacagccaattacctgtggcacacagatgacctgctggggcagggggccactgccagtgtgtacaaggcccgcaacaagaaatccggagagctggttgctgtgaaggtcttcaacactaccagctacctgcggccccgcgaggtgcaggtgagggagtttgaggtcctgcggaagctgaaccaccagaacatygtcaagctctttgcggtggaggagacgggcggaagccggcagaaggtactggtgatggagtactgctccagtgggagcctgctgagtgtgctggagagccctgagaatgcctttgggctgcctgaggatgagttcctggtggtgctgcgctgtgtggtggccgcatgarccmctccctgnccctgcctccaccctcanacca

SEQ ID NO: 211 - DNA, 913 bp, Homo sapiens
gcctcccagcaaccggtctggcggcggcgcggcagtaaaactgaggaggcggacaatgacggtcggggctgcttgctaactccaggaacaggtttaagtttttgaaactgaagtaggyctacacagtaggaactcatgtcatttcttgtaagtaaaccagagcgaatcaggcggtgggtctcggaaaagttcattgttgagggcttaagagatttggaactatttggagagcagcctccgggtgacactcggagaaaaaccaatgatgcgagctcagagtcaatagcatccttctctaaacaggaggtcatgagtagctttctgccagagggagggtgttacgagctgctcactgtgataggcaaaggatttgaggacctgatgactgtgaatctagcaaggtacaaaccaacaggagagtacgtgactgtacggaggattaacctagaagcttgttccaatgagatggtaacattcttgcagggcgagctgcatgtctccaaactcttcaaccatcccaatatcgtgccatatcgagccacttttattgcagacaatgagctgtgggttgtcacatcattcakggcatacggttctgcaaaagatctcatctgtacacacttcatggatggcatgaatgagctggcgattgcttacatcctgcagggggtgctgaaggccctcgactacatccaccacatgggatatgtacacaggagtgtcaaagccagccacatcctgatctctgtggatgggaaggtctacctgtctggtttgcgcaaacctgcagctgccctggtgctttctccaagggccatcagtgtcttgcctagcttgagggcttaagtccttatgctgtgttagtttcgttgtcagaacaaattaaaattttcagagacgctgaaaaaaaaaa

SEQ ID NO: 212 - DNA, 610 bp, Homo sapiens
  SITE (452): n equals a,t,g, or c
  SITE (483): n equals a,t,g, or c
  SITE (520): n equals a,t,g, or c
  SITE (562): n equals a,t,g, or c
gtgtgaagctattgatatgtggtcactgggctgtgtgatagctgagctgttcctgggatggcctctttatcctggtgcttcagaatatgatcagattcgttatatttcacaaacacaaggcttgccagctgaatatcttctcagtgccggaacaaaaacaaccaggtttttcaacagagatcctaatttggggtacccactgtggaggcttaagacacctgaagaacatgaactggagactggaataaaatcaaaagaagctcggaagtacatttttaattgcttagatgacatggctcaggtgaatatgtctacagacctggagggaacagacatgttggcagagaaggcagaccgaagagaatacattgatctgttaaagaaaatgctcacaattgatgcagataagagaattacccctctaaaaactcttaaccatcagtttgtgacantgactcaccttttggattttccacatagcantcatgttaagtcttggtttcagaacatggagatctgnaagcggagggttcacatgtatgatcagtgagtagatcagagnccttactccatgtgcccaatcagccaattacctgacttagatagtatc

SEQ ID NO: 213 - DNA, 2484 bp, Homo sapiens
  SITE (72): n equals a,t,g, or c
  SITE (992): n equals a,t,g, or c
  SITE (2474): n equals a,t,g, or c
  SITE (2476): n equals a,t,g, or c
tggacattataaaggagcttcctgaaactgtgatagatcttttgaataagtgccttaccttccatccttctnagaggccaaccccagatgaattaatgaaggacaaagtattcagtgaggtatcacctttatataccccctttaccaaacctgccagtctgttttcatcttctctgagatgtgctgatttaactctgcctgaggatatcagtcagttgtgtaaagatataaataatgattacctggcagaaagatctattgaagaagtgtattacctttggtgtttggctggaggtgacttggagaaagagcttgtcaacaaggaaatcattcgatccaaaccacctatctgcacactccccaattttytctttgaggatggtgaaagctttggacaaggtcgagatagaagctcgcttttagatgataccactgtgacattgtcgttatgccagctaagaaatagattgaaagatgttggtggagaagcattttacccattacttgaagatgaccagtctaatttacctcattcaaacagcaataatgagttgtctgcagctgccacgctccctttaatcatcagagagaaggatacagagtaccaactaaatagaattattctcttcgacaggctgctaaaggcttatccatataaaaaaaaccaaatctggaaagaagcaagagttgacattcctcctcttatgagaggtttaacctgggctgctcttctgggagttgagggagctattcatgccaagtacgatgcaattgataaagacactccaattcctacagatagmcaaattgaagtggatattcctcgctgtcatcagtacgatgaactgttatcatcaccagaaggtcatgcaaaatttaggcgtgtattaaaagcctgggtagtgtctcatcctgatcttgtgtattggcaaggtcttgactcactttgtgctccattcctatatctaaacttcaataatgaagccttggyntatgcatgtatgtctgcttttattcccaaatacctgtataacttcttcttaaaagacaactcacatgtaatacaagagtatctgactgtcttctctcagatgattgcatttcatgatccagagctgagtaatcatctcaatgagattggtttcattccagatctctatgccatcccttggtttcttaccatgtttactcatgtatttccactacacaaaattttccacctctgggataccttactacttgggaattcctctttcccattctgtattggagtaggcaattcttcagcagctgcgggaccggcttttggctaatggctttaakgagtgtattcttctcttctccgatttaccagaaattgacattgaacgctgtgtgagagaatctatcaacctgttttgttggactcctaaaagtgctacttacagacagcatgctcaacctccaaagccatcttctgacagcagtggaggcagaagttcggcaccttatttctctgctgagtgtccagatcctccaaagacagatctgtcaagagaatccatcccattaaatgacctgaagtcagaagtatcaccacggatttcagcagaggacctgattgacttgtgtgagctcacagtgacaggccacttcaaaacacccagcaagaaaacaaagtccagtaaaccaaagctcctggtggttgacatccggaatagtgaagactttattcgtggtcacatttcaggaagcatcaacattccattcagtgctgccttcactgcagaaggggagcttacccagggcccttacactgctatgctccagaacttcaaagggaaggtcattgtcatcgtggggcatgtggcaaaacacacagctgagtttgcagctcaccttgtgaagatgaaatatccaagaatctgtattctagatggtggcattaataaaataaagccaacaggcctcctcaccatcccatctcctcaaatatgaagaaccaagagtgtgactgccaaaacttagtgtggcatcagcaccaacagcacagttcttcatatccacgccactctcagacaaaactagatgtccagattgttgcatttccgtaaagtttgtcacgagacattttttaaaatctcataacccacatgttcagttatccatgcaagaaacttgactctacatgtattgctgaaagaattttcttaacagtgaaatctgatcatatatttttaccacactgccacataaagcccaagaaattcagctgacaagacagatttagcattatcaagaaatcccatttgccctgaaaaagctgtcctccattgtactgaacagacagtcctgtcgattgtgttatttagaaacatacactgaatgtgggctgaaatcatcatctttccataatgaaaactgagaaactattcacaatgcattccttataaataaatgctacatttagtaactcaaaaaaaaaaaaaaggggngnccgtttta

SEQ ID NO: 214 - DNA, 676 bp, Homo sapiens
  SITE (628): n equals a,t,g, or c
tttaagttcttcatggagcagcacgtggagaatgtcatcaaaacctaccagcagaaggttaaccggaggctgcagctggagcaagaaatggccaaagctggactctgtgaagctgagcaggagcagatgcggaagatcctctaccagaaagagtctaattacaacaggttaaagagggccaagatggacaagtctatgtttgtcaagatcaaaaccctggggatcggtgcctttggagaagtgtgccttgcttgtaaggtggacactcacgccctgtacgccatgaagaccctaaggaaaaaggatgtcctgaaccggaatcaggtggcccacgtcaaggccgagagggacatcctggccgaggcagacaatgagtgggtggcaaactctactactccttccaagacaaagacagcctgtactttgtgatggactacatccctggtggggacatgatgagcctgctgatccggatggaggtcttccctgagcacctggcccggktctacatcgcaractgactttggccattgagagtgtccacaagatgggcttcatccaccgagacatcaagcctgataacattttgatagatctggatggtcacattaaactcacagatttcggnctctgcactgggttcaagtggactcacaatttccaatattaccagaaa

SEQ ID NO: 215 - DNA, 665 bp, Homo sapiens
  SITE (648): n equals a,t,g, or c
ggggaggcctggcagggtgtatccgaggaagccaaggagctggtccgagggctcctgaccgtggaccccgccaagcggctgaagctcgagggactgcggggcagctcgtggctgcaggacggcagcgcgcgctcctcgcccccgctccggacgcccgacgtgctcgagtcctctgggcccgcagtgcgctcgggtctcaacgccaccttcatggcattcaaccggggcaagcgggagggcttcttcctgaagagcgtggagaatgcacccctggccaagcggcggaagcagaagctgcggaggccaccgcctcccgccggggctcccctgcaccagccaacccgggccgagcccccgtcgcctccaaaggggccccccgccgagccaacggccccctgcccccctcctaatccccaccactgtgacccccttccctcataggggctgtgacctgggagcccggctcactcccggaggcctctgcctgcggctgacctgatccccaagggactgtcctttcctctcctaccccaccccactcccagacagagcagaagtatttttataagcagagaattttttatgtcttaccagatagagttgcagggaagggggggcctgctggggagtggggtttgggggkccctnttccmaggacactgcct

SEQ ID NO: 216 - DNA, 1807 bp, Homo sapiens
  SITE (3): n equals a,t,g, or c
ganggcatagaggaactgagtgatccctctgggcccaaatcctatagtataacagagaaacactatgcacaggaggatcccaggatgttatttgtagcagctgttgatcatagtagttcaggagatatgtctttgttacccagctcagatcctaagtttcaaggacttggagtggttgagtcagcagtaactgcaaacaacacagaagaaagcttattccgtatttgtagtccactctcaggtgctaatgaatatattgcaagcacagacactttaaaaacagaagaagtattgctgtttacagatcagactgatgatttggctwaagaggaaccaacttctttattccagagagactctgagactaagggtgaaagtggtttagtgctagaaggagacaaggaaatacatcagatttttgaggaccttgataaaaaattagcactagcctccaggttttacatcccagagggctgcattcaaagatgggcagctgaaatggtggtagcccttgatgctttacatagagagggaattgtgtgccgcgatttgaacccaaacaacatcttattgaatgatagaggacacattcagctaacgtattttagcaggtggagtgaggttgaagattcctgtgacagcgatgccatagagagaatgtactgtgccccagaggttggagcaatcactgaagaaactgaagcctgtgattggtggagtttgggtgctgtcctctttgaacttctcactggcaagactctggttgaatgccatccagcaggaataaatactcacactactttgaacatgccagaatgtgtctctgaagaggctcgctcactcattcaacagctcttgcagttcaatcctctggaacgacttggtgctggagttgctggtgttgaagatatcaaatctcatccattttttacccctgtggattgggcagaactgatgagatgaacgtaatgcagggttatcttcacacattctgatcttctctgtgacaggcatctccagcactgaggcacctctgactcacagttacttatggagcaccaaagcatttggataaagaccgttataggaaatgggggggaaatggctaaaagagaacaattcgtttacaattacaagatattagctaattgtgccagrggctgttatatacatatatacacaaccaaggtgtgatctgaatttaatccacatttggtgttgcagatgagttgtaaagccaactgaaagagttccttcaagaagttcctctgataggaagctagaagtgtagaatgaagttttacttgacagaaggacctttacatggcagctaacagtgctttttgctgaccaggattggtttatatgattaaattaatatttgcttaataatacactaaaagtatatgaacaatgtcatcaatgaaacttaaaagcgagaaaaaagaatatacacataatttctgacggaaaacctgtaccctgatgctgtataatgtatgttgaatgtggtcccagattatttctgtaagaagacactccatgttgtcagctttgtactctttgttgatactgcttatttagagaagggttcatataaacactcactctgtgtcttcaacagcatctttctttccccatctttctattttctgcaccctctgcttgttccctcatattctgttcttccgactcctgctaacacacatgcaacaaaaaagggaagggagtgcttatttccctttgtgtaaggactaagaaatcatgatatcaaataaacatggtgaaacattaaaaaaaaaaaaaa

SEQ ID NO: 217 - DNA, 587 bp, Homo sapiens
acccacgcgtccgatggctgctcgcggaggggcagtgtmcgcggggccgctgtaggctgtccagcgatggatcccaccgcgggaagcaagaaggagcctggaggaggcgcggcgactgaggagggcgtgaataggatcgcagtgccaaaaccgccctccattgaggaattcagcatagtgaagcccattagccggggcgccttcgggcaaagtgtatctggggcagaaaggcggcaaattgtatgcagtaaaggttgttaaaaaagcagacatgatcaacaaaaatatgactcatcaggtccaagctgagagagatgcactggcactaagcaaaagcccattcattgtscatttgtattattcactgcagtctgcaaacaatgtctacttggtaatggaatatcttattgggggagatgtcaagtctctcctacatatatatggttattttgatgaagagatggctgtgaaatatatttctgaagtagcactggctctagactaccttcacagacatggaatcatccacagggacttgaaaccggacaatatgcttatttctaatgagggtcatattaaactgacgg

SEQ ID NO: 218 - DNA, 688 bp, Homo sapiens
  SITE (306): n equals a,t,g, or c
acccacgcgtccggaagaactctgggaactacgggggcaccactatctgcaccaggaatccctaaagccagccccagtactggtagagaagcctctgccagagtggccagtgcctcagttcatcaacctctttctaccagagtttcccattaggcccattagggggcagcagcagctgaagattttaggcctcgtggctaaaggctcctttggaactgtcctcaaggtgctagattgcacccagaaagctgtatttgcagtgaaggtggtgcccaaggtaaaggtcctacagagggataccgtgangcagtgcaaagaggaggttagcatccarcgacagatcaaccatccctttgtacacagcttgggggacarctkgcagggaaaacggcaccttttcattatgtgtagctactgcagcacagatctgtactccctttggtcggctgttggctgctttcctgaggcttccatccgtctctttgctgccgagttggtgctggtactgtgttatctccatgacttgggcatcatgcatcgagatgtgaagatggagaatattcttctagatgaacgagatacagaaattagctgggtcatgagggcacacactgtgggtcccagctacttcggggaggctgagggggggaagaatttgctttggacccgggagattgggaaggttgca

SEQ ID NO: 219 - DNA, 658 bp, Homo sapiens
  SITE (626): n equals a,t,g, or c
cctggctaggcctgatactgaccagcagatgggcgctgtgtttgtagccccagaggtggtaggccggcagcggtatggacgccctgtggactgctgggccattggagtcatcatgtacatcctgctttcaggcaatccacctttctatgaggaggtggaagaagatgattatgagaaccatgataagaatctcttccgcaagatcctggctggtgactatragtttgactctccatattgggatgatatttcgcaggcagccaaagacctggtcacaaggctgatggaggtggagcaagaccagcggatcactgcagaagaggccatctcccatgagtggatttctggcaatgctgcttctgataagaacatcaaggatggtgtctgtgcccagattgaaaagaactttgccagggccaagtggaagaaggctgtccgagtgaccaccctcatgaaacggctccgggcaccagagcagtccagcayggytgcagcccagtcggcctcagccacagacactgccacccccggggctgcagaccgtaagtgcccaccccagccacagatggaagtgccaccccagccactgatggcagtgtcaccccagccaccgatggaagcatcantccagccactgatggggagtgtcaccccagcg

SEQ ID NO: 220 - DNA, 1857 bp, Homo sapiens
taaccctcactaaagggaacaaaagctggagctccaccgcggtggcggccgctctagaactagtggatcccccgggctgcaggaattyggcacgagctggatggcccccgaagtgatcaagtcttccttgttttctaagggaagcgacatctggagctatggagtgctgctgtgggaactgctcaccggagaagtcccctatcggggcattgatggcctcgccgtggcttatggggtagcagtcaataaactcactttgcccattccatccacctgccctgagccgtttgccaagctcatgaaagaatgctggcaacaagaccctcatattcgtccatcgtttgccttaattctcgaacagttgactgctattgaaggggcagtgatgactgagatgcctcaagaatcttttcattccatgcaagatgactggaaactagaaattcaacaaatgtttgatgagttgagaacaaaggaaaaggatcataaaactaacagaggagactggcgtttgtgcagaggcctgggctgtcatctaagtgaataatccgctgaaaaggtttcggcttggattgtcctgactgcaaagaccttcgtcccatgaggacctgagtgaccagggcttgagcagaggaagagggaatttcagcttctccttgtgcacaggaggagcccgtggccgaggggtcgccagtgtagtgtaatagacggaattcccttcttcctgctgggaatgattccggtgggtgtgaatctgtgtcgcaggagctgcgatcccgggaagaggagctgactcgggcggctctgcagcagaagtctcaggaggagctgctaaagcggcgtgagcagcagctggcagagcgcgagatcgacgtgctggagcgggaacttaacattctgatattccagctaaaccaggagaagcccaaggtaaagaagaggaagggcaagtttaagagaagtcgtttaaagctcaaagatggacatcgaatcagtttaccttcaggtatgatcttgtttttatgtttttgaaagatttttgtgtgtcctccttttaatcagttttctttgttcatcagaaccaggaaagagatagggaagtaactttgtaaaacagtgaatgaatgagtatcttcagctgtaggcttagattcatggttctaatgtaatggcctaatgagattccatgtaggaaacagcattaggagcacgtggtagtcacagcacacgaggatctaaccctcagcgtactttcatattgatggattaactgattgactccttttgaaattgaagcagaaccattttttagctgagcgtactgagccaatgtcatgtggcattgtgaagatgcaaaacaacgaaactgttaatatttcatcattacgttcattgcttccacaaggatctaggatgtcatctggtatctgggacactgatattgktgtcagcactttcaataaaatatatcaagtaccctgaggtactttcccatgaaggtttaaaatccttcagacacaaaaatcacccagtaaatctagggaagcttttttaaacattgkgatamcaacatacmaggattactaaatcattttagtaatgtgttaggagaaactaaagggaatagaaaatatatcaatcaatcaatacatatagatattattgactgataatcaaaatatatcgatcaatatagcagacatagcttgattcactaaattaagttctttaatattatatattctacttgttgtaaggaaaaaacaaatacctccatggtattttgtgattctttctagtaccagagcaggatgatgacagagcaatgcagacttcacttttatagaatctgtatga

SEQ ID NO: 221 - DNA, 2161 bp, Homo sapiens
  SITE (36): n equals a,t,g, or c
ggcacgaggcgcgcctggctgggccctgcggaggangggaaggagcgaaggagcgaaggagcaagcggagcggcmgtcgcccaagccaagccgcgctgccaaccctcccgcccgcccgcgctcctgtccgccgtgtctagcagcggggcccagcatggtcatggcggatggcccgaggcacttgcagcgcgggccggtccgggtggggttctacgacatcgagggcacgctgggcaagggcaacttcgctgtggtgaagctggggcggcaccggatcaccaagacggaggtggcaataaaaataatcgataagtctcagctggatgcagtgaaccttgagaaaatctaccgagaagtacaaataatgaaaatgttagaccaccctcacataatcaaactttatcaggtaatggagaccaaaagtatgttgtaccttgtgacagaatatgccaaaaatggagaaatttttgactatcttgctaatcatggccggttaaatgagtctgaagccaggcgaaaattctggcaaatcctgtctgctgttgattattgtcatggtcggaagattgtgcaccgtgacctcaagctgaaaatctcctgctggataacaacatgaatatcaaaatagcagagtatgggagttgttctttatgtccttgtctgtggagctctgccctttgatggaccgactcttccaattttgaggcagagggttctggaaggaagattccggattccgtatttcatgtcagaagattgcgagcaccttatccgaaggatgttggtcctagacccatccaaacggctaaccatagcccaaatcaaggagcataaatggatgctcatagaagttcctgtccagagacctgttctctatccacaagagcaagaaaatgagccatccatcggggagtttaatgagcaggttctgcgactgatgcacagccttggaatagatcagcagaaaaccattgagtctttgcagaacaagagctataaccactttgctgccatttatttcttgttggtggagcgcctgaaatcacatcggagcagtttcccagtggagcagagacttgatggccgccagcgtcggcctagcaccattgctgagcaaacagttgccaaggcacagactgtggggctcccagtgaccatgcattcaccgaacatgaggctgctgcgatctgccctcctcccccaggcatccaacgtggaggccttttcatttccagcatctggctgtcaggcggaagctgcattcatggaagaagagtgtgtggacactccaaaggtcaatggctgtctgcttgaccctgtgcctcctgtcctggygcggaagggatgccagtcactgsccagcaacatgatggagacctccattgacgaagggctggagacagaaggagaggccgaggaagaccccgctcatgcctttgaggcatttcagtccacacgcarcgggcagagacggcacactctgtcagaagtgaccaatcaactggtcgtgatgcctggggcagggaaaattttctccatgaatgacaggccctcccttgacagtgtggactctgagcatgatatggcgtctgttcacagggacctgaactttctgsaagacaacccttcccttaaggacatcatgttagccaatcagccttcaccccgcatgacatctcccttcataagcctgagacctaccaacccagccatgcaggctctgagctcccagaaacgagaggtccacaacaggtctccagtgagcttcagagagggccgcagagcatcagatacctccctcacccagggaattgtagcatttagacaacatcttcagaatctggstagaaccaaaggrattctagagttgaacaaagtgcagttgttgtwtgaacaaataggaccggaggcagaccctaacctggcgccggcggctcctcagctccaggaccttgctagcagctgccctcaggaagaagtttctcagcagcaggaaagcgtctccamtctccctgccagcgtgcatccccagctgtsccacggmagagcctggagacccagtacctgcagcacagactccagragcccagccttctgtcaaaggcccagaacacctgtcagctttattgcaaagaaccaccgtcgacgcggccgcgaattc

SEQ ID NO: 222 - DNA, 489 bp, Homo sapiens
  SITE (424): n equals a,t,g, or c
  SITE (441): n equals a,t,g, or c
  SITE (449): n equals a,t,g, or c
taggaacgccgtaccagccgcgtctctcaggacagcaggcccctgtccttctgtcgggcgccgctcagccgtgccctccgcccctcaggttctttttctaattccaaataaacttgcaagaggactatgaaagattatgatgaacttctcaaatattatgaattacatgaaactattgggacaggtggctttgcaaaggtcaaacttgcctgccatatccttactggagagatggtagctataaaaatcatggataaaaacacactagggagtgatttgccccggatcaaaacggagattgaggccttgaagaacctgagacatcagcatatatgtcaactctaccatgtgctagagacagccaacaaaatattcatggtcttgagtactgccctggaggagagctgtttgactatataatttnccaggatccgctgtcanaaaaaganaacccgggttggcttccgcaaataggaatctgcttggtgg

SEQ ID NO: 223 - DNA, 580 bp, Homo sapiens
  SITE (66): n equals a,t,g, or c
  SITE (94): n equals a,t,g, or c
  SITE (507): n equals a,t,g, or c
  SITE (508): n equals a,t,g, or c
  SITE (557): n equals a,t,g, or c
  SITE (574): n equals a,t,g, or c
gtgactctgacagcggcagaggccctaaagctttttaagaaccagctgtctccatatgaacaaagnggaatcctgggctacgcggagctgtggntcctgggtcttgaagccaagaagctcgacacggctcctgagaaatttagcaagacgagttttgatgatgagcatggcttctatctgaaggttctgcatgatcacattgcctaccgctatgaagttctggagacaatcgggaaggggtcctttggacaggtggccaagtgcttggatcacaaaaacaatgagctggtggccctgaaaatcatcaggaacaagaagaggtttcaccagcaggccctgatggagctgaagatcctggaagctctcagaaagaaggacaaagacaacacctacaatgtggtgcatatgaaggactttttctactttcgcaatcattctgcatcacctttgagctcctggggatcaattgtatgagttgatgaagattaacaattttcaaggtttcanntgttccttagttcggcgttcatctctctgttttgaagtgtttgccagangtttccgtaggggaaancattca

SEQ ID NO: 224 - DNA, 482 bp, Homo sapiens
  SITE (92): n equals a,t,g, or c
  SITE (100): n equals a,t,g, or c
gaaagaaatgaaccccctccccactcagctctccacaggtgccatcagtttcctgcgctctctcctggaaccggatcctgtgaagaggccanatattcancaggcactggcgaatcgctggcttaatgagaattacacgggcaaagtgccctgtaatgtcacctatcccaacaggatttctctggaagatctgagcccgagcgtcgtgctgcacatgaccgagaagctgggttacaagaacagcgacgtgatcaacactgtgctctccaaccgcgcctgccacatcctggccatctacttcctcttaaacaagaaactggagcgctatttgtcagggaaatctgacatccaggacagcctctgctacaagacccggctctaccagatagaaaagtacagggcccccaaggagtcctatgaggcctctctggacacctggacacgagatcttgaattccatgccgtgcagagataaaaagccc

SEQ ID NO: 225 - DNA, 705 bp, Homo sapiens
  SITE (516): n equals a,t,g, or c
  SITE (598): n equals a,t,g, or c
  SITE (642): n equals a,t,g, or c
  SITE (667): n equals a,t,g, or c
  SITE (681): n equals a,t,g, or c
gatcgccaagccccactccctgcttccctctgagcagcaagacagtggatccacgtgggctgcgcgctcagtgtttgacctcctgagaaaggggcccgtcatggaagtgccctgtgacaagcccttctcggaggagcaagctcgcctctacctgcgggacgtcatcctgggcctcgagtacttgcactgccagaagatcgtccacagggacatcaagccatccaacctgctcctgggggatgatgggcacgtgaagatcgccgactttggcgtcagcaaccagtttgaggggaacgacgctcagctgtccagcacggcgggaaccccagcattcatggcccccgaaggccatttctgattccggccaaagcttcagtggaaaggccttggatgtatggccactgcgtcacgttgtactgctttgtctatgggaagtgcccgttcatcgacgatttcatcctggccctccacaggaagatcaagaatgagcccgtggtgtttcctgaggagccaganatcagcgaggagctcaaggacctgatcctgaagatgttagacaagaatcccgagacgagaattggggtgccagacatcaagntgcacccttgggtgaccaagaacggggaggagccttcttcggangaagacacttgaacctggtgaagtnacagaagaagaagntaagaacttagcaggttcatccca

SEQ ID NO: 226 - DNA, 586 bp, Homo sapiens
gccgggatctctacacagggctgaaggctgggctgaccctggagacacgtttgcagatagcactagatgtggtggagggaatccgcttcctgcacagccagggacttgtccatcgtgatatcaaactgaaaaatgtgctgctggataagcagaaccgtgccaagatcactgacttaggattctgcaagccagaggccatgatgtcaggcagcattgtggggacaccaatccatatggcccctgaacttttcacaggggctcgcccagaacgtcttcctgtgtttgatgaggagtgctggcagttgatggaagcctgttgggatggcgaccccttgaagaggcctctcttgggcattgtccagcccatgctccagggcatcatgaatcggctctgcaagtccaattctgagcagccmaacagaggactagatkattctacttgaaagcaaagacctttctctttcactctctagttatttccttccccytmaccttttgccatggggagaatttgacatttattcactatwggacacctcccmagggaactggtgcttgctgggaaacttggaacttccaggcggga

SEQ ID NO: 227 - DNA, 512 bp, Homo sapiens
  SITE (498): n equals a,t,g, or c
aattcggcacaggtagatcgtagccatcaagatcctgaagaacacccatcctatgcccgacaaggtcagattgaagtgagcatcctggcccggttgaagcacggagagtgccgatgactataacttcgtccgggcctacgaatgcttccagcacaagaaccacacgtgcttggtcttcgagatgttggagcagaacctctatgactttctgaagcaaaacaagtttagccccttgcccctcaaatacattcgcccagttctccagcaggtagccacagccctgatgaaactcaaaagcctaggtcttatccacgctgacctcaaaccagaaaacatcatgctggtggatccatctagacaaccatacagagtcaaggtcatcgactttggttcagccagccamgkctycaaggctgtgtkctycacctacttgcagtccagatattacagggccctgagatcatcttggtttaccattttgtgagcaattgacatgtngtccctgggctgtt

SEQ ID NO: 228 - DNA, 554 bp, Homo sapiens
  SITE (503): n equals a,t,g, or c
tgaaaactgactgctggcccagggyccctgctgaggggcgtcaggccaggcttgacccattccctcccagcctccgctctgcctcccttccacagaagccctcttcgggcagcccccctttgcctccaggtcgttctcggagctggaagagaagatccgtagcaaccgggtcatcgagctccccttgcggcccctgctctcccgagactgccgggacctactgcagcggctcctggagcgggaccccagccgtcgcatctccttccaggacttytttgcgcacccctgggtggacctggagcacatgcccagtggggagagtctggggcgagcaaccgccctggtggtgcaggctgtgaagaaagaccaggagggggattcagcagcygccttatcactctactgcaagctctggacttctttgtacctgccctgcactatgaagtggatgcccagcggaaggaggcaattaaggcaaagktggggcagtacgtgtcccgggntgaggagytcaaggccatcgtyttcctgtttcaatcaggccttgttgaggc

SEQ ID NO: 229 - DNA, 382 bp, Homo sapiens
  SITE (266): n equals a,t,g, or c
  SITE (297): n equals a,t,g, or c
  SITE (337): n equals a,t,g, or c
gaatatcccacacttcaaaaagactttagaagaacaacgtatgccaacagtagcctcataaagtacatggagaaacacaaggtcaagcctgacagcaaagtgttcctcttgcttcagaaactcctgaccatggatccaaccaagagaattacctcggagcaagctctgcaggatccctattttcaggaggaccctttgccaacattagatgtatttgccggctgccagattccataccccaaacggaggaattccttaatggaagntgatcctggaaggaaaaaggtggacaaggantcagcaacagcagcagaacccagcatcagcagcccacagncccttccacagcagggcagcagcccctttccacaggggggcccca

SEQ ID NO: 230 - DNA, 1100 bp, Homo sapiens
  SITE (1058): n equals a,t,g, or c
  SITE (1092): n equals a,t,g, or c
atgaaatctttaaaatttgccaagttttagggactcccaaaaaaagtgactggccagaaggataccagctggcatcctctatgaacttccgttttccccagtgtgttcctataaacttaaaaactcttattcccaatgccagtaatgargctattcagctcatgaccgaaatgttgaattgggrtccaaagaaacgaccgacagcaagccaggcattgaaacacccatattttcaagttggtcaggtattaggcccttcgtcaaatcatctggaatcaaaacagtctttaaataagcagctgcaaccattagaatcaaagccatctttagttgaggtagagcctaagcctctgccggatataatcgatcaggttgttggacaaccccagccaaaaactagccagcagccactgcagcccattcagccgccacagaacctgagcgtccagcaacctccaaagcaacaragtcaggagaaaccgccacaaacgstattcccgagcatcgtcaaaaacatgccaactaagccaaatggcacactgwgtcataaaagtggtaggaggcgttggggtcagactatcttcaagtctggagatagctgggaagagttggaggactatgatttcggagcctcccattccaagaagccaagcatgggtgtttttaaagaaaaaaggaaaaaagattctccatttcggcttccagagccagtaccctcaggctccaaccactcgacaggggaaaacaagagcttacctgctgttacttccctaaaatctgattccgaattgtcaactgctccaacctctaaacagtactacttgaaacaatcaagatatcttccagggcagcatgacattatactacaaggactggcggatctgtgacactggccttcagggaaagagacgcaagagtcatagttactgacctgctactactaaccggctgtgtacttggagcaagattctggtttctgtaacttacgatgggactgcaccatctgtcaagctcactcttgtgtgaatccaagaaggtgtcctttgatagccagtggnaaaggaaataaacccccacacttggagcaccagntattccca

SEQ ID NO: 231 - DNA, 1662 bp, Homo sapiens
  SITE (1): n equals a,t,g, or c
  SITE (19): n equals a,t,g, or c
  SITE (26): n equals a,t,g, or c
  SITE (32): n equals a,t,g, or c
  SITE (57): n equals a,t,g, or c
  SITE (1571): n equals a,t,g, or c
  SITE (1634): n equals a,t,g, or c
  SITE (1652): n equals a,t,g, or c
naattaacttatcccgttngccgcanccgaangccgaagcccagcgaatcaattaancagaaagcggaagagcgcccaatacgcaaaccgcttttcccgggcgttggccgattcattaatscagttggcacgacaggtttccccgaytgaaagcggcartkagcgcaacgcaattaatgtragttagctcactcattaggcaccccaggctttacactttatgcttccggytcgtatgttgtgtggaattgtagcggatamcaatttcacacaggaamcagctatgaccatgattacgccaagctcgaaattaaccctcactaaagggaacaaaagctggagctccaccgcggtggcggccgctctagaactagtggatcccccgggctgcaggaattcggcacgagctcgtgccgcgcggccgcgttacagcctgttggcggagatcgggcgcggcagctacggcgtggtttatgaggcagtggccgggcgcagcggggcccgggtggcggtcaagaagatccgctgcgacgcccccgagaacgtggagctggcgctggctgaattctgggccctcaccagcctcaagcggcgccaccagaacgtcgtgcagtttgaggagtgcgtcctgcagcgcaatgggttagcccagcgcatgagtcacggcaacaagagctcgcagctttacctgcgcctggtggagacctcgctgaaaggagaaaggatcctgggttatgctgaggagccctgctatctctggtttgtcatggagttctgtgaaggtggagacctgaatcagtatgtcctgtcccggaggccagacccagccaccaacaaaagtttcatgctacagctgacgagcgccattgccttcctgcacaaaaaccatattgtgcacagggacctgaagccagacaacatcctcatcacagagcggtctggcacccccatcctcaaagtggccgactttggactaagcaaggtctgtgctgggctggcaccccgaggcaaagagggcaatcaagacaacaaaaatgtgaatgtgaataagtactggctgtcctcagcctgcggttcggacttctacatggctcctgaagtctgggagggacactacacagccaaggcggacatctttgccctgggcattatcatctgggcaatgatagaaagaatcacttttattgactctgagaccaagaaggagctcctggggacctacattaaacaggggactgagatcgtccctgttggtgaggcgctgctagaaaacccaaagatggagttgcacatcccccaaaaacgcaggacttccatgtctgaggggatcaagcagctcttgaaagatatgttagctgctaacccacaggaccggcctgatgcctttgaacttgaaaccagaatggaccaggtcacatgtgctgcttaaaattcagggctaagcattttgggtgattttaaactaggtcgattcctcgggamccacagtctcaccacgtctcctccagaggacggmagarggtacagtggtggctggccgttgcgatctcccacagytggatccgcaatgngaactttkgttgggtttcccttcttttartttgcttaattttcctttctttctttttttttcncttccttttaattaaccntggacttaaa

SEQ ID NO: 232 - DNA, 1092 bp, Homo sapiens
  SITE (1): n equals a,t,g, or c
  SITE (2): n equals a,t,g, or c
  SITE (40): n equals a,t,g, or c
nntcttaatagtcctgtcgggtttcgccacctctgacttnagcgtcgatttttgtgatgctcgtcagggggcggagcctatggaaaaacgccagcaacgcggcctttttacggttcctggccttttgctggccttttgctcacatgttctttcctgcgttatcccctgattctgtggataaccgtattaccgcctttgagtgagctgataccgctcgccgcagccgaacgaccgagcgcagcgagtcagtgagcgaggaagcggaagagcgcccaatacgcaaaccgcctctccccgcgcgttggccgattcattaatgcagctggcacgacaggtttcccgactggaaagcgggcagtgagcgcaacgcaattaatgtgagttagctcactcattaggcaccccaggctttacactttatgcttccggctcgtatgttgtgtggaattgtgagcggataacaatttcacacaggaaacagctatgaccatgattacgccaagctcgaaattaaccctcactaaaggkaacaaaagctggagctccaccgcggtggcggccgctctagaactagtggatcccccgggctgcaggaattcggcacgaggaaataatgttatgctcatgccaactggaataataaagctgattgactttggctgtgccaggcgtttggcctgggcaggtttaaatggcacccacagtgacatgcttaagtccatgcatgggactccatattggatggccccagaagtcatcaatgagtctggctatggacggaaatcagatatctggagcattggttgtactgtgtttgagatggctacagggaagcctccactggcttccatggacaggatggccgccatgttttacatcggagcacaccgagggctgatgcctcctttaccagaccacttctcagaaaatgcagcagactttgtgcgcatgtgcctgaccaggtaagaaactgaaagcaagaggaggaagataaatgcccggagattccaagtggcagacatttccctttcaatttatggcccattaaaagctctgttttggttwtgaaaaaaaaaaaaaaaaaaaaaaaaa

SEQ ID NO: 233 - DNA, 1361 bp, Homo sapiens
  SITE (885): n equals a,t,g, or c
gccatgctgcaggccacatgtgggactcctatctatatggcccctgaagttatcagtgcccacgactatagccagcagtgtgacatttggagcataggcgtcgtaatgtacatgttattacgtggagaaccaccctttttggcaagctcagaagagaagctttttgagttaataagaaaaggagaactacattttgaaaatgcagtctggaattccataagtgactgtgctaaaagtgttttgaaacaacttatgaaagtagatcctgctcacagaatcacagctaaggaactactagataaccagtggttaacaggcaataaactttcttcggtgagaccaaccaatgtattagagatgatgaaggaatggaaaaataacccagaaagtgttgaggaaaacacaacagaagagaagaataagccgtccactgaagaaaagttgaaaagttaccaaccctggggaaatgtccctgakrccaattacacttcagatgaagaggaggaaaaacagtctactgcttatgaaaagcaatttcctgcaaccagtaaggacaactttgatatgtgcagttcaagtttcacatctagcaaactccttccagctgaaatcaagggagaaatggaraaaacccctgtgactccaagccaaggaacagcaaccaagtaccctgctaaatccggcgccctgtccagaaccaaaaagaaactctaaggttccctccagtgttggacagtacaaaaacaaagctgctcttgttagcactttgatgarggggtaggaggggaagaagacagccctatgctgagcttgtagccttttagctccacagagccccgccatgtgtttgcaccagcttaaaattgaagctgcttatctccaaancagcataagctgcacgtggcattaaaggacagccaccagtaggcttggcagtgggctgcagtggaaatcaactcaagatgtacacgaaggttttttaggggggcagataccttcaatttaaggctgtgggcacacttgctcatttttacttcaaattcttatgtttaggcacagctatttataggggaaaacaagaggccaaatatagtaatggaggtgccaaataattatgtgcactttgcactagaagactttgttagaaaattactaataaacttgccatacgtattacagcagaagtgcttcagtcattcacatgtgttcgtgagattttaggttgctatagattgtttaagacagcttattttaaatgtagaaaaataggagattttgtaactgcttgccattaacttgctgctaaattcccaatgtattgattaaatcaataaaaaacagatgttactcaaaaaaaaaaa

SEQ ID NO: 234 - DNA, 861 bp, Homo sapiens
gatcaaattttattgtttattttataaaaacagtacacagtgaaacaaaagaaaattattcttctctcagaaagtaacgagtaggtcagccttactgttaagaggataagtagacatcatataagcttgcagcttacaaggtacatgttagcctgccacagtttctttgcatcaagaatacaggattgttccaaccacagacgtgagtttactgttttcttgtttttgctttgccaggccaaagtcagtaactgttactttgtccttatcccccaacataatgttgtttggtgtcagatctctatggacaatcctcttctccttgtgtaagtatcgaagagctaagcacagctgtataaatattttccatagtctttcttcagtaaaatggtgatgtttttccttcaaagaactgaaatgctctccaagcggggctccttctatcagctccataactatgtacaacctatcgttttccagaaatgttttgtaataacgtacaatgtkgggatgataaagctgctctttaattattgttaattcagaaacaatattccttacgctgctgtctcgatctttcttatcctttccaaatgctgggttatgtaaattgacctctttcattgctaaaagattttgaccactatgctttctaaccttgtaaacacagccaaaagctccacttccaagatgatccaaaattgcatagttgcctatatatttcgaaggagctttgttctgattaatgctttcaatattttcagcaatttgcttcagttcatcctccactaataaattcagcttggataccaattcttcataagcactgatatcacgtacataatgccctatgtcaatgaa

SEQ ID NO: 235 - DNA, 2153 bp, Homo sapiens
acaagagcccttcctgcagggaacctcaggcttcagagagccgaaaagttgggaggcgtaaccacttacaggccggaagtgtccggggtggacgcattcgggtagccgaagaagtcccaggattgccgaagaagtcccaggatttccgaagcgagccgaagcatcgcgacagttttcagagacagctgatcggttggagctsttgcgccgagcagtcatggcggcggccagagctactacgccggccgatggcgaggagcccgccccggaggctgaggctctggccgcagcccgggagcggagcagccgcttcttgagcggcctggagctggtgaagcagggtgccgaggcgcgcgtgttccgtggccgcttccagggccgcgcggcggtgatcaagcaccgcttccccaagggctaccggcacccggcgctggaggcgcggcttggcagacggcggacggtgcaggaggcccgggcgctcctccgctgtcgccgcgctggaatatctgccccagttgtcttttttgtggactatgcttccaactgcttatatatggaagaaattgaaggctcagtgactgttcgagattatattcagtccactatggagactgaaaaaactccccagggtctctccaacttagccaagacaattgggcaggttttggctcgaatgcacgatgaagacctcattcatggtgatctcaccacctccaacatgctcctgaaaccccccctggaacagctgaacattgtgctcatagactttgggctgagtttcatttcagcacttccagaggataagggagtagacctctatgtcctggagaaggccttcctcagtacccatcccaacactgaaactgtgtttgaagcctttctgaagagctactccacctcctccaaaaaggccaggccagtgctaaaaaaattagatgaagtgcgcctgagaggaagaaagaggtccatggttgggtagaagaatgtgtatgacaaccacacacagtgaagctcttttttcaaagtaaatttgaagaaatgctacaagtatgagatgagatctaagtaaaggtgttaagatatttttaagtggtatgtgatcgtgtcattatcatctgcacttcactcaagagcttactatgtgtctaagtcatgttctaggcagaattgggtatttaaagtaaattgaggacaggcttctcccagattgtgacatgtatatctcagatacatgggtgtggcattgaaccacataatgagaacattattctctttttagtccttgtgagacaaggatgaagtctcagttgctgatactcgctgagcttactggccctctaacccagtgtttttttttgttgttgttgtgtacatgttatatttattttgaaaccagtttaatgggatacaaccagcattttaaaaaatgaaatagaatacagcatggaaaatatcagtgtattgttttatgaaactttcatgtgtatatatagaccaaggatatgtgctgagttttgatgtcaaatatatttctctttcagggtcatgatcaaaaaatgaaaagtctgcttaactccaatttctcttttaaaaaagcagacttacagctttcaggcaactgaaattcatgttaacatgtttttatttttattgctttgtatttttgtggttaccttctaagacaagtgattgatctaaagttccttttaagtttataccgctaaacaaactgagttgatttctatcacaggcagtaagtaggtagagcaaaaatggtgaagtgacttgtgaagactgaagtttgatgaagtctggtttaaggcacaggtaaactgagtgtggatgcaaaagtaccaggagctagcttttaaccttgcccagcctcagtttcttttcttagaagaagctatgtttgggtgggaagggaagagagggataagaaaatacctttcttccttgtaaactccaatcaacaaacatattttgagtgccttttgtgttccttggcaccctgttgggtattgggtacttggcaccctgttgggtattgggtacaatggtgagccagacagacacagcgcctgtccttttgtaagaatatttatttttataaaaaagtataaagtaaaaaaaaaaaaaaaaaaaaaaaaaaa

SEQ ID NO: 236 - DNA, 970 bp, Homo sapiens
  SITE (789): n equals a,t,g, or c
  SITE (862): n equals a,t,g, or c
  SITE (885): n equals a,t,g, or c
ggcacgaggcgaggtgcgctacgtgaaggagccatacatccagtcgcgcttctaccgggcccctgagatcctgctggggctgcccttctgcgagaaggtggacgtgtggtccctgggctgcgtcatggctgagctgcacctgggctggcctctctaccccggcaacaacgagtacgaccaggtgcgctacatctgcgaaacccagggcctgcccaagccacacctgttgcacgccgcctgcaaggcccaccacttcttcaagcgcaacccccaccctgacgctgccaacccctggcagctcaagtcctcggctgactacctggccgagacgaaggtgcgcccattggagcgccgcaagtatatgctcaagtcgttggaccagattgagacagtgaatggtggcagtgtggccagtcggctaaccttccctgaccgggaggcgctggcggagcacgccgacctcaagagcatggtggagctgatcaagcgcatgctgacctgggagtcacacgaacgcatcagccccagtgctgccctgcgccaccccttcgtgtccatgcagcagctgcgcagtgcccacgagaccacccactactaccagctctcgctgcgcagctaccgcctctcgctgcaagtggaggggaagccccccacgcccgtcgtggccgcagaagatgggaccccctactactgtctggctgaggagaaggaggctgcgggtatgggcagtgtggccggcagcarccccttcttycgagaggagaargcaccaggtatgcaaagagscantsgaccagctggatgacctgagtctgmaggaggctgggcatgggctgtggggtgagacctgsaccaatgcggncttccgacatgawgggccccctnaaggcagcatactggccaccatgtgccccgactcgggccctgagcccatcctggccttctacagcaagccgctggcaggccgcaa

SEQ ID NO: 237 - DNA, 1376 bp, Homo sapiens
cacagcggccaatgtctggcagtgggcacatgggggtgcgggggtgtaggtgccaagcgccatggcttagacccgagattggagtccggccgccccccgacagcagccgcctcctgccccccgtgcgccctaggcgccaccatgtcgggagacaaacttctgagcgaactcggttataagctgggccgcacaattggagagggcagctactccaaggtgaaggtggccacatccaagaagtacaagggtaccgtggccatcaaggtggtggaccggcggcgagcgcccccggacttcgtcaacaagttcctgccgcgagagctgtccatcctgcggggcgtgcgacacccgcacatcgtgcacgtcttcgagttcatcgaggtgtgcaacgggaaactgtacatcgtgatggaagcggccgccaccgacctgctgcaagccgtgcagcgcaacgggcgcatccccggagttcaggcgcgcgacctctttgcgcagatcgccggcgccgtgcgctacctgcacgatcatcacctggtgcaccgcgacctcaagtgcgaaaacgtgctgctgagcccggacgagcgccgcgtcaagctcaccgacttcggcttcggccgccaggcccatggctacccagacctgagcaccacctactgcggctcagccgcctacgcgtcacccgaggtgctcctgggcatcccctacgaccccaagaagtacgatgtgtggagcatgggcgtcgtgctctacgtcatggtcaccgggtgcatgcccttcgacgactcggacatcgccggcctgccccggcgccagaaacgcggcgtgctctaccccgaaggcctcgagctgtccgagcgctgcaaggccctgatcgccgagctgctgcagttcagcccgtccgccaggccctccgcgggccaggtagcgcgcaactgctggctgcgcgccggggactccggctagaagccgggtggttccagccattcctgcagccaagggcactgggccagggcggcgcacgcgcaagaggcgcgcttcgagggaatatgcgaagctgccgcgtgctgctgcacatgcgctttttcccttccgcttccctccctttcttcccacgggggagtccgcagttgcccttgttcggaatccacgttccccgcgatcccgggagctggaggcgcatgcgcatccgcgattccctgcgaccaggccccgagagggcgagaccagaggggacggaagcattgcgcctgcgcggaactctcagcctctgcgcggagggcgtcccttcccaaccagccgtgggtgccaggttcccggttggaacctgcaataaactcgctgttcctcgcaaaaaaaaaaaaaaaaaaaaaactcga

SEQ ID NO: 238 - DNA, 1285 bp, Homo sapiens
  SITE (1261): n equals a,t,g, or c
  SITE (1262): n equals a,t,g, or c
  SITE (1267): n equals a,t,g, or c
  SITE (1268): n equals a,t,g, or c
  SITE (1283): n equals a,t,g, or c
tgtgtggcacccagatcacgctgtggttatctgcagttcctttktagtattgtacaaagtttcttgaagatttttaaatacataagtttaaaagagaattaactttcaatttgcaaattaaaatgagaatggttgccttttcttcattatcaagagatggtgagttgtcctcctgtaagtaaattggttcttttctttctaatattgtgttccttgaaaccttactctagtatgcagggagagtggagggtgcctaagtgtaaaataattaaaacttaagctgatataattatcaataatagtaaccagttctgatatctacttgataccataacggtgagcattgatagactttcatagatttttacataagattagcttgagcaagttttcctcttttgtaggtactggggggaaaattctggaaaaatttttagagagttctttctaaaatgtcgaaatgcaaagctgtataaattgctgttgacgttagctgtctgaccaggaagtactctctttaagcctcacttaaaaaactaagtgtctgtaataacttcctttctcgggatgaaggtgctgatagcctggggtgttcttataacttaagttcagttttttctttcctgtgaggaagaggcagttttttaaatgaagccatctctggggaaatcgtattgattgttgtagctaaatacggaatttttaaagtctttagtatgttgaactggaaatataggacatgcgtttgagatctactgttgcatcataaatacaaaggactgaagttataaaagagaaaagagaagtttgctgctaaaatgaatctgagcaatatggaatattttgtgccacacacaaaaaggtactgaagatttaccccccaaaaaaaattgtcaatgagaaataaagctaactgatatcaaaaagcagagcctgctctactggccatcatgcgtaaaggggtgctgaaggacccagagattgccgatctattctacaaagatgatcctgaggaactttttattggtttgcatgaaattggacatggaagttttggagcagtttattttgctacaaatgctcacaccaatgaggtggtggcaattaagaagatgtcctatagtgggaagcagacccatgagaaatggcaagatattcttaaggaagttaaatttttacgacaattgaaagcatcctaatacttattgggagtaccaaaggcttggttactttggaaaggaaccaccaacttggcttgggnnttggnnggaatggggaaaatnaa

SEQ ID NO: 239 - DNA, 843 bp, Homo sapiens
  SITE (28): n equals a,t,g, or c
  SITE (812): n equals a,t,g, or c
ggaagcgcccgcgcgggcgcaggcggcncggratggcggggcccggctggggtcccccgcgcctggacggcttcatcctcaccgagcgcctgggcagcggcacgtacgccacggtgtacaaggcctacgccaagaaggacactcgtgaagtggtagccataaagtgtgtagccaagaaaagtctgaacaaggcatckgtggagaacctcctcacggagattgagatcctcaagggcattcgacatccccacattgtgcagctgaaagactttcagtgggacagtgacaatatctacctcatcatggagttttgcgcagggggcgacctgtctcgcttcatccatacccgcagattctgcctgaraaggtggcgcgtgtyttcatgcagcaattagctagcgccctgcaattcctgcatgaacggaatatctctcacctggatctgaagccacagaacattctactgagctccttggagaagccccacctaaaactggcagactttggtttcgcacaacacatgtccccgtgggatgagaagcacgtgctccgtggctcccccctctacatggcccccgagatggtgtgccagcggcagtatgacgccgcttggacctctggtcatgggggtcatcctgtatgargccctcttcgggcagcccccctttgcctccaggtcgttctcggagctggaagagaagatccgtagcaaccgggtcatcgagctccccttgcggcccctgctctcccgagactgccgggacctactgcagcggstcctggagcgggaccccagccgtcgcatctccttncaggacttctttgcgcacccctgggtgggac

SEQ ID NO: 240 - DNA, 1736 bp, Homo sapiens
ggaactgtaaaatcctggacaccattggccgtggcacgttcagtgaggtccaggatcacatgctgattgggacccaaatggccatcaaaatcatccccaaggctggctcccttggcatcactctccagagagtgataagtrttttaaagttactctgtcacttcaatattgtacggttgtatcaagtgattgacacccccaacaccagttatttatttagtaacggagtatgcaagaggaggacacccacgcaaccaatacaccaccatggcctcatgagggaggagaaggcctagaccatgttcaggcagattctgtcggccatgcagtagtgccatagcaaattgcgcagagacctgaacccagaaaacatcatccttgatgaggacggtaacgttaagatcgcagacttcggctttggtaccacattccatgatgggcagaagctgacagccctttgtagcacttaacccctacatggccctggaacgtttcctaggccagggctaccaatgtgccaccatggatattcagagcctcagagtaattttataccacatggtggctggggttctgcccttctgctcatgcagcattagggtcctctcagcaaaaatttaaagtggaagctatttttccccagtctacttttcctgaggtcttaaaagcctcattaaaaaactattaacagtagaccccagggagcagaccacactagaagaagttatgagggacccgtgggtgaacagtggtcaggagttgcctctgacaacatgaagaacaaatcctggaccacctgaatcccaaaacaacccagcttttggtggccatgggattccaggctgagaacctatctgtggcaatcaaagaaaaattattcagttatcccatggccacctaccttgttttggaacaaacaaaacagaagaagcggtccactatcagaccacagacccttcctcctggggatcccacttgtcctctctacattgaagtttccaccttccctctttcactgaagcgggctcatagcattcagcagaagactgtgggtgccaagtctgggcagggcctttgcccttgggagtcctgttttagacccagctccaccacgtggccctggcctcttctctgccctgtctgtgcttgcagccatggtgcccagtctggccccaccaggagacaccagaacgactgtccatgtgtctactccttggcaccttccccgcatggtgggtagatgggcagggaggggtgggaatctgtgtaaccgtggaagggaacggccctcagacccagagggtttggagcctggggtattgtcaccgacagtggccttagcctagctagcacagttagtgctgtgcatcacagcatagcttttagaggcaggatttgtagtcagtatagttgggaggcaccatggagcagggatcaccctccacctcacttgacaaggagatacaaaactatcagttcatagacaccatctgatagggaactggctcagcataggccaactgggacccaggttgccatcttgaagactttccatcacccaaatatcattcagctcttccaggtggtgagggagtaaaccagaggaggagagttgcaccaccagatataccactatggccacatcgaggaggaagaggaggcccggaccatgttcaggcagattctgtcagccctgcagtactgccacttaaaaaaaaaaaaaaaaaaaaaaaaag

SEQ ID NO: 241 - DNA, 430 bp, Homo sapiens
  SITE (286): n equals a,t,g, or c
  SITE (342): n equals a,t,g, or c
  SITE (347): n equals a,t,g, or c
  SITE (371): n equals a,t,g, or c
ctgagagatatccaaaagaactaaatgccatcatggaaagcatgttgaacaagaatccttcattaagaccatctgctatcgaaattttaaaaatcccttaccttgatgagcagctacagaacctaatgtgtagatattcagaaatgactctggaagmcaaaaatttggattgtcagaaggaggctgctcatataattaatgccatgcaaaaaaggatccacctgcagactctgagggcactgtcagaagtacagaaaatgacgccaagagaaaggatgcggctgangaagctccaggccggctgatgagaaagccaggaagctgaaaaagattgtggaaganaaatntgaagaaaatagcaaacgaatgcnagaattgagatctcggaactttcagcagctgagtggtgaatgtacttcatgaaaaacac

SEQ ID NO: 242 - DNA, 2935 bp, Homo sapiens
gcggagccaagacggtcggggctgcttgctaactccaggaacaggtttaagtttttgaaactgaagtaggtctacacagtaggaactcatgtcatttcttaccaatgatgcgagctcagagtcaatagcatccttctctaaacaggaggtcatgagtagctttctgccagagggagggtgttacgagctgctcactgtgataggcaaaggatttgaggacctgatgactgtgaatctagcaaggtacaaaccaacaggagagtacgtgactgtacggaggattaacctagaagcttgttccaatgagatggtaacattcttgcagggcgagctgcatgtctccaaactcttcaaccatcccaatatcgtgccatatcgagccacttttattgcagacaatgagctgtgggttgtcacatcattcatggcatacggttctgcaaaagatctcatctgtacacacttcatggatggcatgaatgagctggcgattgcttacatcctgcagggggtgctgaaggccctcgactacatccaccacatgggatatgtacacaggagtgtcaaagccagccacatcctgatctctgtggatgggaaggtctacctgtctggtttgcgcagcaacctcagcatgataagccatgggcagcggcagcgagtggtccacgattttcccaagtacagtgtcaaggttctgccgtggctcagccccgaggtcctccagcagaatctccagggttatgatgccaagtctgacatctacagtgtgggaatcacagcctgtgaactggccaacggccatgtcccctttaaggatatgcctgccacccagggtgaagactctacggtaaaaggaatttgatgccttggaaagggagagcggaaactgggagccctgctttccagccatggcgaaagcgggtacttttgtgcaacccctctcctttcacgktggcctggctagggcggagctgccacgccagtgaccagcgkttctttgggaaaattggacttactccacttccaccttttccactcttcaaatgatcacatttgcatattgggaacagkgkatttgtgaagagactctcaggccttccagggaccaccccccccccccacccgctacagcccaggtcctggttctgtcctccccagatgctgctagagaaactgaacggcacagtgccctgcctgttggataccagcaccatccccgctgaggagctgaccatgagcccttcgcgctcagtggccaactctggcctgagtgacagcctgaccaccagcaccccccggccctccaacggtgactcgccctcccacccctaccaccgaaccttctccccccacttccaccactttgtggagcagtgccttcagcgcaacccggatgccaggtatccctgctggcctgggcctgggcttcgggagagcagagggtgctcaggagggtaaggccagggtgtgaagggacttacctcccaaaggttctgcaggggaatctggagctacacacaggagggatcagctcctgggtgtgtcagaggccagcctggggagctctggccactgcttcccatgagctgagggagagggagaggggacccgaggctgaggcataagtggcaggatttcgggaagctggggacacggcagtgatgctgcggtctctcctcccctttccctccaggcccagtgccagcaccctcctgaaccactctttcttcaagcaggtatcgtagccccttcgtgttctggttctggttctagttctggttctaacaactcacaatccctttagctttctctcccctccctttgaatgagagaaactaccccgcttccgaagcccctgaaagacactgctccttcctctcatggagttggctccgacagcccgtctgccaccaggccatggttccttgccccatggtgtcctgggacccagagcaacaggatctgtcacccwcctctctcttctycmscagatcaagcgacgtgcctcagaggctttgcccgaattgcttcgtcctgtcacccccatcaccaattttgagggcagccagtctcaggaccacagtggaatctttggcctggtaacaaacctggaagagctggaggtggacgattgggagttctgagcctctgcaaactgtgcgcattctccagccagggatgcagaggccacccagaggcccttcctgagggccggccacattcccgccctcctgggcagattgggtagaaaggacattcttccaggaaagttgactgctgactgattgggaaagaaaatcctggagagayacttcactgctccaaggcttttgagacacaagggaatctcaacaaccagggatcaggagggtccaaagccgacattcccagtcctgtgagctcaggtgacctcctccgcagaagagagatgctgctctggccctgggagctgaattccaagcccagggtttggctccttaaacccgaggaccgccacctcttcccagtgcttgcgaccagcctcattctatttaactttgctctcagatgcctcagatgctataggtcagtgaaagggcaagtagtaagctgcctgcctcccttccctcagacctctccctcataattccagagaagggcatttctgtctttttaagcacagactaaggctggaacagtccatccttatccctcttctggcttgggccctgacacctaagtctttcccacggtttatgtgtgtgcctcattcctttcccaccaagaatccatcttagcgcctcctgccagctgccctggtgctttctccaagggccatcagtgtcttgcctagcttgagggcttaagtccttatgctgtgttagtttcgttgtcagaacaaattaaaattttcagagacgctgaaaaaaaaaaaaaaaaaaaaaaaaaaaag

SEQ ID NO: 243 - DNA, 366 bp, Homo sapiens
gcttttttaaagaaaactggtgatttatttgctatcaaagtatttaataacataagcttccttcgtccagtggatgttcaaatgagagaatttgaagtgttgaaaaaactcaatcacaaaaatattgtcaaattatttgctattgaagaggaggtaagtagtaaaacttcaatcttatatttattgtagttacgagtcaagaaatagaacctaatattaaaaaatggattttttaaaaaactgttgaaaattagggtttgtacaaccaaatactttatcctaaaggattcttgaatatatagaacaatagaaataaaatatcmtwaaaatggaatcmgaaacagtagtgtaaaaaaaaaaaaaaag

SEQ ID NO: 244 - DNA, 1660 bp, Homo sapiens
aattttttttttttttttttttttttcagcgtctctgaaaattttaatttgttctgacaacgaaactaacacagcataaggacttaagccctcaagctaggcaagacactgatggcccttggagaaagcaccagggcagctggcaggaggcgctaagatggattcttggtgggaaaggaatgaggcacacacataaaccgtgggaaagacttaggtgtcagggcccaagccagaagagggataaggatggactgttccagccttagtctgtgcttaaaaagacagaaatgcccttctctggaattatgagggagaggtctgagggaagggaggcaggcagcttactacttgccctttcactgacctatagcatctgaggcatctgagagcaaagttaaatagaatgaggctggtcgcaagcactgggaagaggtggcggtcctcgggtttaaggagccaaaccctgggcttggaattcagctcccagggccagagcagcatctctcttctgcggaggaggtcacctgagctcacaggactgggaatgtcggctttggaccctcctgatccctggttgttgagattcccttgtgtctcaaaagccttggagcagtgaagtatctctccaggattttctttcccaatcagtcagcagtcaactttcctggaagaatgtcctttctacccaatctkcccaggagggcgggaatgtggccggccctcaggaagggcctctgggtggcctctgcatccctggctggagaatgcgcacagtttgcagaggctcagaactcccaatcgtccacctccagctcttccaggtttgttaccaggccaaagattccactgtggtcctgagactggctgccctcaaaattggtgatgggggtgacaggacgaagcaattcgggcaaagcctctgaggcacgtcgcttgatctgcttgaagaaagagtggttcaggagggtgctggcactgggcctggcatccgggttgcgctgaaggcactgctccacaaagtggtggaagtggggggagaaggttcggtggtaggggtgggagggcgagtcaccgttggagggccggggggtgctggtggtcaggctgtcactcaggccagagttggccactgagcgcgaagggctcatggtcagctcctcagcggggatggtgctggtatccaacaggcagggcactgtgccgttcagtttctctagcagcatctgggtggcaggcatatccttaaaggggacatggccgttggccagttcacaggctgtgattcccacactgtagatgtcagacttggcatcataaccctggagattctgctggaggacctcggggctgagccacggcagaaccttgacactgtacttgggaaaatcgtggaccactcgctgccgctgcccatggcttatcatgctgaggttgctgcgcaaaccagacaggtagaccttcccatccacagagatcaggatgtggctggctttgacactcctgtgtacatatcccatgtggtggatgtagtcgagggccttcagcaccccctgcaggatgtaagcaatcgccagctcattcatgccatccatgaagtgtgtacagatgagatcttttgcagaaccgtatgccatgaatgatgtgaaaacccacagcttat

SEQ ID NO: 245 - DNA, 960 bp, Homo sapiens
  SITE (916): n equals a,t,g, or c
  SITE (920): n equals a,t,g, or c
  SITE (930): n equals a,t,g, or c
  SITE (933): n equals a,t,g, or c
  SITE (953): n equals a,t,g, or c
gaaaaagggtaacaacccggaaagtagactcaccgtcttggtctagagactgacccctgcacagacagaccccttcccctctctgcgaaaggaccaagccccagaagtcactccatctcctacggctcgcaatttccagaggccccctggcaccttccagcctgatgtcgtgcgtcaagttatggcccagcggtgcccccgcccccttggtgtccatcgaggaactggagaaccaggagctcgtcggcaaaggcgggttcggcacagtgttccgggcgcaacataggaagtggggctacgatgtggcggtcaagatcgtaaactcgaaggcgatatccagggaggtcaaggccatggcaagtctggataacgaattcgtgctgcgcctagaaggggttatcgagaaggtgaactgggaccaagatcccaagccggctctggtgactaaattcatggagaacggctccttgtcggggctgctgcagtcccagtgccctcggccctggccgctcctttgccgcctgctgaaagaagtggtgcttgggatgttttacctgcacgaccagaacccggtgctcctgcaccgggacctcaagccatccaacgtcctgctggacccagagctgcacgtaagctggcagattttggcctgtccacatttcagggaggctacagtcagggacagggtccggggagccagggggcaccctgggctacttggccccagaactgttkgtaacgtaaaccggaaggcctccacagccagtgacgtcttacagcttcggggatcctaatgtggggcagtgcttgctggaagagaattgagttgccaaccgaaccatcactcgtgtacgaagcatttgcaaaaggcagaaccggcttcattggctgagctgcccccaagccggggcttganaatnccggcttaanaangacttaaaggagctaatgcnagcccct

SEQ ID NO: 246 - DNA, 626 bp, Homo sapiens
  SITE (603): n equals a,t,g, or c
  SITE (605): n equals a,t,g, or c
  SITE (610): n equals a,t,g, or c
gacgaattcgtgctgcgcctagaaggggttatcgagaaggtgaactgggaccaagatcccaagccggctctggtgactaaattcatggagaacggctccttgtcggggctgctgcagtcccagtgccctcggccctggccgctcctttgccgcctgctgaaagaagtggtgcttgggatgttttacctgcacgaccagaacccggtgctcctgcaccgggacctcaagccatccaacgtcctgctggacccagagctgcacgtcaaggtcagctggtctacacccctctcagcctcaagacaaggccccagagctgctctagccaggcccgccggacactagacctccagagccctgtctattgaataggcgtagcctctctctctggacacagggctgccaggggacaaagcccagccaggagttttagctcctgcctaccaggtgatagaggccctgagccacacgagtcatttccaccagctgccccaycagcccctycaaagagtcatggctgacccagccctggagactcagaccttgacctagccctaccacaaggcacctagatctaccwtccaagggaacctytttccttgaccntncacantcccttttacaaagct

SEQ ID NO: 247 - DNA, 429 bp, Homo sapiens
  SITE (361): n equals a,t,g, or c
  SITE (382): n equals a,t,g, or c
gagaagagggcagagcgtgcatggggctgctccccaggacctgagcaggaacctggagttttcagagctgcctgatcattgctacagaatgaactctagcccagctgggaccccaagtccacagccctccagggcmaatgggaacatcaacctggggccttcagcaacccaaatgcccagcccacggacttcgacttcctcaaagtcatcggcaaagggaactacgggaaggtcctactggccaagcgcaagtctgatggggcgttctatgcagtgaaggtactacagaaaaaagtccatcttaaagaagaaagaagcagaacmccatcatggcagaacgcaatgttgcttctgaaaaaantgcgggaccccttcctccttngggctgcgctactccttccaaaaacctgaaaaatcttcttcctgctc

SEQ ID NO: 248 - DNA, 429 bp, Homo sapiens
  SITE (343): n equals a,t,g, or c
  SITE (390): n equals a,t,g, or c
  SITE (424): n equals a,t,g, or c
gatcgtgaagctctttgaggtgattgagactgagaagacgctgtacctggtgatggagtacgcaagtgctggagaagtgtttgactacctcgtgtcgcatggccgcatgaaggagaaggaagctcgagccaagttccgacagattgtttcggctgtgcactattgtcaccagaaaaatattgtacacagggacctgaaggctgagaacctcttgctggatgccgaggccaacatcaagattgctgactttggcttcagcaacgagttcacgctgggatcgaagctggacacgttctgcgggagccccccatatgccgcccggactgtttcagggcaagaagtnccacggccggaagtggacattggacctgggaatcatctgtcaccctngtcagcggttcctgccttcacggcacaacctaangactg

SEQ ID NO: 249 - DNA, 1493 bp, Homo sapiens
ctaagctgactcagatttttggcagaattcagttccttgtggttgcaactgaggtcccaatttttttttcctgcttgctgacaactggaaggtaggtctcatctcctagaggccacctttaggttttagccaatgtggccctctcacatacttcttcaaggcttacaaggagaattcttcttgcaagggttcacttgattaggtcaggccmtttcaacagtctcaaagtgagttgtttaggaaccttaactgcatctgccaaattccttcaactttgtcatgtaacataatctaataatggacatatcattatggcagtatcatcaagggatattttatttgtggttaaatgattgctgtgaacacaatctataaatatatgactaataggattttgtaactggctctataaactttaaattttgtatcattttacaatttacaaagtgcttgtatatattttgcatcatttgattttcatgactacctgtcagagaagcacagcagatattagcccaatgttattagtggctcacagcagctaagtgtatgtccaaagctttacagcaaattagtagtggagtcagctgggcttcagatcagagtgtttccaccctacatacagcccaggctctttttgctaaccctgtaattttcaaactgtgtttggtgatgcttgaaggagatttctcagggattactgtaagaactgggggtgatactaatgggtagggctaagtgttgatatggtggctctatttttatattttggaagttcaacccatgctttaataaccactgtcctgcaacagcctatgccttgttaaaggtaaagaagaatatttaggaaaaaaatcagttaaaaaaatggttgagataggtgtatataaaaagtcaagagtcttttccaataaagttttaagaagctgtcatctcttgcagcagctgttgaaccttcttaatgtctggtctcttatttttcttttcatgcagacattgactagcaacagagtacatagcttcaactgaagtggaatcagcatcattcatctttttatcaatataatcttcaattgtcttttcttcatcttcaatttcttctttaatatctagcaataactgaggttcacggtgttcatccacagctggaagtccagttattatttctagtaaaaccacaccaaagctgtaaatatcagatttgggtgttatttctccacgcaaagcttctggtgccatataagctgttgttcccacaattctgctagtcatgactgtctgggcaaacttctcagaagcccgtgcaaggccaaagtcagatattttagcagtaaaagcttcatccagtaagatatttgcacttttaatatctctatgaatatgatgattttcatgtagaaaattgatgccattagctgcaccctgagcaatcttgcatctcatgtgccaagaaagtggtggagtaccatccaagcaagagagtctgtctagcc

SEQ ID NO: 250 - DNA, 698 bp, Homo sapiens
  SITE (616): n equals a,t,g, or c
tggagctcgcgcgcctgcaggtcgacactagtggatccaaagaattcggcacgaggaggtcgttgccgagaccgataacggtgtcgatgccttgcaacttgcgcgcgagcatatgccggacattgtcatactggatattggaattcccaaactcgatggcctggaagttatatgccggctgtcatcaaccaaacaggcacatcccttcaaggtgctggtgctgacgtcccaggcgcccgggcatttctcgatgcggtgcatgcaggcgggtgctgccggctacgtgtgcaagcaacaggatctcaccgagctgttgagcgcggtcaaggcggtgctgtgcgggtacagctacttccccaaccaggcgttgaactcggtgcgctccacaatgggtaacgccagcgaagcggacatggtcgagcgcctgtccggccgggagatgatggtgttgcagcagttggcccgcggcaagaccaacaaggagatcgccgatggcatgttcctgagcaacaagactgtgagcacctacaagacccgcttgctgctcaagctcaacgcccgctcgctggtggacttgatcgagctggcccagcgtaacggcctggtgtaggccggnctacatttacatycagkcagaaaaaagcctccgcaagggaggctctkgtttatcgttggatcgattagaggatcgaagtcgg

SEQ ID NO: 251 - DNA, 997 bp, Homo sapiens
  SITE (67): n equals a,t,g, or c
  SITE (995): n equals a,t,g, or c
gaatttgccaaaaaacctggagctccaccgcggtggcggccgctctagaactattggatcttccggnctgcaggagtcggcagcgcgctgcaaatgctggaaccgggtttatcgtcgcccatcaatctttctctgccagaaccgctgaccttaatccacgttgacgggccactctttgaacgggtgctgattaatctgctggagaacgcggtgaaatatgcgggtgcgcaggccgaaattggtatcgatgcccacgttgagggcgaaaatctacaactggatgtctgggataacggccccggtcttccgccaggccaggagcagacgatatttgataagtttgctcgcgggaataaagagtcggcagtaccgggggtagggcttggactggcaatttgtcgggcgatagtggatgtacacgggggcactattaccgcgttcaaccgaccggaaggtggtgcctgttttcgtgttacacttccccagcaaactgcccctgaacttgaagaatttcatgaggatatgtgacaaacgttctgattgttgaagatgaacaggctattcgtcgctttctcgcacggcgctggagggcgacgggatgcgcgtctttgaggccgaaacgctgcaacgcggcttgctggaagcggcaacccgtaagccagatttgattattctcgatctcggcctgcccgatggtgatgggattgagtttatccgcgacctgcgccagtggagcgcggtgccggtgattgtgctttccgcacgcagcgaagagagcgacaaaatcgccgcgctggatgccggagcggatgattatctgagtaagccgtttggcattggcgaattgcaggcccgtctgcgcgtcgcattacgccgccactctgccaccaccgcgcccgatccgctggtaaaattttccgatgttaccgtcgatttagccgcccgcgtgattcaccggggtgaggaagaggtgcatctccacaccaattgagttncg

SEQ ID NO: 252 - DNA, 820 bp, Homo sapiens
ggcacgagtccaaacaaagaggctgcagcaggttcaagtgaccttgatccttcgatgatattggacactggagagatcattgatacaggatctgattatgaagatcagggtgatgaccagttaaatgtatttggagaggacactatgggaggtttcatggaagatttgagaaagtgtaaaattattttcataattggtggtcctggctctggcaaaggcacacagtgtgaaaagctggtggaaaaatatggatttacacatctctcaactggcgagctcctgcgtgaggaactggcatcagaatctgaaagaagcaaattgatcagagacattatggaacgtggagacctggtgccctcaggcatcgttttggagctcctgaaggaggccatggtggccagcctcggggacaccaggggcttcctgattgacggctatcctcgggaggtgaagcaaggggaagagttcggacgcaggattggagacccacagttggtgatctgtatggactgctcggcagacaccatgaccaaccgccttctccaaaggagccggagcagcctgcctgtggacgacaccaccaagaccatcgccaagcgcctagaagcctactaccgagcgtccatccccgtgatcgcctactacgagacaaaaacacagctacacaagataaatgcagagggaacaccagaggacgtttttcttcaactctgcacagctattgactctattttctgaaggcaaaaatgcatgtttgttagaatggaaacagaaaaacattaaaaagttcattccttaacacaaaaaaaaaaaaaaaaaa

SEQ ID NO: 253 - DNA, 1442 bp, Homo sapiens
gctctgagtgtggcctgcatgatacaaagtgtggtgccgtgagtgcagacagttgtctgaagtgtggagaataggttgatatagtcccaaatacaccatgcatgatttccagacacctctcacacaggtctagctgggaagcaaacagtgctgtcaggatttagraggtggtggttggtgggggcggtgacacaaaaggtttaacttgaaacattgtgttaaggaatgaactttttaatgtttttctgtttccattctaacaaacatgcatttttgccttcagaaaataatagagtcaatagctgtgcagagttgaagaaaaacgtcctctggtgttccctctgcatttatcttgtgtagctgtgtttttgtctcgtagtaggcgatcacggggatggacgctcggtagtaggcttctaggcgcttggcgatggtcttggtggtgtcgtccacaggcaggctgctccggctcctttggagaaggcggttggtcatggtgtctgccgagcagtccatacagatcaccaactgtgggtctccaatcctgcgtccgaactcttccccttgcttcacctcccgaggatagccgtcaatcaggaagcccctggtgtccccgaggctggccaccatggcctccttcaggagctccaaaacgatgcctgagggcaccaggtctccacgttccataatgtctctgatcaatttgcttctttcagattctgatgccagttcctcacgcaggagctcgccagttgagagatgtgtaaatccatatttttccaccagcttttcacactgtgtgcctttgccagagccaggaccaccaattatgaaaataattttacactttctcaaatcttccatgaaacctcccatagtgtcctctccaaatacatttaactggtcatcaccctgatcttcataatcagatcctgtatcaatgatctctccagtgtccaatatcatcgaaggatcaaggtcacttgaacctgctgcagcctctttgtttggaaataacttgttgtcaactgccatgctgatgtcatagaacacctcatcctcatcgcggtcggcatcaaatgtcatgatgagccccttttcctggaagtatttaaccaatggagcagcattctgcttgaagttcattagtctcctttgggtagcttttacattgtcgtctggtcggccctgctgttctgcacgcttcagtaatctttctttgagtctctgattagcacaagccaggaataccaccaaatcgggggtacagatttggtcctcaaaagatagagcctgggcaacatctcttggaaatccatcaataacaatgccctcttcatcaggtatttgcatcaatttttgttttatctctgtaattgttgtttcctgtggggccaattctccagttgtaattatcttggcaataagactccatttcctac

SEQ ID NO: 254 - DNA, 2238 bp, Homo sapiens
  SITE (2231): n equals a,t,g, or c
gaaggtattctgcaggtaccggtccggaattcccgggtcgacccacgcgtccgcccacgcgtccggacccacgcgtccgctataacattgaattcaaccctcccaaaactgtgggcatwgatgacctgactggggagcctcwcattcagcgtgaggatgataaaccagagacggttatcaagagactaaaggcttatgaagaccaaacaaagccagtcctggaatattaccagaaaaaaggggtgctggaaacattctccggaacagaaaccaacaagatttggccctatgtatatgctttcctacaaactaaagttccacaaagaagccagaaagcttcagttactccatgaggagaaatgtgtgtaactattaatagtaagatgggcaaacctcctagtccttgcatttagaagctgcttttcctaagacttctagtatgtatgaattctttgaaaattatattacttttatttctactgattttattttggatactaaggatgtgccaaatgattcggatactaagatgcatcgtttgaaatcatctagtgtgttgtatgcagttatcctcaaaaacatcagcgatgtctgaacctttaaaacatctgttagagcaaaattaaaagagcatttggtagtaatctaactttttgttcagttaataagtggttgataaagtttccatatttttctggaaaagttaaaaaaagttacatgtcatttggagaaaatacgtaatcagaaatttgtgcatagattgatgccaaaaaagacatttccagcattgtggaacatggtgagacactatataaaattccagaaagaaagcaactggatttacagatttattgtgagacacaaattcactgctgcctttacactaagaaatgtatatgttaaccatatatgctgtatttattttgtcgttaagcatactttcagtttactcagaattttcaatttgctataaagatgtatcaattagcatatagaaaaatattactttaagatgacttgtttcctttgaaaatacctgtgtactgagggttatgatttgtgtcaaaaattgacataagtgcttttacaagcaccaaagttgaatgaattttcaacaaaatgtaattaaagtctatgttttcagttatgactcaggttaagaaatgtgttttaggatctacttgctggtttttctttttgatccaaatgtgtgatctgccctgataaataacaagttatagtaccatctcccccgccaataaaaaagagaagaaaaaagagaaacccgtggcactatgtaaataaagtaagcatactttgttgttagtaaatagatgaggcatgcctgggaaatgctcccttggcataaatagcaatcaattataattagtaaacaggtgtaccaataaaaagaatttacatgataggttaacaaggaccaggaaagtgagtttcctgaaggagttctttgttcctgatcaaagaaattgatacctgttagcattcactgccaccatattttaaggagaaagaactctattggtgtcgtctgagcagccatttaaaaattggaatctaaaggatggttgctgatgtactgtgtggtctggtagaagtggggaaatatgagagatggaggaaaaacttgattatgtcttccatggcatatttactcttactttacttcgtgccaaatcaaatgaaacaagccgtcttacaagtcgttattgcctttaaaaatctgttccgtttttttcccaggtacttaaaatacaagtgccagtaagtggttcttatgtgttttggggggaaaattttatttcccttttcttctgatatttaaaaaattcatcgatctttcaagatgaaccaaggttttttaaaagaawtataggaaacacttcattctttataaaactttctataatgccttatttgaatgttaatcttatgtgctttctaaaaaatgttgtgaaataccaaacttatggattatcactaggttatcaagcatatattagtctttatcagaataaaatgaaatttcataactgtggctattactttgttcttggtccttcacagggcctgctccatcccaccttcctttctgctgcctgatgtctcaatggcttctgaatgactgttctaataaatgatcttaaaacagaaaaaaaaaaaaaaaaaaaaaaaaaaaaaaaaaaaaaaaaaaaaaaaaaaaaaaaaaaaanaaagaga

SEQ ID NO: 255 - DNA, 509 bp, Homo sapiens
gcaaagagggggccgtggaaaatgtgagaagaaatgaattcaaccaacagtgagccccagggtgtttttcctgaatgtgccatttgattccatcatggagcggctgactctgagaagaattgatccagtcactggggaaaggtaccacctcatgtacaagccacctcccaccatggagatccaggctcgcctcctgcagaacccaaaggatgctgaagagcaggtcaagctgaaaatggacctgttctacaggaactcagctgacttggagcagttgtatgggtcggccatcaccctcaatggggaccaggacccatacacagtcttcgaatacatcgagagtgggatcattaatcccctgcccaagaaaatcccctgatgggttcagagccaggagcgctgccccagggaaagagttaatcccctgcccccagccccccagcctcggcacagctcccctaaaaagccaataaagcctgctggatacagaaaaaaaaaaaaaaaaaaaa

SEQ ID NO: 256 - DNA, 453 bp, Homo sapiens
  SITE (434): n equals a,t,g, or c
  SITE (442): n equals a,t,g, or c
  SITE (452): n equals a,t,g, or c
attgatggatttccaagagaatgttgcccaggctctatcttttgaggaccaaatctgtacccccgatttggtggtattcctggcttgtsctaatcagagactcaaagaaagattactgaagcgtgcagaacagcagggccgaccagacgacaatgtaaaagctacccaaaggagactaatgaacttcaagcagaatgctgctccattggttaaatacttccaggaaaaggggctcatcatgacatttgatgccgaccgcgatgaggatgaggtgttctatgacatcagcatggcagttgacaacaagttatttccaaacaaagaggctgcagcaggttcaagtggaccttgatccttcgatgatattgggacactggagagatccttgatacaggatctgattatgaagatccagggtgattgacccatttaangttttttngggagagggnc

SEQ ID NO: 257 - DNA, 1223 bp, Homo sapiens
  SITE (78): n equals a,t,g, or c
  SITE (307): n equals a,t,g, or c
  SITE (1163): n equals a,t,g, or c
  SITE (1181): n equals a,t,g, or c
  SITE (1191): n equals a,t,g, or c
  SITE (1193): n equals a,t,g, or c
  SITE (1203): n equals a,t,g, or c
  SITE (1218): n equals a,t,g, or c
gctacatggacgccactatcgccccgcaccgtatcccccccgagagccccagtacgggaggagaaccacatcttcggnttgatgcaggtattaaccacctgggtgtctgccctgcacccacagaacatgctggagcaactcctgatccaccagcccgaagatcccatccccttcatgatccagcacttgcatagagacaacgacaatgtgcccaggattgtaatattaggtccacccgcctcagggaaaacaacaatagcaatgtggctctgcaaacatctgaaacagcagtctcctcaccctggangaacctgatcttaaatgagttttcctatacggccaccgaagccagaaaggctttatctgcaaaggaagacagttcccagcgcgctgctcgtccagctgattcaggaacgcctggctgaagaggattgcatcaagcagggctggattctggatggcatccctgagacgcgtgacaggctctgaggatccagaccctggggatcacacccagacacgtcattgtgctgagtgctccagacacggtcctgatcgagagaaacttggggaagagaatcgaccctcaaactggagagatttatcacaccacctttgactggccacccgaatctgaaatccagaaccgtctcatggtgccagaggacatctcagagctggagacggctcagaaactgctggagtatcataggaacatcgtcagggtcattccctcctaccccaaaatcctcaaagtcatcagtgctgaccagccatgtgtggacgtcttctaccaggctctgacctatgtccaaagcaaccatcgtactaatgccccgttcaccccgagggtgctgctgctcgggcctgtgggcagtgggaaaagtctgcaggccgccctcctggcccagaaatacaggcttgtcaatgtctgctgtgggcaactgctgaaagaggctgtggcagataggaccacgtttggcgagctcatccagcccttctttgaaaaggagatggcagttcctgacagcctcctcatgaaggtgctgagccagcgcctggaccagcaggactgcatccagaaaggctgggtgctacacggcgtcccgcgggacctcgaccaggcacacctgctgaaccggctgggctacaattcccaacanggtggttttcctgaatgngccatttgantncatcatggancgggttgacttttanaaaaa

SEQ ID NO: 258 - DNA, 852 bp, Homo sapiens
ggcacgagtgaggataaggatacattgtgaaaaaggtgggaaaatcacttgaacacaggaggcagagattgcagtgagccaagagtgccccactgcactccagcctaggcaacagagaaagactctgtctgaaagaaaaaaaaaaagttgttgctatatagcacataatttcattgtcatctcatttaaaattgaatagcacatttgggttgaattcttgtgcctgcagatacatttgcttctggcttaaaatcactggctgtaggaggaaactccagcagagggcatcgtaaggatttcatagtgtctatggtcatcttggtaattcctcagataattcctggcaattctattaggtcttgaacttcacttacttcttacatgtttaataaaaagaagttcaaaacattgccatggctgttgaattcccacaggcttgtcttccctttaaaattcatcacatggtttgtactcttttgcagatataatacgtaagtttgcaggtggatgctttcagccaataagttcaaaagtactgctacaagggccaggcatggtggctcacaccagtaatcccaaccctttgggaggccaaagcaggtggatcacggtatcaggaaactgagaccatcctagccaacatggtgaaaccccatctgtactaaaaatacaaaaattagctgagtgtggtagtgtgtgcctgtcgtcccagctactcaggaggccgaggcaggaggattgcttgaacccgggaggcagaggttgcagtgagctgagattgcgccattgcagcacagcctggttacagagtgagattccgtcccccaccgccaaaaaaaaaaaaaaaaaaaa

SEQ ID NO: 259 - DNA, 771 bp, Homo sapiens
cgcttgccgttttttccagttggtgtgctttctttgcaactgatacagactaggaaaagaacgcaatttaccagtaacagtagagctgggatttaaatctaagtgctttgacttcaaagacaaggttccaagctgctacacataccaattctcgttaaagtgtattccatttcttttgtgctttcatattgaccattgtgtgttaatcctttcaattggaagaagagggagacagtgccagttattgcaaactttcacagtccacaggcccgatatgtagccttcaccacccacaggttctgccayttytggggcattatattccatcaagatccaggcacccgccatccacataccagccctggaactcrtcccttctcccagacttggaaacgccacctctscctgaccaatgtcgagccacttcctcatcttgatacatcagccactatcctttccatctttcaggcaactccagcttaatttctcgatggccttgcccttctaaaaggccgtttcttttcccagatgactttttcctatcccctccacagtaactcccctcatccttccagtctcaattcaattgttccttggtggggtggggcggggggagccttcttaaaccctcctccctcacaactgcatgaggtcccttgtctctaatataagctcctgtagcaccatggcacttatcccagttgagattttaaatatatttctgtgtatttgattaaagtttctctcctccaaaaaaaaaaaaaaaaaaaa

SEQ ID NO: 260 - DNA, 561 bp, Homo sapiens
  SITE (542): n equals a,t,g, or c
  SITE (549): n equals a,t,g, or c
ggaggtggggaggtacagctgggagtgtgggggatggggaaggatggggagggaacggkcccgwggacaacttgcatttgccctgacacccaccctccctgcagctctacaccctcaccgtgatcggcccaggaccgccagattgccagccagcccagatctctcgccgttactcggactttgagcggctgcaccgaaacctgcagcggcaattccggrgcccaatggctgccatctccttcccccgtaagcggctgcgccggaattttactgcagagaccattgcccgccgtagccgggcctttgagcagtttttgggtcacctgcaggcagtgcctgagctgcgccatgccccggacctgcaggacttcttcgtgctgccggagctgcggcgggcacagagcctcacctgtactggcctctatcgtgaggctctggcactctgggccaatgcctggcagctgcaagcccagctgggcaccccctctggcccagaccgccccctgctgaccctggctgggctggccgtgtgccaccagganctggaanaaccttgaaaag

SEQ ID NO: 261 - DNA, 2051 bp, Homo sapiens
tgtctcaaaaaaaaaagagaaaaaagatttcaagtaaatagtagaaatttgcataaattgttccagtgcatactttgttaagcaaaattatttaaagaaaatggtaaattatatatgtaaaagcttaccctaaattttattagaaatattttaaaaattaaaaagatacttttgaattcttaagacatgggttttagtaaaataaagtataaaaagtttgtgtcagtagatcagaatgtaattgagagaaataaacatttggagctctaggtgaggattgtaattatagccccaccatgtgtttgcgcacagctttaaacctcctcgtttgtgtgaacatcgtgcccagtgtaggcagaatctgagactttgtgaattgtatgactgrtcaccattttatgctttaacctggctgcctctcagtagttatcataaagcaagtatttagaaaatctatgagagtttttctcattgaggtatggtttcagaaaaccgttataaatattaaaaatctaaaacactgaaagcttttttaaatgctgtgttaaacacttcaaaatatccgatgatgtttttctcttatagtttactataggtgtgaataaatttaatccactataaattagatttgatagcttgtccttttacattgtctggccgatggactaaatcagaagtagattgagaacatgaacctcccaggttaaatagttggtgtaaactggattttctgacttgctaacttaagtgaaataagagggcttcaatgacataaagaagtaaataatacatcttccaacatactcagagaaaatgaggttcacctaataggatccatctcacatatttaaccagatcaacctgctcatgtagaggcagcgatgtggagacccgcccaatttctaagcggtgtattgacgttcttctggtgcacgctgtattctagttgagttgttgttaatacttttctcctggttttctggaagagaagagcatgtgttctagtgctgacggcgcggccttcacgtccgcttctccccaagtggtggcagtacctggccataggaaggtggcttctagcagcctgcacctttaaaattgatgctgatgtcttacctcgatctttgtttattgctgttttttctaggcttcaaagtgtgctgaattctatgaaaattacaatgagcagtctaacctttgtaacactttagtacttactggcacatttcactgttaccatttgaaacaatgttaccttctgaaagtcattttaaatgtatttggaaaatacgagacttttttcaagccattggaaaccttaaagtttaattttgagaaggccctaaatggtattcaaatatattctgctttgggttctacattgtcagataatagtattatggctaatgagatacttaagtgaaaccagaataaaaccaaaagggaggagaattaacatgattgagcatctcctgttacaaacaactccacttgatgtgaatatcttttcaagcaattctgtgaaatcattatccccattctacaaataagaaaaccagggcttaaaacagccagatgttggtgcctggaatcacattgcttgtgagctgagagtcacgggtccaatctggttatgatgtttctgcttattccacactgaaacctacacatcacctatccacctaaaaacaaatgcattcagaatttgtgtcaggtgtttttatgaaaggagtcactttataagaaaaaaggccaggcatagtggcccatacctgtgacatcagcactttgggaggccaaagtatcactttggatcacttgagcccaagaattcacgaccagcctgggcaacaaagagagaccctgtctctaccaaaaaaataaaaataaaatttttttttaaagccacaggtggtgcatgcctagggtaccagctactcaggagggtgaggtgggaggatcactttggcccagggggttaaggctacaaaactacaaaaacctgggtgacaaagcaagagacctgtctcaaaaaaaaaaaaaaaaaaaaa

SEQ ID NO: 262 - DNA, 807 bp, Homo sapiens
gcatattatttgccactaagaaaaaatgagctattgagccatgaaaagacaggagaaaccataaatgcatgttagtaagtgagagaagccgatctaaaaggctgcagagtgtatgattccaaagatacaacattctggaaaaggcaaamctttggagaaaataaaaggatcaatggttsccaggggtttttggggaggaacagatgaataagtggagcataggggatttttagggcagtgaaattagtctgtttgctactgtaatagtagatacatgccatacacttgtccacacccatagaatgtacagcacccagagtgaacccacacatgaactgtggacttcgggtgataatgatgtgtccatgtaggttcctcatttgtgacaagtgtaccactctggtgggggctgttgatagggaggggggctgtgcatgtgtgaggaaggggatatatggaaattctctgtagcttttgctcagttttgctgtgaacctaaaactgctcaaaaaaaaaaaaaagtaaattcattgaaaaaatactggaaggaaataggccaaaatgataaatatcattttttaaaaataattcccactgaagtctgktggcctattgactattaatgatctttcaaaaatccactgtgctcccccacctcctttggtgtccccgaaggagaggccctgggcacacaaacaccttcttctggggccactccatgcccagggttccaagggccacatttctctgtgcgtaggggtgggcttggccttcatctcctagctgcaggcaagaaggagctatgct

SEQ ID NO: 263 - DNA, 460 bp, Homo sapiens
  SITE (13): n equals a,t,g, or c
  SITE (16): n equals a,t,g, or c
  SITE (368): n equals a,t,g, or c
  SITE (435): n equals a,t,g, or c
cgggtcgacccanttngttcgcccacgcgtccgaacatatacaatataattatttaattgacccctttgaaagtcagttgcagattcgtgaccctgtgttcctagaaacttgtatctcctaggaacaaggtcctttgtcttacatagtctgtcgttcatgacgttgacatttttgaggagagcttacttgctggttatttggtagagtgtccttcagtttgggatgtctgtttcctgaggtttagattcagataagactaacacatattcctttcagtgcgtcacattagtaagcacattatgtcagtttttcctcctgttggtaactgattctgatcacatggttaaggtcgtggctgcaaaggkknccatggtagttaccattttctctttggtaaactgataactaattgtccgggattaattaatcctggntggtaataaactttcactggggcag

SEQ ID NO: 264 - DNA, 3257 bp, Homo sapiens
gggtcgacccacgcgtccgcactaatggcaactcaaagctgctgagctctgccctgacggcatgcgcccccgcttctgtgagagcacgcttcctggcatgggggtcgaatcatgtcgataaaatgggctcggtttcatgaagtaccccacataacagtgagattcataggaccaaagcatggggaggaaaaggaaaaagaaaaagataagattaaggagaaggagaaagattctaaagacaaggagaaagataagaagactgtcaacgggcacactttcagttccattcctgttgtgggtcccatcagctgtagccagtgtatgaagcccttcaccaacaaagatgcctatacttgtgcaaattgcagtgcttttgtccacaaaggctgccgagaaagtctagcctcctgtgcaaaggtcaaaatgaagcagcccaaagggagccttcaggcacatgacacatcatcactgcccacggtcattatgagaaacaagccctcacagcccaaggagcgtcctcggtccgcagtcctcctggtggatgaaaccgctaccaccccaatatttgccaatagacgatcccagcagagtgtctcgctctccaaaagtgtctccatacagaacattactggagttggcaatgatgagaacatgtcaaacacctggaattttttgtttcattcaacagactcactaaataaaatcagcagggtcaatgagtcaacagaatcacttactgatgagggtacagacatgaatgaaggacaactactgggagactttgagattgagcccaaacagctggaagcagagtcttggagtcggataatagacagcaagtttctaaaacagcaaaagaaagatgtggtcaaacggcaagaagtaatatatgagttgatgcagacagagtttcatcatgcccgcactctcaagatcatgagtggtgtgtacagccaggggatgatggcggatctgctttttgagcagcagatggtagaaaagctgttcccctgtttggatgagctgatcagtatccatagccaattcttccagaggattctggagcggaagaaggagtctctggtggataaaagtgaaaagaactttctcatcaagaggataggggatgtgcttgtaaatcagttttcaggtgagaatgcagaacgtttaaagaagacatatggcaagttttgtgggcaacataaccagtctgtaaactacttcaaagacctttatgccaaggataagcgttttcaagcctttgtaaagaagaagatgagcagttcagttgttagaaggcttggaattccagagtgcatattgcttgtaactcagcggattaccaagtacccagttttattccaaagaatattgcagtgtaccaaagacaatgaagtggagcaggaagatctagcacagtccttgagcctggtgaaggatgtgattggagctgtagacagcaaagtggcaagttatgaaaagaaagtgcgtctcaatgagatttatacaaagacagatagcaagtcaatcatgaggatgaagagtggtcagatgtttgccaaggaagatttgaaacggaagaagcttgtacgtgatgggagtgtgtttctgaagaatgcagcaggaaggttgaaagaggttcaagcagttcttctcactgacattttagttttccttcaagaaaaagaccagaagtacatctttgcatcattggaccagaagtcaacagtgatctctttaaagaagctgattgtgagagaagtggcacatgaggagaaaggtttattcctgatcagcatggggatgacagatccagagatggtagaagtccatgccagctccaaagaggaacgaaacagctggattcagatcattcaggacacaatcaacaccctgaacagagatgaagatgaaggaattcctagtgagaatgaggaagaaaagaaaatgttggacaccagagcccgagaattaaaagaacaacttcaccagaaggaccaaaaaatcctactcttgttggaagagaaggagatgattttccgggacatggctgagtgcagcacccctctcccagaggattgctccccaacacatagccctagagttctcttccgctccaacacagaagaggctctcaaaggaggacctttaatgaaaagtgcaataaatgaggtggagatccttcagggtttggtgagtggaaatctgggaggcacacttgggccgactgtcagcagccccattgagcaagatgtggtcagtcccgtttccctgccccggagagcagagacctttggaggatttgacagccatcagatgaatgcttcaaaaggaggcgagaaggaagagggagatgatggccaagatcttaggagaacggaatcagatagtggcctaaaaaagggtggaaatgctaacctggtatttatgcttaaaagaaacagtgagcaggttgtccagagcgttgttcatctctacgagctcctcagcgctctgcagggtgtggtgctgcagcaggacagctacattgaggaccagaaactggtgctgagcgagagggcgctcactcgcagcttgtcccgcccgagctccctcattgagcaggagaagcagcgcagcctggagaagcagcgccaggacctggccaacctgcagaagcagcaggcccagtacctcgaggagaagcgcaggcgcgagcgtgagtggaagctcgtgagagggagctgcgggagcggaaggccctcctggcccagcgcgaggaggaggtgcagcaggggcagcaggacctggaaaaggagcgggaggagctccagcagaagaagggcacataccagtatgacctggagcgactgcgtgctgcccagaaacagcttgagagggaacaggagcagctgcgccgggaggcagagcggctcagccagcggcagacagaacgggacctgtgtcaggtttcccatccacataccaagctgatgaggatcccatcgttcttccccagtcctgaggagcccccctcgccatctgcaccttccatagccaaatcagggtcattggactcagaactttcagtgtccccaaaaaggaacagcatctctcggacacacaaagataaggggccttttcacatactgagttcaaccagccagacaaacaaaggaccagaagggcagagccaggcccctgcgtccacctctgcctctacccgcctgtttgggttaacaaagccaaaggaaaagaaggagaaaaaaaaaaaaaaa

SEQ ID NO: 265 - DNA, 2398 bp, Homo sapiens
gttctagatcgcgggcggccgctcgcgatctaggcagcttcaacgtgagtaattgtggcgcggcccgaggctgccgggagccccccagaagaaggcgggtgcactgagggcacacctgccaaggaccacagggccgggcgaggacaccaggttcacaagtcatggccgctctcgatctcagactcggacagtgggctggaccccggccctggcgcaggggactttaagaagttcgagcggacgtcatccagtggtaccatgtcgtccacggaggagctggtggacccagacggtggagccggggcttcagcctttgagcaggctgacctcaacggcatgacccccgagctgccggtggccgtgcccagtggaccgttccgccacgaggggctgtccaaggcggcccgtactcaccggctccggaagctccgcacgcccgccaagtgccgcgagtgcaacagctacgtctacttccagggtgctgagtgtgaagagtgctgcctggcctgccacaagaaatgtctggagacgctggccatacagtgcgggcacaagaagctgcagggccgcctgcagctgttcggccaggacttcagccacgcggcccgcagcgcccccgacggcgtgcccttcatcgtcaagaagtgcgtctgcgagatcgagcggcgggcgctgcgcaccaagggcatctaccgggtcaatggggtaaagacacgcgtggagaagctgtgccaggccttcgagaacggcaaggagctggtcgagctgtcgcaggcctcgccccacgacatcagcaacgtcctcaagctctacctgcgtcagcttcccgagccgctcatctccttccgcctctaccacgagctcgtagggctggccaaggacagcctgaaggcagaggccgaggccaaggcggcgtcccggggccggcaggacggctcggagagcgaggcagtggcggtggccctggcaggtcggctgcgggagctcctgcgggacctgccgcctgagaaccgggcctcgctgcagtacctgctgcgtcacctacgcaggatcgtggaggtggagcaggacaacaagatgacccccgggaacctgggcatcgtgttcgggcccacgctgcttcggccacggcccaccgaggccaccgtgtccctctcctccctggtggattatccccatcaggcccgcgtcatcgagactctcatcgtccactacggcctggtcttcgaggaggagccggaggagacccccgggggccaggacgagtcatccaaccagcgagctgaggtagtcgtccaggtgccgtacctggaggcgggcgaggcggtggtctacccgctgcaggaggcggcggcggacgggtgcagagaatcccgagttgtgtccaacgattcggactcggacctagaggaggcctccgagctgctgtcctcatcggaggccagtgccctgggccacctcagcttcctggagcagcagcagagcgaggccagcctagaggtggcttctggcagccacagcggcagtgaggagcagctggaggccacagcccgggaggacggggacggggacgaggacggcccggcccagcagctctcaggattcaacaccaaccagtccaacaacgtgctgcaggccccactgccccccatgaggctccgtggcgggcggatgacrctgggctcctgcagggaaaggcagccggaattcgtgtgagctggggtggggctgggaccacaggtggcttctctctygcctgctcctgtccctccagcacgtcccctgcaccacggcatagcttaggtgcgccgtcctggggtcgctgccgagagcgcctggacttcgacgtcccaccagcgggcgcctcctcccagaggcttccaggagcacgagggccttgcggcacaggactgtgccctgtrctgtcccctgcaccccggctcagctgagctggggaacactgctgtcgtgtgaagtcacagtggccttgttggtgcccacagggctgtgtggatggaggaagctgtccctgcccagtgcatcccccaggtcatcacggggamgcaggaggcaggccctgccctgccctctcctcacaggtctgttgcagggactccagaaaccattctgggagccgtggatgggggcggagctggggtttggtgcagtttccagggtgcagtacagcagggcctgaatactggccctggactcccttttccagaacaccaggtgtggccacctggggctcaggtacacagtggggtctctcggaagccaccgtgtggttctttcacaggcacgtttattttgctgaaataaaaagtttttaatcgggaaaaaaaaaaaaaaaaagggcggccccacgcgtccgcggacgcgtgggcggacgcgtggg

SEQ ID NO: 266 - DNA, 3276 bp, Homo sapiens
gagtttggagaaggtaaccaggatcagggatttagggtgagccattctggcttttcttgtcatatccactttgagtgagaaagagccagtttatcactgttcttagttttgaagcagagagtgatcaacttacctgcttgctgaaatttaaaactttgcaaagaggagatgtgcagagagatgattgctagtgttgtgaaataagggaagtttacttgtgatgctttgacacattctgtctctttcttgaggattcttctcccccatcttgtttattagagccctttggtctttagtctctgtcaaaacacaacttctggacagaatatgaaatcaatcagtaatattgcagcataaattttagttacctcttccaagaggtggtttcatttgaggcctcatttgttaccattgaaatcaatgaaggtgactccccatgtcagagaaattccagatactaataagtagtccaggggagttttttggggagatgagggtgaccggggtgtgggggatctttccaaatctgaaattgttccataggttgcctattacataattgatagttaaataacttgaaaatactgatgctctctaaaatgatttaaaaaattctgtttggcataggtgtggtacatgtggctttgctcactcatgtggatagcatggatttgattacaaaaggtgaccttatagaaatagagagatgtgagcctgtgaggtccaaggtaatgaatgatgcccttcgtaaacacattttctggggtatgttactacaatcacatactagtgtgtataaaaataaaaacaagcagctactgggtttaagaagaattacaaaattacttaaatagggcccgtttcccaagatttaaaaattaaatacagttgttccttggtatttgcaggggattagttccaggactttgcattgttaccaaaatctgtggatgcttaatggcatagtatttgtatttgcatataacctatgcacatcctttggtatactttaaataatatctagattacttataatacctaacccaaattaaatgctttgtaaatagttgttctactctatttttcattattaatgacaagaaaataacctgtacatgttcagtacagatgaaatattttttcaaaatttatttttttgagatgaagtttctgttgcccaggctggagtgcagtggcatgatttcggctcactgcaacctccgcctcctggttcaagtgattctcctgcctctgtctctcagcagctgggattacaggcacgtgccaccatgcctggctaatcttttctgtatttttgtagagattaggtttcaccatgttggccaggctggtctcaaactcctgacctcaggtgatctgctcatctcggtcccccaaagttctgggattaaggcatgagtccctatacccagccattttttttcaattttttttgagccttagttgaactcacagatgcagaacccatggatacagaaggctaactgtctatctttacactgacatgggtaagttcatttattacaatttaattcaactagattcaattcaataaatgtttattgatattatctttaaggttgagccagtgtgttactctcttatcagctacacagatcatgaaaaaaattcccccgcactaaaaattttacaattttataaatagtggtgaggggatgggagtgtgggataagaaaaagttgacaagagattatgtacgattgagtgtgataaatataatgaaacaatgaaaaataaagtgctttaaaagtttagagaaggaaagtatagtgttaaaggggttcggggagatttcatcaatggaacggcacagggaaacggctttcaaggagaagaaatatttcacaaaatgaagagacaaaaagggccaacaaattcagcataagacaatatattaatggaggaaaagtcagcatgtttgggaaatgtggagttcaggttagtgaagggctggatctttgtaggcagagataaaatgggcaaggaacatttgcatgaagtaattttatttaattaggagcattatgaggaatcacagcaattttttgaaagagtaatgatatgatcaaagttaattaaagttatgatcttcagaaaaattaatctggcactgtgtacagaatagattggaatcaaaaggaacctggaggtgggaacaccagttgggagaatgcaatgatagcaagtatttgttgagcactaagtatgtgatagattttcttaatcagtccttataacaagcctatgaaatgggtactatcattactgcattttacaagtgaggaaacaaagaaaacagagtaaacatctgccaacgtttattgacagtgctgagcagtgacagataaatatttcgaacctaggcagtttgattctagaggtaaaatagtctaaacaagaattaaacgttaaactggtctaataaaatctacttatccagagaatgttttttaaaagaaacaggaaatatatggactgtaggataggtgtcataaaaattttgtttctaaatcatttagaatccactgcatgtattccaaattacaattatcagtgacattagaacttgatatgtgaagttcttcaagagtactttgtgagaccagatctccatttttttccaatgggaaattattgcaagttcctacatcttgatattgctttcataatttatactaacataaaataatatttttcactgttttgcaatgtctttttaatttctgtattgcagctagaggaagtccaaagaaaacttggatttgctctttctgacatctcggtggttagcaattattcctctgagtgggagctggaccctgtaaaggatgttctaattctttctgctctgagacgaatgctatgggctgcagatgacttcttagaggatttgccttttgagcaaatagggaatctaagggaggaaattatcaactgtgcacaaggaaaaaaatagatatgtgaaaggttcacgtaaatttcctcacatcacagaagattaaaattcagaaaggagaaaacacagaccaaagagaagtatctaagaccaaagggatgtgttttattaatgtctaggatgaagaaatgcatagaacattgtagtacttgtaaataactagaaataacatgatttagtcataattgtgaaaaataataataatttttcttggatttatgttctgtatctgtgaaaaaataaatttcttataaaactcgggaaaaaaaaaaaaaaaa

SEQ ID NO: 267 - DNA, 332 bp, Homo sapiens
  SITE (319): n equals a,t,g, or c
  SITE (323): n equals a,t,g, or c
gccttaatttacttaatttctcccttactgttcattcattcaacagtactttagtgcctaccatgtgccaggcactgttttatgaagtaggggtaccacagtggaaagacaaagtctgatcttaatagaacttatattcaagtgtgtgagatattttagatattattggatatttagtttgtttaaaatttttcggccaggtttggtgacttacgcctgtaatcccaacactttgggaggtcaaggcaggtggattgccagagctcagttcagaccagctacttgggggtttgaggtgggaggatcgcttgaccccagnaaancagggttta

SEQ ID NO: 268 - DNA, 290 bp, Homo sapiens
aaaagccagccaggtcaggcccgaggcggttttcagaagcggcaaacgtcgcccgaccattgcccggtgaaaggataagcggctgaaacggtgagtggtttcgcgtaccaccattgcatcaacatccagcgtggacacatctgwcggccataccacttcgcgcaacagatcgcccagcagtggggccgccagtgcagaaatccactgttcgtcacgaaatccttcgcttaattgccgcactttgatggtcagtcgaaaactatcatcggaggggctacggcggacatatc

SEQ ID NO: 269 - DNA, 1084 bp, Homo sapiens
agatgatggctatcctgaggacatggatcaagataagcatgatgacagtactgatgacagtgacaccgacaaatcagatggagaaagtgacggggatgaatttgtgcaccgtgataatggtgagagagacaacaatgaagaaaagaagtcaggtatgtgcagatgaaggattcatggtattgatcaataaagagaaaacaagctgaaggtcctaatttattaatgaatctgtgagagtactctgaaatctttggaagtcgggatcatagctgtgttcatcttatatattaaaattttgaaagtttttgacacagtaagtactcagtggatgtttatgaggaaaagcattaaactgtatgtaataaaaatgtctatgtaataaagttcactttggggtaaaaggtataactattcaacagcataaacgtattatgggtatgttacaggaaagaaaggagagtagccatattaagaaaaacattgatgttgtattttataaatctgtttaaatatctacctttgaagcccttttatggtatcttacatgaaccaggatcataattataacccaggtacactcatgagtggaatcatgaaacatattatatctataatgtgtgtgtttgattattaaaaaattcaaataggacatttgtcaagaaaattttaagcatcataatgggtactgacagtggaaaatgcacaccaattctgtcaaacctcagcaattttggagcttcttttgggattgtttatgtgcgcctacaacagaatatataatactatgtaatattaatattgataatgacaaatttttctcctgctgtgtcttaagaatcatggttgcaagaacaaaaaagctggttaaaaatgatagagctggtaatgaaagataattatagaggactattaggtaggaactaggactggaaagtagaaagccattagagccatggcagctccatttttttctgggtctgtgtggtctcttgccttcttttccttttattctgcctacagattttttttctttttttcctttttttttttttgagacaatctcactcttgtcgcccaggttgga

SEQ ID NO: 270 - DNA, 2683 bp, Homo sapiens
gtgctgctgcccgccgcctccgagctggctcatgtgaagcagctggcctgttccatcgtggaccagaagttccctgagtgtggcttctacggcctttacgacaagatcctgcttttcaaacatgaccccacgtcggccaacctcctgcagctggtgcgctcgtccggagacatccaggagggcgacctggtggaggtggtgctgtcggcctcggccaccttcgaggacttccagatccgcccgcacgccctcacggtgcactcctatcgggcgcctgccttctgtgatcactgcggggagatgctcttcggcctagtgcgccagggcctcaagtgcgatggctgcgggctgaactaccacaagcgctgtgccttcagcatccccaacaactgtagtggggcccgcaaacggcgcctgtcatccacgtctctggccagtggccactcggtgcgcctcggcacctccgagtccctgccctgcacggctgaagagctgagccgtagcaccaccgaactcctgcctcgccgtcccccgtcatcctcttcctcctcttctgcctcatcgtatacgggccgccccattgagctggacaagatgctgctttccaaggtcaaggtgccgcacaccttcctcatccacagctatacacggcccaccgtttgccaggcttgcaagaaactcctcaagggcctcttccggcagggcctgcaatgcaaagactgcaagtttaactgtcacaaacgctgcgccacccgcgtccctaatgactgcctgggggaggcccttatcaatggagatgtgccgatggaggaggccaccgatttcagcgaggctgacaagagcgccctcatggatgagtcagaggactccggtgtcatccctggctcccactcagagaatgcgctccacgccagtgaggaggaggaaggcgagggaggcaaggcccagagctccctggggtacatccccctaatgagggtggtgcaatcggtgcgacacacgacgcggaaatccagcaccacgctgcgggagggttgggtggttcattacagcaacaaggacacgctgagaaagcggcactattggcgcctggactgcaagtgtatcacgctcttccagaacaacacgaccaacagatactataaggaaattccgctgtcagaaatcctcacggtggagtccgcccagaacttcagccttgtgccgccgggcaccaacccacactgctttgagatcgtcactgccaatgccacctacttcgtgggcgagatgcctggcgggactccgggtgggccaagtgggcagggggctgaggccgcccggggctgggagacagccatccgccaggccctgatgcccgtcatccttcaggacgcacccagcgccccaggccacgcgccccacagacaagcttctctgagcatctctgtgtccaacagtcagatccaagagaatgtggacattgccactgtctaccagatcttccctgacgaagtgctgggctcagggcagtttggagtggtctatggaggaaaacaccggaagacaggccgggacgtggcagttaaggtcattgacaaactgcgcttccctaccaagcaggagagccagctccggaatgaagtggccattctgcagagcctgcgggatcccgggatcgtgaacctggagtgcatgttcgagacgcctgagaaagtgtttgtggtgatggagaagctgcatggggacatgttggagatgatcctgtccagtgagaagggccggctgcctgagcgcctcaccaagttcctcatcacccagatcctggtggctttgagacaccttcacttcaagaacattgtccactgtgacttgaaaccagaaaacgtgttgctggcatcagcagacccatttcctcaggtgaagctgtgtgactttggctttgctcgcatcatcggcgagaagtcgttccgccgctcagtggtgggcacgccggcctacctggcacccgaggtgctgctcaaccagggctacaaccgctcgctggacatgtggtcagtgggcgtgatcatgtacgtcagcctcagcggcaccttccctttcaacgaggatgaggacatcaatgaccagatccagaacgccgccttcatgtacccggccagcccctggagccacatctcagctggagccattgacctcatcaacaacctgctgcaggtgaagatgcgcaaacgctacagcgtggacaaatctctcagccacccctggttacaggagtaccagacgtggctggacctccgagagctggaggggaagatgggagagcgatacatcacgcatgagagtgacgacgcgcgctgggagcagtttgcagcagagcatccgctgcctgggtctgggctgcccacggacagggatctcggtggggcctgtccaccacaggaccacgacatgcaggggctggcggagcgcatcagtgttctctgaggtcctgtgccctcgtccagctgctgccctccacagcggttcttcacaggatcccagcaatgaactgttctagggaaagtggcttcctgcccaaactggatgggacacgtggggagtggggtggggggagctatttccaaggcccctccctgtttccccagcaattaaaacggactctctctggccccaggcctgtctcaaaaaaaaaaaaaaaaaa

SEQ ID NO: 271 - DNA, 1285 bp, Homo sapiens
gtggatttcagtttcctccatgtcttttcatggcttgataatgcatttctttttagagccaaattatgttccatcgtctggatgtttatttattcacctactgaaggactgttggatgcttccttttggcaattatgaggaaagctgttataaatatctgtgcaggctttttgtgtggacataactgaaatatttttaaagttatatttattgaggtataatttacattcagtaatagtcacactttttagtgtagagttctgagttttgacagttgtatctaatcatgcaatcaacaccacaatcaagatgaagaacaggcccctcacttccctaacttctttcctatccctttttagtcccttttcccactcccagcccttggcaatcaccagtctgtttccgtctctatagttctgccttttccataatattgtataagtggagtccttgtgtgtgtgtgtgtgtgtgtgtgttttgtacgtgtatgtatatctccttttgagtcggagtgctttcatttaatgtgatgtatctgagattcatccatatggttctatgaaaaacaaatggaaaataaggtgatgaaaagatgctcaacatctttaattatcaggaaaatgtaaatcaaaccacaatgagatactactatagaatggcttttagaatggctaaaaatgaaaacgtgccataaattggcaagaatacagaccaatggaaattttcatgcattgcttgtaggattgtaaaacggtctgtccactatgcacaaaagtttggcagcttcttatactattaaccatacatttatcatatgactcagcaactccacacttaggtatttaccctagatgaaagaaaaattctgtttacatgaaaacctatactcagatgttcacagcaattgtataattgcccaaattaggaagtaacacaaatgtacatcagtggatgagtgattaaacaaattgtgtacaccaatactgtggagggctgctcagacataaagaaatgatttattgacacttactacaacatggatgaatctcaaaagtgctgttgtattttaggtaaaccatgtgataacttgaattacatttgataaaagatttataagtgtaaaaactagatttatatattttaattttatatgtgcctgtcattacatactatagaaaattgtgtctacagtatgttatatagcatattgtaatatttattactgtatattccttgtgacaataaaatagtttgtattttatataatagtaaaaaaaaaaaaaaa

SEQ ID NO: 272 - DNA, 912 bp, Homo sapiens
tgagactgattaggggaggggatttgcacagggaggtaagctggtgtcatgctgagcatgcagaygcatttgctccctggatgcatagcaggtgattctgccagcatgcaccagtgcagccttaccagttgtttacatccagcatctgttctgattgtcagcatctgtcccatgctgcttgtcacatatctggagtttcactctgtgtagatgagctgtcattcaggacactaggagaaaaatctgagtgggtcattgtgcccatatccacagaaaatgcagaagttgaacagcttgcytgacaaccctcaaacatctttgagcacctggtacagatgtttatgagaatactctaagatctcaacccttgatcccaaaggcacacaatcacagagcattccttttgactgtaaactgtttaccttgcttttgagagccaaacattgtacccaacctggaaaaagtaactaccccaattaaagtgcctcatgtgtccccagagcatggcttaacttcagggacaatcacccagggaactaataactaaccagttgttcaacagcgggttaagctcagcagttttcacagtagagcagaagtccccaggaaacaaagggttagtcattagctgagatgttgattttaaaacaccttgaccttaacttttttacattattacttttaaatctcctttgggattggggaggctggccaaaataagtcttaaaactgcttatgtcatatttggattttaagttcatgacattcggaacagcaaagccatatatgcaatgtttttatgccattaaatgtctgattccaattaaaatataamaacgtatgtgtctttctagaagtcttaactcaaaggtggttctaattttctcagaatatcagtgaccctggatgtta

SEQ ID NO: 273 - DNA, 1691 bp, Homo sapiens
atatatttgaagtatataacttgactaattttgacaaatatatacacccatgaaactaccagttataattttaaacattttcatgaccctccaaagtttccttgtgtccttttgcaatacacgcaaacacacacaccccacacacagtatgtaggcaaccattgatctgccttctgttacaataggttagtttgcatcttttagaactgtacataactgaaatcacatagtatatactcctttgcatctggcttctttgactcagcataatgatttgagattcatccatatgctgttacatgtactagtaacgcatttttattactgagtagtatacaattgcatggctgtatcacatttttgtacctattcacctgttagtggacatttgggttgttttcccaaattacaacccacatttggctattacaaagaaagctgccattaacttttgtgtacaagtctttgtatggacatgtattatctcttgggtgaatatatccagggatgaaacgactatgttgaataatagatatattttaactttttaagaagctatcaaactgttttccaaggtggttgtaccattttatgttcccagcagcagtaactggtgagaatatggctcattttcaaaagatgatctgaagtttcaaaagtaaataagttattgaaacatgtaatttgatagtggtaattagccaacatgataatacgttactcatagggtttgttgtgaggattacatgcactaatgcataaaatgcatttaagcgcagaggaagtactcagtattcattagcagttttattgttattctgttaatttaacttctttggttgttaacagtagtacatttgtgactaatttcgatagactaaaaataaagataaacaggctagactttaaaaatgaaagtcacatattctacaaaaaacattcacattcataaaaatacccttaaacaaaatacaaatttatttttttctttccagtagagggggcagtgattacctggcattgttgcaaaacaaaagttaagcttgccattattgtagttacaatttttaatataatttttgcagttatctctcagtaactttttattatatactatttaattatgaatgtcagggtctgaaaaatacatggtcaattcaggattggttgtaacttttaaaaaaagatacttacattgacttgttgttatctaaaatgtctttattatgtagacacatcaccttcactttgggatgtggaatttgctaagcagttagccacagtaaatgaacaaccccttcagaatggatttgaagagctgatccagtggacaaaagaggggaaactatgggagttcccaattaacaatgaagcaggttttgatgatgatggttcagaatttcatgaacatatatttctggagaaacacctggagagctttccaaaacaaggaccaattcgccacttcatggagctggtgacttgtggcctttccaaaaacccatatcttagtgttaaacagaaggttgaacacatagagtggtttagaaattattttaatgaaaaaaaggatattctaaaagaaagtaacatacagttcaattaagaccatggaaatttttatttcaaacaattagagatggatattacaactaaataaaataattttactaaaaaaaaaaaaaaaaaac

SEQ ID NO: 274 - DNA, 555 bp, Homo sapiens
ccggtgggtctgttcctggcctctgacgtccagcagctgcggcaggcgatcgaggagtgcaagcaggtgattctggagctgcccgagcagtcggagaagcagaaggatgccgtggtgcgactcatccacctccggctgaagctccaggagctgaaggaccccaatgaggatgagccaaacatccgagtgctccttgagcaccgcttttacaaggagaagagcaagagcgtcaagcagacctgtgacaagtgtaacaccatcatctgggggctcattcagacctggtacacctgcacaggtgggccgagacccagacgaggagtgaggaatgagagagaccaaagttcctgcctccgctgggctcacattcagatgtgagctatccagtgtggtggccactagccaaacatggccagtcaaagttaaattaactaaatatgcatttcctcgttgtactgtctacattggacagggctgttctggatgagaaattaaactagtgaattacaaaaaaaaaaaaaaaaaaaaaaaaaaaaaaaaaaaaaaaaaaaaaaa

SEQ ID NO: 275 - DNA, 1021 bp, Homo sapiens
tcgacccacgcgtccgcagagactcatttcctcttcaataggacaggatgagaactcagagggtgtggccactaacctgtctttcctgaggctctccttgtcttgtctgggcattggctggcctccttacatgtcaccatgaggcattcttcctggccaccaatgttttgtttagactttcccatactatctacccagagtctttcaatttgcttcaagcttaactgtggtcagttcggagttgaaattcaagtgcacaatgtgacaatgacgtctgtgcctttgtttctggaataaataggtaaactctgaggcggagaggaaagagggagtggttcttgcactagagtggaactaacagcccatctacttcataaggcatcgatgaattgaaaaaacaaaactctttgcagaccccatttctttcttttcttttctcttttcttttctttctttttttgagacagaatctcactccatcacccaggctgaagtgcaatggcacgatattggctcactgcaacctccgcttcccaggttcaggtgattctcctgcctcagcctgccgagtggctgggactaccggcgcccaccaccacgcctggctaatttttgaatttttagtggagagtgggtttcactatgttggccaggctggtctggaacgcctgacctcaagtgatccgtccgcctcggccttccaaagttctgggattacaggcgtgagccaccgcgcccggcctgagtgagtcttaatccgtggccatctgcgttcctgcaggcttcatctggccctatggtcccctggcatcatggctgccctcagatcccttgtgaagcccaagatcgtcaaaaagagaaccaagaaattcatccggcaccagtcagaccgatatgtcaaaatcaagcgtaactggtggaaacccagaggcattgacaacagggttcatagaaggttcaagggccaggtcttgatatgatgcccagcattggttataggagcaaaaaaaaaaaaaaaaaa

SEQ ID NO: 276 - DNA, 652 bp, Homo sapiens
gctcttttaaatcttatcagctcaaaagtttcgaaccgtatgaactcaatcatctagattaggcatgggtgagagtctgagaatgatctttcctaaggtacagttcctatctatctgtgaaattctgaaattcagacaggttatttgctcccaaaatggtggggcaacgatgggatagcaattataaacattcccgttcaaaaaaggagaaaatagaaggagaaatggagttacctgttttagtcaatttcataatccagcctgggaaaaacatcctctgtgatttgagggtccacacttgtgggctcagggctctgccctttagatcatccttcctttttcatgaaaggtggcacatgtttgtggctgagcagtttcatcagcctgtttcctgcctgtggtattttgggagtctgagagtcttttttgaaattttgtttaaaattttgtcttctctttccccctttcaatttaaactggcagtgtttctgtttatgtaatgttctgaagaacttttggggcctagtacagtggctcatgcctgtaatcccagtgctttgagaagccaaggtgggaggatcacttgaggccaggagtttgagaccagcttgagcaacatagtaagaccttgtctctacaaaaaaaaaaaaaa

SEQ ID NO: 277 - DNA, 636 bp, Homo sapiens
ggagcattcttggataaattttttatgagtatatgttttcattgctctaatataagtatgtaggaaaagaatctctgggtcatattgtaaatatatgtttaatgttataagaaactgccaaactattgccccaagtgtttgtaccattttattccccaaccagcatatatgagttccagttgctccatgactctgtcaacagtactgtcagcccttttaatttcagcctttcttggggttaagtgctatctcattgcagtcttcaggaaaatacatttccttgaatattaatgatattgactacctttccatgagtttattggccattcataaatttctcttgtgaagtatctctttcagtttttttccctattttaaattaggtttgtcttttattattgagatttggaatttttaaaatatcttaacacmagttatttgccagrtatatgtatttttaatatttttctctatatgtcttatccccattttcttaatgatgtctttcataaatagaattttcatttttataaaattcaatttataattttttatggtttctctttattaatcccatttaagaaatctttgtgccatgattatgaagatgcactctaatgttttttcccagaagct

SEQ ID NO: 278 - DNA, 374 bp, Homo sapiens
  SITE (9): n equals a,t,g, or c
  SITE (91): n equals a,t,g, or c
  SITE (368): n equals a,t,g, or c
  SITE (374): n equals a,t,g, or c
aggtctccnaagctgggccagttcagtaagatctaggaacctcaggatacatcaatcacagtcagataattataattttagaatgtcagcntcatacttaccagcactgtttattttaatattttttcctgttatatgtaatatacataacttcaaagcacatccgtacaaacctcctacaagctgcaccttcataatgagaaaccataagcatacaatgtctacttcccttcctgtggcttcgttttctgttcttgctttcttttcttcttctcatttcaaaggagagtcatctgcagtggccctcagaaggaccagtacacagagggtgaagggtgtggggtcccggcccgcgaaagaaaaaaacnaatcan

SEQ ID NO: 279 - DNA, 774 bp, Homo sapiens
ggcacgaggtccccaatcacctcatctggctcatcttcttctactggctcttccactcctgcctgaatgccgtggctgagctcatgcagtttggagaccgggagttctaccgggactggtggaactccgagtctgtcacctacttctggcagaactggaacatccctgtgcacaagtggtgcatcagacacttctacaagcccatgcttcgacggggcagcagcaagtggatggccaggacaggggtgttcctggcctcggccttcttccacgagtacctggtgagcgtccctctgcgaatgttccgcctctgggcgttcacgggcatgatggctcagatcccactggcctggttcgtgggccgctttttccagggcaactatggcaacgcagctgtgtggctgtcgctcatcatcggacagccaatagccgtcctcatgtacgtccacgactactacgtgctcaactatgaggccccagcggcagaggcctgagctgcacctgagggcctggcttctcactgccacctcacacccgctgccagagcccacctctcctcctaggcctcgagtgctggggatgggcctggctgcacagcatcctcctctggtcccagggaggcctctctgcccctatggggctctgtcctgcacccctcagggatggcgacagcaggccagacacagtctgatgccagctgggagtcttgctgaccctgccccgggtccgagggtgtcaataaagtgctgtccagtgaaaaaaaaaaaaaaaaaa

SEQ ID NO: 280 - DNA, 1278 bp, Homo sapiens
catagctcctatagatccagggtcgctcaccctctggtgtgcctcagagcagtcactctagtggacgtgcagggagaggaataccacatggtgtggcagcaaagcaaggagcccggcaccaccaggccgctccgtggtgctggtagcaggtgctgcatgtttataccaaggtactgtgaagcttccctggaaggggtctttctcgacatctggtggccaagctgaaagtggattaccatttggacatctcataactaaaagatgatgagccagcggggcctctgcacagctttctgcacgatgaccctgcaaaggtacagctgtgccctgcccctggccttctgcagctggcccatctgcagcttctgctgagtggccacatgggtggatgctaagtcttcaacagctaagttcaaagtgaaccctgcatgcccccactgtgtgttgatctcccctgatccaaaataatgagagaatgaggggggtgcagaaactatccaaaacattaatagacatttaaggagccctgtgccgctctctttttcatccccttcttggtaattgtcccatgaatttagaggcccctgaagggaattgcctttgagggttagggaccatcctggaaacggagcaccagtgcttgcttcccatctggagtttgctgacttgtgcaccccacatctagcacggctgggagacgggggaaggatgacagggagatgcagagaggtgaaggtaggaactgagggcacagtctgccaccatgtgtgacagggctgaattagcacaatgaagactccttgccttcatcatggggtcctagcataggcgccagaagtgagctgggagcacaagctggcttgctgacagcactttctatccaagagactgcagaaattgcaggtggaccagctgctgcgggtgaggcacaggaaacagctgtgcttctgaactactgttgtcaggggctgtgcagtgtcccctccaggtgcctgaagtttgtctcctgtgccacacaacagagatacagtcaggggaccatactgccaggtacacagcctccccactcctgacttgcaggcgagcacctaaggacactgactgtctcctttcgcctctgcaggctctggctgccgagtgcacataaatactgtaaaaggagaagctggttcagggaggggaatggtaagaagggtttttttagcaaaatgcaatgttattgatctgtgactgcatttaagacctgaaagctgtgtgtttaaaaaaaaaaaaaaaaaa

SEQ ID NO: 281 - DNA, 3135 bp, Homo sapiens
  SITE (2997): n equals a,t,g, or c
  SITE (2999): n equals a,t,g, or c
  SITE (3035): n equals a,t,g, or c
gcggaagtcggccgccttcctccgtcccggccgttagcccagccaagcccagccaagcccagccaagccccgccgatcgcgggcaccggagccagccccgcagcggagggaccacagagcaccagcctgcatggaacttccttcctcactcagcttcccacgttgccagctgggacaggggagatggagtaattttgctgtggaaagacttcacgtcttgccgaatgaaagtaagcaaagatactgctagagtcrggaatctagagtcgggaattcattaagccaagggagtaagaatggccacagagtagtgaaatactgtttcttctggaaaagtcagcctccagcgcctgcagcttccggaactaagatgtgactgggcttgcggaggcgctgactcctctcctccctccctggctgtgcaggtcccgcctgtctgtcacgctgatgcccgtgcagctgtctgagcacccggaatggaatgagtctatgcactccctccggatcagtgtggggggccttcctgtgctggcgtccatgaccaaggccgcggacccccgcttccgcccccgctggaaggtgatcctgacgttctttgtggstgcygccatcctctggctgctctgctcccaccgcccggcccccggcaggccccccacccacaatgcacacaactggaggctcggccaggcgcccgccaactggtacaatgacacctaccccctgtctcccccacaaaggacaccggctgggattcggtatcgaatcgcagttatcgcagacctggacacagagtcaagggcccaagaggaaaacacctggttcagttacctgaaaaagggctacctgaccctgtcagacagtggggacaaggtggccgtggaatgggacaaagaccatggggtcctggagtcccacctggcggagaaggggagaggcatggagctatccgacctgattgttttcaatgggaaactctactccgtggatgaccggacgggggtcgtctaccagatcgaaggcagcaaagccgtgccctgggtgattctgtccgacggcgacggcaccgtggagaaaggcttcaaggccgaatggctggcagtgaaggacgagcgtctgtacgtgggcggcctgggcaaggagtggacgaccactacgggtgatgtggtgaacgagaacccggagtgggtgaaggtggtgggctacaagggcagcgtggaccacgagaactgggtgtccaactacaacgccctgcgggctgctgccggcatccagccgccaggctacctcatccatgagtctgcctgctggagtgacacgctgcagcgctggttcttcctgccgcgccgcgccagccaggagcgctacagcgagaaggacgacgagcgcaagggcgccaacctgctgctgagcgcctcccctgacttcggcgacatcgctgtgagccacgtcggggcggtggtccccactcacggcttctcgtccttcaagttcatccccaacaccgacgaccagatcattgtggccctcaaatccgaggaggacagcggcagagtcgcctcctacatcatggccttcacgctggacgggcgcttcctgttgccggagaccaagatcggaagcgtgaaatacgaaggcatcgagttcatttaactcaaaacggaaacactgagcaaggccatcaggactcagcttttataaaaacaagaggagtgcacttttgttttgttttgttctttttggaactgtgcctgggttggaggtctggacagggagcccagtcccgggccccatagtggtgcgggcactggacccccgggccccacggaggccgcggtctgaactgctttccatgctgccatctggtggtgatttcggtcacttcaggcattgactcaaggcctgcctaactggctgggtcgtttcttccatccgacctcgtttcttttctttcctatgttcttttgttcagtgaatatccctagagctcctaccatatgtcaggccctatgcctcaccctgagaacgcagtgagcatgaggtggacctgtttgctgggaaccccaggtcacccccttttcttcctactctgtgcctggagcatcatgtccacccctgcagatccttggaaaagaaaatgtttatgttgcagggtattgcatggtcacgagtgagggcaggcccctggggacacatctgcccacagctgcacaggccagggcgcaggcacatctgttggttctcaggcctcagataaaaccatctccgcatcatatggccagtgaccgctttctcccttcaagaaaattctgtggctgtgcagtactttgaagttttaattattaacctgctttaattaaagcagtttcctttcttataaagtggaatcaccaaatcttatcacacagagcacagtcctgtagttacccagcccgctccagcagtgcgggagattgtaaggaagcggtggcggctggtgaagcaagtctcacatgtcggcgttcttggccaatggatacaaagataaagaaaatgttgcctttttctaggaactgtcagaaatcctcatgcctttcaagacttctgtgaatgacttgaattttttattccctgcctagggtctgtgaacgaggcctgtctcttccctggggtttctttccatggcctttatttctcctcttccagtgggagttttgcaggctcttctctgtggaaacttcacgagcgttggctgggcctcggcttcgctggagtgtactccagggtgaaggcagagtgggatttgagacccaggttaggcacgacccaggctgagaagggacgyttccatcattcacagtgccctccccacagcactacctcaccccgacccccaccctcactcctaccccaccccgcgatcgtcaggggtgccacggtgggccggaaggtgccggctctggstgtccctggccggtccctyacaaacctctcccctttgaaactcaagcacagctncnaggagggcagcgaggaagggacccctctcttatggntggctctttccccgctatgtcataagtagtggaggaagccaaaggaagtgaacccttaatgggacccaattcttaaagagctcacttttcaccgggcata

SEQ ID NO: 282 - DNA, 727 bp, Homo sapiens
  SITE (718): n equals a,t,g, or c
  SITE (724): n equals a,t,g, or c
agwgtggcttctttttggataatttatgataaaaagggagatctggttgggatctagatacggctgttaaagctgcagtgttccatacctcagagggaccactttggaaatgaattgtccattgctgagtatgaagagatgtccagtccaggcaaagccttcactgaagttccatcatcgccacttctccctttttagggtcattcaaagaagataacaccaaacctaaataattctgaaagcattttgcagatcagtgctactcattcaaagggctttgcaactcaaacagattgttagtgtgctagtgataagtttatttggtagaaatgggtatactacagctttaactagccttagtgagaaaagaaattttttgttgttacaaaacaccttttttaacaaaaaggtattttgagcctacaaaaagtttctttaaactgtcagattctagcattgttaaccaaattagactagtgattgcaatatttaagtgtaaatcttgttctacaagaaaggaaacttgcttacagtttaaaacaatgactgtttctacacatgatcttgtatactactacacaaggaaaagggggttttgtaaacactgtagaayagtctcatattcatttttttatagaaatgttattccaatggtgcattttttgtttaataaataaagttttgatacaaaaaaaaaaaaaaaaaaccccgggggggncccggnccc

SEQ ID NO: 283 - DNA, 1870 bp, Homo sapiens
ccacgcgtccgagtctcgctttttctttccagtgttggctgacttacagctcttataaactagtggcaatttctgaacccagccggctccatctcagcttctggtttctaagtccatgtgccaaaggctgccaggaaggagacgccttcctgagtcctggatctttcttccttctggaaatctttgactgtgggtagttatttatttctgaataagagcgtccacgcatcatggacctcgcgggactgctgaagtctcagttcctgtgccacctggtcttctgctacgtctttattgcctcagggctaatcatcaacaccattcagctcttcactctcctcctctggcccattaacaagcagctcttccggaagatcaactgcagactgtcctattgcatctcaagccagctggtgatgctgctggagtggtggtcgggcacggaatgcaccatcttcacggacccgcgcgcctacctcaagtatgggaaggaaaatgccatcgtggttctcaaccacaagtttgaaattgactttctgtgtggctggagcctgtccgaacgctttgggctgttagggggctccaaggtcctggccaagaaagagctggcctatgtcccaattatcggctggatgtggtacttcaccgagatggtcttctgttcgcgcaagtgggagcaggatcgcaagacggttgccaccagtttgcagcacctccgggactaccccgagaagtattttttcctgattcactgtgagggcacacggttcacggagaagaagcatgagatcagcatgcaggtggcccgggccaaggggctgcctcgcctcaagcatcacctgttgccacgaaccaagggcttcgccatcaccgtgaggagcttgagaaatgtagtttcagctgtatatgactgtacactcaatttcagaaataatgaaaatccaacactgctgggagtcctaaacggaaagaaataccatgcagatttgtatgttaggaggatcccactggaagacatccctgaagacgatgacgagtgctcggcctggctgcacaagctctaccaggagaaggatgcctttcaggaggagtactacaggacgggcaccttcccagagacgcccatggtgcccccccggcggccctggaccctcgtgaactggctgttttgggcctcgctggtgctctaccctttcttccagttcctggtcagcatgatcaggagcgggtcttccctgacgctggccagcttcatcctcgtcttctttgtggcctctgtgggagttcgatggatgattggtgtgacggaaattgacaagggctctgcctacggcaactctgacagcaagcagaaactgaatgactgactcagggaggtgtcaccatccgaagggaaccttggggaactggtggcctctgcatatcctccttagtgggacacggtgacaaaggctgggtgagcccctgctgggcacggcggaagtcacgacctctccagccagggagtctggtctcaaggccggatggggaggaagatgttttgtaatctttttttccccatgtgctttagtgggctttggttttctttttgtgcgagtgtgtgtgagaatggctgtgtggtgagtgtgaactttgttctgtgatcatagaaagggtattttaggctgcaggggagggcagggctggggaccgaaggggacaagttcccctttcatcctttggtgctgagttttctgtaacccttggttgccagagataaagtgaaaagtgctttaggtgagatgactaaattatgcctccaagaaaaaaaaattaaagtgcttttctgggtcaaaaaaaaaaaaaaaaaaaaaaaaaaaaaaaaaaaaaa

SEQ ID NO: 284 - DNA, 384 bp, Homo sapiens
  SITE (328): n equals a,t,g, or c
  SITE (347): n equals a,t,g, or c
  SITE (350): n equals a,t,g, or c
atttctggatttctttctacattattccagcaattcaccttacacccttaccaaagatcactattgaaaaaatcatttgctttagttttccaacgttctcccttcccccaacaaacgttatttaaagaaaaattccatgtatttctagttgttttctattatacgtggcacagatgttattactttcagaagaaccctacaggctatctgagaaccaatcccctggcttgggggtgacatcagaaaactgatttgtcttctctgctggtgggggaaagcataatcctattatctgggaataatatgggaaagaatcatagaattcttnaaccatcaggggcattggnccnaaaactgtggatgctcccatggatgataaaatgg

SEQ ID NO: 285 - DNA, 874 bp, Homo sapiens
gtctcggtccctggactcacccacttccagcccaggcgctggcacgaggcagctggtgaaggcttcgtccacaggcactgagtcctcagatgactttgaggagcgagaccctgacctgggagacgggctggagaatgggctgggcagccccttcgggaagtggacactgtccagcgcggctcagacccaccagctgcggcgactgcggggcccagccaagtgccgcgagtgcgaagccttcatggtcagcgggacggagtgtgaggagtgctttctgacctgccacaagcgctgcctggagactctcctgatcctctgtggacacaggcggctcccagcccggacacccctttttggggttgacttcctgcagctacccagggacttcccggaggaggtaccctttgtggtcacgaagtgcacggctgagatagaacaccgtgccctggatgtgcagggcatttaccgggtcagcgggtcccgggtccgtgtggagcggctgtgccaggctttcgagaatggccgagcgttggtggagctgtcggggaactcgcctcatgacgtctcgagtgtcctcaagcgatttcttcaggagctcaccgagcccgtgatccccttccacctctacgacgccttcatctctctggctaagaccttgcatgcagaccctggggacgaccctgggacccccagccccagccctgaggttatccgctcgctgaagaccctcttggtacagctgcctgactctaactacaacaccctgcggcacctggtggcccatctgttcagggtggctgcacgatttatggaaaacaagatgtctgccaacaacctgggcattgtgtttgggccgacactgctgcggccgctc

SEQ ID NO: 286 - DNA, 2228 bp, Homo sapiens
tgtttgtatggatatcgcttctcgggtattgttctcacccggtgctatcgccgtttttcctgcaaggttttattttcatgtcacagtctacatccgtgcttcgtcgtaatggatttacttttaaacagttttttgttgctcacgatcgctgtgcgatgaaagtgggaacggatggtattttattgggcgcatgggcaccggtggctggggtaaaacgttgccttgatatcggcgcgggtagcgggttgctggcattaatgctggcgcagcgaaccgatgacagcgtgatgattgatgcagttgaactggaaagtgaagctgccgcgcaggcgcaggaaaatatcaaccagtccccgtgggcagagcggattaacgtccatacggcggatattcagcagtggatcacacagcagacagtacgcttcgatttaatcatcagtaacccaccttactatcagcagggagtagagtgctcgacacctcaacgggaacaggctcgctataccactacgcttgatcacccatcgttgctgacctgtgcggcggagtgcattaccgaagagggatttttctgcgtagtgctgccagagcagattggtaatggttttacggagctggcattaagcatgggctggcatttacgtttgcggacggatgtggcggaaaacgaagcgcgactgccgcatcgggtgctgctggcattctccccgcaggcgggagaatgctttagcgatcgcttagtcattcgtgggccagaccagaactattccgaagcgtatacggcgctgacccaggctttttatctgtttatgtaatgattgccgggggaaaggatcgacggaccggaatgggtgagcagttccggataatccagcgtgaaatgcaacccccgactctctttacgcatcattgcacagcgaacaatcaactcggcaacctgtaccagattacgcagctccagcaaattatttgagacgcggaaatgggcgtaatattcgtctatttcttgttggagcatggttatccgccgcagggcgcgttccaggcgcttcgttgtgcgcacaatgccaacgtaatcccacataaacagacgtagctcgtgccagttatgctgaattactacccgttcgtcagggttctcaacgcggctttcatcccacggcggtaacgtactgatgtcgtgggcataaggcatacgtctggtgatatcttccgccgccgaccagccatagaccagacactccagcaatgaattcgaggccatgcggttagcgccgtgtaagccggtataactcacctcgccaatggcatacaagccctcgacgtccgtacgcccatgatcatcaaccattacaccaccgcaggtataatgtgcagcaggcacaatcggtaccggttcttgtgtgagatcaatccccagcccgagcagcttttcataaatcatcgggaaatgctggcgaataaaatcggcgggcttatggctgatatcaaggaacatacaatctgcgccgaggcgtttcatttcatggtcaatggcgcgggcgacaatatcgcgcggggccagttcgccgcgctcatcaaaatcgggcataaaacgcgtaccatccgggcgcttgagataagcgccttcgccgcgcagtgcttctgttaacaggaaattgcgtgcctgtgggtgatatagcgcggtagggtggaactgattaaattcgagattggcaacccggcagcctgcgcgccacgccatagcaatgccatcgccagaagaaatatccggattggtggtgtactgataaaccttcgacgcaccgccggttgccagcaccaccgcttttgcgtggcaggtttccaccgtttctttattacggttccatacccacgcgccaacaacccgtcgcgtgcccggcaggccaattttgtcagaaacaatcagatcaaccgcgttgctgcgctccagcacgcgaatattcggatggttcagcgccttgctcaccagcgtggtttctacttctctaccggtggcgtcggcggcatgaagaatacgacggtgactatgtccaccttcacgggtcagatggtaactttcttcgccattcggttgaatgtgggtatcaaacaacaccccctggtcgattagccattgcacacaggatcgtgcattgctggcgacaaattcaactgcatggcgatcgcaaataccagccccggcaatcaatggtcttccacagcga

SEQ ID NO: 287 - DNA, 1825 bp, Homo sapiens
  SITE (2): n equals a,t,g, or c
  SITE (29): n equals a,t,g, or c
  SITE (88): n equals a,t,g, or c
  SITE (1809): n equals a,t,g, or c
tngcccatttcgtaattcaccctcactanagggaacaaaagctggagctccaccgcggtggcggccgctctagaactagtggatcccncggtctgcaggaattcggcacgaggttgtccggcggaaattcaagcatacatttggagaggacctcgtggtgtgtcagattggcatgtcctcctatgaatttcctccagctctgaagccaccagaagacctggtggtgctgggtaaagatgcttccgggcagccaatttttaatgcttctgccaaacactggaccaattttgtcattacagaaaatgcaaatgatgcaattggtatccttaacaattctgcctcattcaacaagatgtcaattgaatacaaatatgagatgatgccaaatcgcacatggcgttgtcgagtgtttttacaagatcactgcttagctgaaggttatggaaccaagaaaacaagtaaacatgcagctgccgacgaggctttgaaaattcttcaaaaaacacagcccacttatccatctgtcaaaagttcacaatgccatacaggctcttcacccagaggatctggaaagaagaaagatataaaggatcttgtagtttatgagaattcttcaaatcccgtgtgcacgctgaacgacacagctcagtttaaccgaatgacagttgagtatgtctatgaaaggatgacaggcctccgctggaaatgcaaagtgattctagagagtgaagtaattgcagaagcagttggggtgaagaaaactgtcaaatatgaagctgctggggaagctgtgaaaaccctcaaaaagacccagccaactgtcattaacaacttgaagaaaggagctgttgaagatgtgatttcaagaaatgaaattcagggccgctcagcagaggaggcttacaaacagcaaatcaaagaagataatattggaaatcagctgctgagaaagatgggttggactggtggtggtttaggtaaatctggtgagggcatacgggagcctatctcagtgaaagagcagcataagcgggaagggcttggtctggatgtagagagggtgaataaaattgccaagagagatattgaacagatcatcagaaactacgcccgctccgagagccacacagatttgactttctctagagagctgactaatgatgaacggaagcaaatacatcagattgcccagaagtatggtcttaagagtaagtctcatggggtgggccatgataggtacctagtggtaggtagaaaaagacggaaggaagacctactagatcagctcaaacaggaaggccaagtgggccattacgagcttgttatgcctcaagcaaattgagatcttactaatttattttgtaaatgcctaatgaggcagatttttgaattaaagaaatgctacatgttccggttgcagagtatattcataagatgtctcaccttgttcatttcacatagtggtttattagatattggaacctaaagaattctgtccacttgtattagcttaatccagcagatgatattgtgcagttactgtttgtgtctttgatattgctgtgtccctcagattttagtagtttgacaagcaagaacacatatccaaatggaattttaccctgagaaattatcattttaaagggcatagcacagcaatctgcaacaatatgtaaagttgatattgactacaataaaaatccmgtcttaattccgaatttactggaaaawgtcarawcattttgkattaaaccaatttttcatctttttggggggaaaccccggttttaaaaaagggttggacaaatnaaaattggggcctttt

SEQ ID NO: 288 - DNA, 1093 bp, Homo sapiens
cggaaatagattatgtaatccaaaatagtgcttgcacatcaggaaatactggagggttctgttcaacatggaaactccaaggaccactggacgcgggcactggaatgctgactttgatttggtgaccctcaatccacttcgagttattggtaaatcacataattttaatttgatacggaataatcatacatgtttcttgggagcatgtggtaatctgattcatccatgcaatgtgtaacgatccaataaaggttcccaggacattcatcaccctgaacatttgttattatggttattattttgagacagagtcttgcactgtcgcccggctggcgtgcagtggcaggatcttggctcactgcaaactctgcctcccgggttcaagcggttttcctgtctcagcctcctgagtggctgggattacaggcatgcaccatcacgcctcgctaatttttgtgtttttattacagacggggtttcaccatgttgctctggctggtctcgaactcctgacctaaggtgatccaccagcgtcggctttccatagtgctgggattgcaggtgtaagccactatgcctggccaacttttataatttctgtgctgggaacattccaaatcttcatttctcactcatgtggaaaatacaataatctgttgctaactatggtcaccctactgagctctcaggccctggaacttactccttctctccacctgtatttctgcacccgtccaccaacctctctccatccctgtcctccacactcccttgccagcctctgttgacaaccattctactctctgccatcacaaggcctacttttgtagcttccgcgtgagtgagaacatgctcctctttctgggcctggcttatttcactgaacataatgtcttccagattcatctgtgttgctgaacatggtacaatttccttctttttatgcctgaatattatttcattgtgtatatagaccacatgttccttatccattcatccattgatggacataggttgattccatatcttggctattgtgaatactgctgcaataaacatggcaatgcagacaaaaaaaaaaaaaaaaaaaaaa

SEQ ID NO: 289 - DNA, 691 bp, Homo sapiens
ccagctgcacgcagggaaacagttctcattttgtgtgctcggctgactgcacgtccagcctcgggcagctcgagacggccacattgcctggttgaagatggctgagcgtaaaacagaatgcaagtcagctggagcacgtactactggaggcagagccccatgagaaggggccaagaacccgcacccatcaaaatcaagaagaaaggctgaacccggagagaaaagggagcaactgatgttgccatgcagatcccttggttgctatgagatggtaacatcactctgccccaccattggccagtgcctcctcagctgcggtgcctcccaggctgtgtggttctcacgcgggccactgacacagagctgttactatggtgaactttacaatttcctttgattggtggatttcagaaataggccatcagcggaattcattatattcagctaagtaaaaatgaaaaataaatactataactttcccctcatcactaacatgaargaaacgtgacccttcatgacataataaatcgctgttcggtaacttargatccttcagggggactgaagcgggatgatcctcctatgccaaatttgggtgggaaagatattccctgttagctttgarttcgactcttcararttaagggcagtgggccaaccagagttgggaacttcaaaattgggaagaagt

SEQ ID NO: 290 - DNA, 724 bp, Homo sapiens
  SITE (237): n equals a,t,g, or c
  SITE (297): n equals a,t,g, or c
  SITE (723): n equals a,t,g, or c
tgttgatttgtccaggtaaatctgaggcattttcccctaaagtagcgcctcgaggaacagcagagaggatgttgagggacagagatctggaggaggttgaggacacacagggctgtgtctgggccctaggaagtggcgagggttgggtagtggggtcagaacaagtgttcagagagtagtgccaggagctgctggggaggggaggcggctgcactcgggaggggtgaggaaggtttncagscgacaggcagaactggagaccagagtctattgsccaaaggcaycctggttgcgttncgcgcgcgcgcgtgtgtgttcacacgtgtgtgtgtgtgtgtgagcatgtgttctagtgcatgccagggtgcaagtgagtgtgtggctgagtgtgaacatgtgggaatgactgtgtgagtgtgacagtgtgagtgaagcgtgtgtgtcaatgcatagggttgagggaggtagggaacagagagagatctctcagttcctggaaatctgccatgtttctgacagtcgctggttgcaatgaaagttttaatttctgcttctgagctaaaagaaacacttgagcagaaaaagcgtgctttaaacttatgtccttattcacatttacatcgatttcgtgtgtacattgatttcctgtcacgaagttaaagtgcctgcttatttctccctgtgtgcgtacctctgccgaattctgccaccccggggacccanc

SEQ ID NO: 291 - DNA, 811 bp, Homo sapiens
aagtcttgtggaggtagttgaaatgttacatttttgtttttggtgcgtgataagtcattaccctaattttgacaaaccatggttttgagtttataattgatatccattagacttggatttaatatcagcacatttagacttagacatttgtaatatttgtaaatttatagcagagtccatatacaagtgtcagaactagtttttatgatgtgtggcattagtgaagtaatatgccatcagttgctccttgttctttctttttcccatttatgtcatccatcagattttgatggtcctccttgtttagcataaatacttcacatgaccttgaagttggaaataagagagttaccattttaatgccatgatgttatatagtccatcagtgatgcattttttaatagagatataccagccaataaagctcagttgtgttcctccaatgtgtattttctactataggtagtttataaagttttagctataagaaatgctttttgtgtgtctgattttgaattgttcctggacaggcaaatcacttgatttctaaatgccagggaaaatgtccatattgtcagatattgctaaggcattatttgatatttaggatgctttagagattttgcagattttttcttatgggagcattttaatatcttaaagtgggaaattttaatatttgttagtattaaaaattttttttaaactttttcttcccgtagaattataaaacactatagktkttttcttttctttttttaaaaacattctgtgatcttgkaagtttgatttggttcatcttctgctttag

SEQ ID NO: 292 - DNA, 445 bp, Homo sapiens
  SITE (405): n equals a,t,g, or c
  SITE (417): n equals a,t,g, or c
  SITE (439): n equals a,t,g, or c
cattgtcacaaaaactagtaatgttcctcacctctttacctatctcctataactagttttccatagaagtcttcttccttttgaataactttgctattctttgcaactagataaaaataaaaattcaccatccttacagcaggcatctttgaaaatcaactcaatatgtttttcattcctacctatgtcttgtgacttgacaaaggtaagaatatggttaagattgcaaaatttaagatgtaatttgtaaaatttttctgagaaaaacaaataaatgtaagttattgttttcatttatagtctgattttcatattgtttgtatgatattcccaggggatagaattaaaatgtatttcataaataatctagaagaaattattttggctgtatattatgaatttggntatatattatantatccttttgaattataagaantaccag

SEQ ID NO: 293 - DNA, 1486 bp, Homo sapiens
ggcacgagcactcagccgtttaagaaataaaagcaaaaccatcacgtgactgagaccgtgtgtgtgaccgcagcaaagcgcagcgtgtggatggatcagagcccctcggtgcagctgtctgcatcttccaagcactttacagataccttggaatgtatatttttgtcttcttactcagaaggtttgcagtttgtaaaataatcaggattctgctctgtcctgtgtgtggggtcagctccctccacagagggctccagctctgttggtcacagctgatggggttctctgattgataggagacgagctctcgagctctaaggaacagtgaggtcgccggtggggagcttggctgggacaccaagcaaatgcatcgtatgtccccttggagacgtttttatgcagctgtgtatgttactatccagaaggagtcgggggtagactttcccgtgtaagctcagtccataaactggttacttctgatcctggaacgtggacttcacatgataggtctggatctgtttctgttgggatcacaggtaaggaaaatgtccattcaaatggtaaagaagggaggagggtgtttttttttttttttgctgtaggcaccattctgcatcttgaacccagactgaagtgtgcctctcacagatggaaggtgcacacgctcctgtctcctcctcactctgccacgttcacttggctttttcattggtacctaggaatttaagaatatcgaagcgagagcagtaacaaaccatagatgagcagactcccacaccgggttttcttgcccgtctttaaggcactgtttctaaattttgaacttagctctgaatccccaagaacttgagcacagcaagggttgctgagctgctgtcgccgcagccctggcccctggtgctggagctgcagcacctttgggagaggtcctgcgtcgtcctcagctgcgtcgctgtgaactcccgctctccactgtgttcctcagtgtctgcttttcaggaagtctgctgtgacctttgcccaacttctgagctcctcagggactaggaacaatttcagtagctttgccctgaaccaaacgagaaaacaaaagggaactcccgtatgacccacgtcacgtggtgcactcagagtgtgtgcggcatgatcctcggttgctcctcctctcactttagtagagtacgcggtggacagctgatctccttcagtcgtctacccacttccgtcattgtcctccgctagaataacagagtagttggtagtcatggccagaaggggggtgggggcagtgtgaggacttggggtttctgtgctgtgtgacacaaggagataagtgacaatcttgaagtcctaacttccactattctagaaagtatagtggtgatttgtgtgcaaagatttgaagttttaaaaaagtaccaagttcctgaaattcaataaaatatttttattaattttaaaaaaaaaaaaaaaaaaaaaaaaaaaa

SEQ ID NO: 294 - DNA, 1748 bp, Homo sapiens
  SITE (16): n equals a,t,g, or c
  SITE (1588): n equals a,t,g, or c
  SITE (1713): n equals a,t,g, or c
  SITE (1716): n equals a,t,g, or c
  SITE (1732): n equals a,t,g, or c
cccatgattccgccangcttcgaatttaaccccycactaaagggaacaaaagctggagctccaccgcggtggcggccgctctagaactagtggatcccccsggctgcaggtttttragcatatgaaaagttttaaaaattctattcagggactcagggtaaaagtccgagagaagcccctgaaatgtcctgtatacgacattgagaacaaatgcatgtaggaggcagtgcagacactgaaatgtgaaggcctctccttggatggccatggggttgggaggagtcagtgggaaccagaaggaatacatcattttaggccaagaaactatggatctagaaagtggatgtccatgaaatacttgaaggacccttattcctgatgaaagtctagggaatcttctcttggtcaggaagaacaggcccaggaggactctgggaggaaaaagtatggaggtgcctaaggttaggttaggaggtggtacattcacccaggacaatggcatcctctctttggtgagatcatgctggtactccttggacaatatcaattatgtcatccatcgtggaatgtgagaggcttccagagccaggtagaggctgactgacagttgcaaattcccttctagatcccactcttagagagaaaaggattcgcccagatagcccatgatgacttgtgggatggagccagggctggccttctgggtatgcggtgtgtgcagtggcacatggccctgtgctcaggcctcatgcttggtctaatgctctgctgttgccttcttgaaactcttcatacttttctctttgaatttgkgttttggttttctgagcacagaattctggtgggccttctatgcgtgggagttaagtgagacaaggcacaaagcaagagcaacgtaagtgtgttatgtgtattgagtgagtaagctgagaccacactttccctttgaaccagaacttgctttaaatgcagaaagaaggcaacggtgttctaagaaacatgaaggaccaaggaactctgtcacatcctcattcacatcctgttcactcatgccacctccctgtatttgccagccacagacactgacaattatgacacagaaggagagggaaagacaggacagcacatggttccttttaccctcagtccttcctcactcctcagtcatctgaagagagagcatgctggtggaacgtaggtatattggaagtgaaataaaaagagtttagttagttctgtgcaacatttccatttttctgataagaacaaaataatatatacatatataagctaaaaaaatgagaattgtatcatttcagtgattctgcatatgagagaaatgctgttatatttgcatttaaaattgccattggtgggctgggtatggtggttcaggtctgtaatccccttgggaggccaaggcaggatgatcacttgaggccaggagttcaaaatcagcccgggaaacatagcgagaccacgtctctacaaaaaaaaaaaaaaaaaaaactcgagggggggcccggtacccaattcgccctatagtgagtcgtattacaattcactggccgtcgttttacaacgtcgngactgggaaaaccctggsgttacccaacttaatcgccttgcagcacatccccctttcgccagctggcgtaatagcgaaaaggcccgsaccgatcgccyttccaacagttgcgcacccgaatggcnaanggcaaattggaagcgntaatattttggtaaaa

SEQ ID NO: 295 - DNA, 715 bp, Homo sapiens
  SITE (570): n equals a,t,g, or c
  SITE (636): n equals a,t,g, or c
  SITE (693): n equals a,t,g, or c
gtacaaagttatttatcttagcacatttattatgtgtgactgcatctgatttatatttaaattggcaggttttgagggatttttttcttcatcataaatgtaaacataggattttagagtctatttccccaagcgccacattataactgtaaacttaccatcttctatgtagctgtgatatctcatctttctaaaatggaacttgttaaaaagtgttcaaacactatccctaatgcctgcggcagaatttatatacgatccattcattggggctcaaagtatcttttagacttttaaggacaatttacagcaaatgaaatttatgatgctgtgacaagaaatttaaagaatcaaaacgatggtttgaaaaggaaacctatgatacatgcaggagaagcaaaacccaagtgatttgtgagaaatatagaaattatttaaattactttatagtaattattaaacactaatttttgtactgtcattgaaggtgttttatagagaaatctggagaaatccacatycccaaaattagaaagtccaaaccatgggcccagggccccaaggggggcntccaccacccctggggaaatcctttcaagggaatttttcaaaggaacccaggcccctaaacccccnaaccattgggaccggaaaaaaccccccatttcttttttaacctggggaaaaaatttngggaaaaaaaaaaaaaaaaaaa

SEQ ID NO: 296 - DNA, 931 bp, Homo sapiens
  SITE (915): n equals a,t,g, or c
gggctgttcatgtgaagtgtgtggattctcatgccatataacttgtgtaaacaaagctccaaccacttgtccagttcctcctgaacagacaaaaggtcccctgggtatagatcctcagaaaggaataggaacagcatatgaaggtcatgtcaggattcctaagccagctggagtgaagaaagggtggcagagagcactggctatagtgtgtgacttcaaactctttctgtacgatattgctgaaggaaaagcatctcagcccagtgttgtcattagtcaagtgattgacatgagggatgaagaattttctgtgagttcagtcttggcttctgatgttatccatgcaagtcggaaagatataccctgtatatttagggtcacagcttcccagctctcagcatctaataacaaatgttcaatcctgatgctagcagacactgagaatgagaagaataagtgggtgggagtgctgagtgaattgcacaagattttgaagaaaaacaaattcagagaccgctcagtctatgttcccaaagaggcttatgacagcactctacccctcattaaaacaacccaggcagccgcaatcatagatcatgaaagaattgctttgggaaacgaagaagggttatttgttgtacatgtcaccaaagatgaaattattagagttggtgacaataagaagattcatcagattgaactcattccaaatgatcagcttgttgctgtgatctcaggacgaaatcgtcatgtacgactttttcctatgtcagcattggatgggcgagagaccgatttttacaagctgtcagaaactaaagggtgtcaaaccataacttctggaaaggtgcgccatggagctctcacatgcctgtgtgtggctatgaaaaggcaggtcctctgttatgaactatntcagagcaagacccgt

SEQ ID NO: 297 - DNA, 2077 bp, Homo sapiens
  SITE (55): n equals a,t,g, or c
  SITE (2043): n equals a,t,g, or c
  SITE (2044): n equals a,t,g, or c
atatgcaggtttaagccgttttttccataccataccttgtcaagatttgcaagangatgcaagagtcatatccatatacaacaatgggcacttactgaaggccgtcttaaagttacgttkttagtaatstagcaggttactcatttttggatcctatgacagagaggcaaatgttcattgcacacttgagttaagcagtagtgtttgggaagaaaaacagaggagttctattaagacggttgaattaataaaaggaaatttacaaagtgttggacttacacttcgtcttgtccagtcaactgatgggtatgctgggcacgtcatcattgaaactgtggctccaaactcgcctgctgcaaytgcagatcttcagcggggagatcgacttatcgccattggaggtgtgaaaatcacatcaacactgcaagtgttgaagcttatcaagcaggctggtgaccgagtcctggtgtactatgaaaggcctgttggcagagtaatcaaggtgcagtgctgcaagataactttggccagttggaagaaaactttttgtcaagctcatgccaatcgggttatgaagaggaagctgccgggttgacagtagatactgaaagtagagagctggattctgaatttgaagacttggcaagtgatgtcagagcacaaaatgagttcaaagatgaggcacaatcattaagtcatagtcccaaacgtgttccaacaacactttctattaaaccccttggagctatatcaccagttttaaaccgtaaattagctgtaggaagtcacccactaccaccgaaaattcagtccaaagatggaaataaacctccacccctaaaaacttctgagataacagacccagcacaagtgtcaaaaccaacccaaggatctgctttcaaaccacctgtgccaccacgaccacaagcgaaagttcctttgccttccgccgatgctccaaatcaggcagaaccagatgttctcgttgaaaagccagagaaggtggtgccacctcctcttgtagataaatctgctgaaaagcaagcaaaaaatgtggatgccatagacgrtgcagctgcacctaagcaatttttagcaaagcaagaagtggccaaagatgtcacttcagaaacttcctgccctactaaggacagttcggacgaccgtcaaacatgggaatcatcagaaattctttatcgtaataagctaggaaaatggacaagaaccagagcatcctgtttgtttgacatakaagcctgtcacaggtacttaaacattgcattgtggtgcagggatcctttcaagttgggaggtctcatctgtttggggcatgttagtttaaaacttgaagatgtggctttaggatgcctagctacatcaaacacggaatacctttccaaattgagactggaagccccctcacctaaggctatagtcactagaaccgcactacgcaatctgagtatgcaaaagggattcaatgacaaattttgctatggtgacattactattcacttcaaatatttgaaagaaggagaatcagaccaccatgtagttactaacgtagaaaaagaaaaagaaccccatttggttgaagaagtttctgttctccctaaagaggagcaatttgttggacagatgggtttaacagaaaacaaacacagttttcaggatactcagttccagaacccaacatggtgtgactactgtaagaaaaaagtttggactaaagcagcttcccagtgtatgttttgtgcttatgtttgccataaaaaatgtcaagaaaagtgtctagctgagacttctgtttgtggagcaactgataggcgaatagacaggacactgaaaaaccttaggctggaaggacaggaaaccctcttaggcctgcctcctcgtgttgatgctgaagctagcaagtcagtcaataaaacaacaggtttgacaaggcatattatcaatactagttctcgtttattaaatttgcgtcaagtctctaaaactcgcctttctgaacaggaaccgatctcgtagaaacttcacaanncacacacccaacacgtcagacaacgaaggcagt

SEQ ID NO: 298 - DNA, 1557 bp, Homo sapiens
ggcacgagcaccagtgagagaaattcagagaagagactcttatcttcctaggaaccagctgaccttaagaataagtagccattcagaataactgcataatctaatatcattttctatttgaacatcaataattctaagtactattacaaatactacaggcctcctgtcctcttagaatgtgtcatcttctaagaatgagaggtgaaaatgtttcgtaaacttctgatagattacaatcaagagtttcatgtaaatatcttttttctttctgctgcagtaccaatgcactttacagtttccaagttcatcgttaactacctaaattcttagatggctttggggtacatctcagacaggatggaaaccacatggttatatggtagcacttatatacatgttgctttttatgtaaagagtttctatgggctggattttgtcttagtttggcttccccataaagtgattctgcaaaaatgccagtggcaagtgaatgagatagagaagcgaaggcagccgataaagtcttattatcaaaaaagttaccacttggattattggagcttgatcatgctggagacctccaagtgtcagtgttatcccatccagtgggaaacaaattggggtatttatacacaaactcctgtccttcaggagctgaagtctattcctgggaaggtagggagtaattcaggatattcagcaagctgacagagttccagaagccagagaaaagccatcagtgaaaaaatttttaaatgcaagtactgtcagttggatttgcaagtactcacgtggtaaggatgcgggtgtaagggagaggcactaggagcatgttactgactttcgggttaagtattatttcatgatttaatcaccttatctgcttactttcatttttatttttcctaacttcctgcctttcttaatttgtacaaacctgcttactccttccatggactgggtccttgacattcttaatttttaaaaatagctaattcattcttggcacacctctataagattttttaaccctccctctcctagatgattgcaatagcctttctagtgatatgtctatctttgcccttacactcagaatcaacttccccacaatgttacccaaatattattttttaaaatatagtatttaggcgagcacataaaactctttatcatctaggcttaccctcatccactgctgttttccatctacaactgacactccagaaatataaactatttacttgtcattccctgaataaattaggtgttttggccagccacggtagctcatgcctgtaatcccaggactttgggaggcggaggtgggcggatcactttaggtcaggagtttgagaccagcctggccaacatgacaaaacaccatctctactaaaaatacaaaaattagctaggtatgttggcacatgcctgtagtccagctactagagaggctgaggcaggagaattgtttgaacccaggaggcagagtttgcagttagccgagattgcaccactgcactccagtctgggtgacagagcgagacgccatctcaa

SEQ ID NO: 299 - DNA, 1750 bp, Homo sapiens
gattcggcatgaggcacgcagccaacatggctccagtggagcacgttgtggcggatgctggggctttcctgcggcatgcggctctgcaggacatcgggaagaacatttacaccatccgggaggtggtcactgagattcgggacaaggccacacgcaggcggctcgctgtcctgccctacgagctgcggttcaaggagcccttaccggaatacgtgcggctggtgactgagttttcaaagaaaacaggagactaccccagcctctctgccacggacatccaagtgcttgcactcacataccagttggaagcagagtttgttggggtgtctcacctaaaacaagaaccacagaaggttaaggtgagctcatcgattcagcacccagaaacacctctgcacatttctggtttccatctgccctacaagcctaaacccccacaagaaacagaaaaaggacactcagcttgtgagcctgagaacctggaatttagttccttcatgttctggagaaaccctttgcccaacatcgatcatgaactgcaggagctgctgattgacagaggtgaggacgttccaagtgaggaggaggaggaggaagaaaacgggtttgaagacagaaaagatgacagcgatgacgacgggggtggctggataacccccagtaacatcaagcagatccagcaggagctggagcagtgtgacgtccccgaggacgtgcrggttggctgcctgaccacagacttcgccatgcagaatgttctgctgcagatggggctgcacgtgctggcggtgaacggcatgctgattcgtgaggcccggagctacatcttgcgctgccatggctgtttcaagacaacgtctgacatgagccgagtgttctgctcacactgtgggaacaagaccctgaagaaagtgtccgtgaccgtcagcgacgacggcaccctgcacatgcacttctcccgcaaccccaaggtgctgaacccccgcggcctccggtactcgcttcccactcccaaagggggcaaatacgccatcaacccccatctcaccgaggatcagcgcttccctcagctgcgactctcccaaaaggccaggcagaaaaccaacgtgttcgcccctgactacatcgccggggtgtcaccctttgtcgagaatgacatctccagccgctcagctaccctgcaggtccgggacagcaccttgggagctgggcggagacgcttaaatcccaacgcttccagaaagaagtttgtgaagaaaaggtgaagagcgagttcccgcaggcaaattggatgggcgtctggccgccgtggagttccggtgacccatttccccagccgtgtcgtctccaggaccacccgatggaaataacaggcgggcttcacggtgcggctctgtccgcccatgccccgctgggtctgcagggaactggactgtcccatggcctgtgagcaccggagcgcctggctgcctgccaaggaagtgcaattgcataaaaacagaaagaacaacgccctggagccaatcttcaagaaaggaatttccaaaggataatatttttctaataaatgcggctgcaacctcctgtgcatttaattaaataggccaaatttttgctgcttaggtcatctcaaggctgatacttgagctgtgtgcccagagatcatgcatttagatttatatttttgccagaaaatacaaggttataataaaactaagaactaccaaaaaaaaaaaaaaaaaaaaaaaaa

SEQ ID NO: 300 - DNA, 1106 bp, Homo sapiens
tgtttacgccagctcgaattaacctcataaggagacaaaagctggagctccaccgcggtggcggccgctctagaactagtggatcccccgggctgcaggaattcggcacgagatgttgtccatctttctgggccccagggagtggccgtgagggcagggcccaggcacctgtgctggaagggctgagttgctgcccttgcggcccttcctgtgctctcagcagcactggatgtcatcaagcgtttgaatttctgcctttctgataattggaaaatgcgttgttttgtttaactttgcattttctggatgacttacgggggtcagtgtcttcatatgtttgtcagacattccttttgctccgtgactgacttgttcatgtgttttgcccattttgaggaggttgtcgggacatttcactctccagtaaatgtggcccttggcgttactgagtcctaagaggtgtgtgttgccccaggtggagctgatggaggagggagtcggtgcctgtggtgtgggactgaccggctgcctcctgccagtgggcttgtggcctgtggggccatctggccatgagcacttctctctctgtctgccacgacaggggggacaggccccacctcggacacaggctggggctgcatgctgcggtgtggacagatgatctttgcccaagccctggtgtgccggcacctaggccgaggtgagtcacagccctggggagggcgcatggccacggtgttctcaggaagcaaaggggactgtggggtcagggctctttagagcagaccacaggtaaaacagtaagtagaacttgggggtttcttgagtaatgagccacttgtttttcttgatttaaaaaactgactttaaagaatgctaataaatccgcatgggcaacatggcgagaccccgtctcacaaaaaatacaaaaattagccaggcgtggtggctcctgcctgtagtcccagctacttcggagactgatgtggagaattgctagaacccaggagatggaggctgcagtgagctgagatcgcaccactgcgctccagcctctgcaacagagttagaccctatctgaaaaaaaaaaaaaaaaaaaaaaaaaa

SEQ ID NO: 301 - DNA, 1481 bp, Homo sapiens
ggcacgagcggcacgagaattttgccagatggaagtaatggtatggaaatagactttagggctgtctatctccatgtctaaactgtttcagagaccataataatgaccattagtctaagtttggggtagattaagattatctagtaggcgatgagtcacagcatctcataaacaaaacattacgtctttatttattagaccattgcctagaaagttctctctggaacctgagtgctgatgacagaatattctgccatcagtcagtcagagggtacccaactgtggatatcatatggatactgaaccacccataatgcagctaattagttctacccctgaagaaaataactaatacgctagatagagttttgcagtttggttgctggaaatttggtattttcgctctggcttactgctgatctttttgttatcctttttgtaccttttcatgtggaatgtgcttctgctgttccaggaggattattaattgcagtttctttgggactcctgtctgcctcacaggactttattttatgggcttgtgttcgagctacttggaatactctactacaattattccttcaggtgttagccaacttcattttctgttaaatgactctactagctttcttcagggattcggcttctgatttaaccttgtctgacgcagtgatacatttaaatcttatgagagaaagagaccatttttattcttttaccagaatgatttaggatcttatgtcagtttggagaaaatacaataaccaagtatgtgttaagtaactgaagtatattctgtattttagtaaatcttttgaggtagacaaagaggtctgttaagttttaaggaaagaaacaaagatcacaaaccacagcaaaatttatcttttatctctagtaattcatttctctctaggatcattaagagcaatttgaattagagcacaagatagtaatttctatcctataattgtgcaatcatttaagagtagataaaaattaatttcttaaagaatcttggagaatattatctgatgatgattctttattcacctgattacttcttggagaattaagagaaaacaagtgaaggtagatggtgagtttatcaccagcagtagttggaactaattctagtacttaatcatgtcttaactaaggtcctacaaatgtagacagctattatgaataaagaaattttattcataaatcaggccaggcacagtggctcatgcctgtaatcccagcacttttgggaattcagagctggacagattgcttgagcccaggagttcaagatcagcctgggcaacatgacaaaactctgtgcctgaggtcccagctacataggaggctgagaatcacctgagcccaggaggttgaggctgcagtgagccgtgattgtgccactgcactctagcctgactgaaagagtaagactttgtctcaaaaaaaaaacaaacaaaaaaaaaaaaaaaaaa

SEQ ID NO: 302 - DNA, 1144 bp, Homo sapiens
ggcacgagctcgcgggtccgggagcgcggcggagacgatgcctgagatcagagtcacgcccttgggggccggccaggacgtgggccgaagctgcatcctggtctccattgcgggcaagaatgtcatgctggactgtggaatgcacatgggcttcaatgacgaccgacgcttccctgacttctcctacatcacccagaacggccgcctaacagacttcctggactgtgtgatcattagccacttccacctggaccactgcggggcactcccctacttcagcgagatggtgggctacgacggccccatctacatgactcaccccacccaggccatctgccccatcttgctggaggactaccgcaagatcgccgtagacaagaagggcgaggccaacttcttcacctcccagatgatcaaagactgcatgaagaaggtggtggctgtccacctccaccagacggtccaggtagatgatgagctggagatcaaggcctactatgcaggccacgtgctgggggcagccatgttccagattaaagtgggctcagagtctgtggtctacacgggtgattataacatgaccccagaccgacacttaggagctgcctggattgacaagtgccgccccaacctgctcatcacagagtccacgtacgccacgaccatccgtgactccaagcgctgccgggagcgagacttcctgaagaaagtccacgagaccgtggagcgtggtgggaaggtgctgatacctgtgttcgcgctgggccgcgcccaggagctctgcatcctcctggagaccttctgggagcgcatgaacctgaaggtgcccatctacttctccacggggctgaccgagaaggccaaccactactacaagctgttcatcccctggaccaaccagaagatccgcaagacttttgtgcagaggaacatgtttgagttcaagcacatcaaggccttcgaccgggcttttgctgacaacccaggaccgatggttgtgtttgccacgccaggaatgctgcacgctgggcagtccctgcagatcttccggaaatgggccggaaacgaaaagaacatggtcatcatgcccggctactgcgtgcagggcaccgtcggccacaagatcctcagcgggcagcggaag

SEQ ID NO: 303 - DNA, 2585 bp, Homo sapiens
ggcggccgctctagaactagtggatcccccgggctgcaggaattcggcacgaggttttttttttttttttttagtagagacggggtttcgccatgttggccacgctggtcttgaatttctggtcttgattaacccatctcagcctgccaaagtgctgggattacaggcatgagccactgtgcctggctccactttatcttcaatgtctctatttcctcttgtttaaatacaatggctaataagtctagaataacgctaagtaataacaccacactatggtcatgagttcaggttgggctatttataatataatcaatacctatgatgaaaccactgtccaacctcaaactagataattgctgataacaatatagacttattttacttgccatcctcttctcaccaccaaagtaaacattattgggaatttttatcattcttttgttttttatcatatatataatatacacacacataatagtcaattctcattttttgcagactccgtatgtgtgaatttacctcttgctaaaatttatttctaactccagtatcagtacttgctgggcttttgcagccatttgcggacatgcagcatgtgaaaaaatttgaattgcctgctctccatgttcccagctgaggtggaacaaggccttcttgtttcagttcttataaacaagtatccttttcagtctatttagtgccatgtcttttgcatttttgtggattttgctgcttaaagtgacccccacgcacagtgccaagtgttcctaagtgcaagaagactgtgatgtgccgcctggagaaactgaggtaagcttcattcaggaataagtgtcgtgggctaagttcagtgttaatgggtcaaccatatatactaaggtgtcttcaaacagaaacacatgtaacaagtttatgtactgattggttgatgaaactgtgcccagaggttcataggaacccaaccctgtatttcccttgggaataatggttcagtactctctaattcagtgttcatggtgactttataaaacataactactatagataatgagaacagactatacatatatatatacacacacagtcaccgtttagtatccgtggaggattggttccagaaccttccttggatataaaaatcctctgatgctcaagtccctaatatgaagtatttggatataacctgtgcataccttctcatatacttttaagtcatctctagattacttataataccgaatacagtataaacaccatctaatactttgtattgtttagggaaaaatgacaaggaaaaatgtctgtacaggtttagtccagacacaattttccccctcaatattttcaacctgtagttggttgagtccatagatgtggaacccacatatacagacagccaaccgcatgtctaaacaagtttcacttgtttttgaacttctggagtatcataatgtacatgtcttctgacaccagcttttttcattcaacattattattaacattcacctatattgttactcacagctgcaggacaactttatgtccttgttttagatgtgtctcctgtaaacagcatatgattggggtttgttttaatattcaatatttccttgggctagtttaatacttatacatttattgtaattactgatctatttggacttgttttgccatcttttgttttatccaccttttctatgcttatttctcaaatttaaaattttgtttcttccctattatcccaccatctctcatcactattcatttagagattatatatacttctagcaattaacctcggaattttatcatgcatacttaaaaagactaagttgatattaactggctactcccaaaaatgtaagaacactgaaacattttgactctgattaaccttcccaccatgctgtctacttttaacctacctttaacaatttggcctgtcattatcattttgccgataagatctgtttacatttccctacctgtaagaaattatctatcattactatccacactttatgactcccataacttatatttcctgaggtacatatctcagaactgagttccaggctggggttcatgttgcttattactttcaaactattcacctttaggcatcatagtatctaccacttatctgtgcttactacatactaggtgatattctccacaagtgttgattaacctgacatttattaattcatggaatcctcataataccctaatggactatgtatgtttatgatccatatcttatgactcttataatttatctttcctaaggctacacatacctcagaactaggatccaggcctttttgattccccattgccttcactcaccttttcactccaacgtataatttcctgagttcttgaataatgacttatttctaagacacacagtggcgaggcggaactccaggataccagaggaaatggatgtctgaagttacacaggcaagtactctagcctacaaggcctctgggaaatgccatctagtctttgcttaaattgagccactggcagacctcagtataactcaaggctctatcctcgagggggggcccgtacc

SEQ ID NO: 304 - DNA, 205 bp, Homo sapiens
  SITE (1): n equals a,t,g, or c
  SITE (16): n equals a,t,g, or c
ncccaaccccactgcnccctccctccccaccacccacagcctcggacaggggcctggctaccccatccccctccccatgcccagtcccacgccccctggcagcgctcaaaccagtgaggctgcacagcttccaggaacatgtcttcaagcgagctagcccttgtgagctgtgccaccagctcatcgtaggaaactccaaacaggg

SEQ ID NO: 305 - DNA, 508 bp, Homo sapiens
gccgtctcaaaaaaaaaaaggttaggaatcacaaawtgtgtaaatatatagcaactttaagaagagagaagaatgcttataacctagtgaatatttctgctgagccttagttgtcttgtctaaaggaaaaaagagggaattgtagaataaaagtatttgttagtggaaattattgacctgaaaccatatcatattgttagtgtaactgaatgtatcagaaattgttcctatgtaggtattctgtgaaactggtttctaaaatgttacaggaaactgtttcctttttttttgtttgtttgtttaagtggaggtgggaggaggtagggaagaggtctgaatattaaaatatgtttatgttcatgtgttcataatacgttcctttttctctctgtgtgtgtataaaagtgccttgctcatgaatgcatttttgctattcacttcgaaaggaagcctttccccagcttggcagctgaataaaccaatagctttgtacatgcaaaaaaaaaaa

SEQ ID NO: 306 - DNA, 467 bp, Homo sapiens
gggtcgacccacgcgtccggtgaagattagcaacgtggctttggattctatgcattggcaaaatgactctgtccagatcatagcaagtgtcagtgatttaaaaagcatggatgaatttcttctgaaaaaggtgaatgacctagataatgaagacagcaagaaggatacactagtggatgttgtatttaaaaaagccctgaaggaatttcggcagaatatcttcagcttttattcatctgcattggcgatggatgatgggaaaagcatacggtataaagacctctatgcactatttgaacagattctggaaaagacgatgaggcttgagcagcgtgattcactgggtgaatctccagtgagagtttgggtcaacacttttaaagtgtttttagatgaatatatgaatgaattcaagacttcagattgcacagccacaaaggtgccaaaaacagaaaaaaaaaaaaaaa

SEQ ID NO: 307 - DNA, 1296 bp, Homo sapiens
cggctctggggcagctaggccggggtcacctgacccaggtggtcctgcgtctgggggaggacaacgtggattggacggaggaggccttgggtgagcgcttcctgcaagccctggagctgctcatcggcagcctggagcaggccagcctgccctgccacttcaaccccagcgtgaacctcttcagcagcttgcgtgaggaggagattgacgacattggctatgcgctatacagtggcctacaggagcccgaggggctgctctaggtgggtggaaacgggtggttgccatgttttctaatgctggggagctgcacccacctcccttccagggatttgaatagtggtttttctctagctttttgccagacaaggcaggtacattacttaaacccaggcatcaggatgtgcttgggctatggtggccataaaccctgagcccagagagcttgggtcactgtcacctgagtgcagctgggctgcctcaggcagcttggagtgccagccattcctgcaagcaccgtttcagctcttggggccaaccccaggacctttggctctgtccatcaccagcaaccaatccaccaacagaatgtggtttctgccatcctgggcagaagctgaaggccagcttcacatttctgctgagagaaggtgacttaacgccttttccggccctagctccaggcgttttgaggcgtctggtgcctgatggtaggtatggtgtgtttgttctgtcccccaggggctggagtcacctggtgcccctgaaggacagatttttggctgttaaaggatggcattttcctgctgtcttctgtgcgtttagttttcttgctgagcgggagctcagtatgacttgccacccacctgatacctcagggcaaggccctttttccctccagccaggtgagtgttttcttcaggcagctgagggtcctgggggagctgaggctctgtgctgcacccccagcccacagctggggcatctcactggagctgttccaggcccccctggagagcagaggacctgatccccccctagagaggtccggtgtgcacagccggcctcccagtgtgccaaaatgaactgctctcagctgatggctgtattctgactttgaagcctgttaagaggtagcaagggggctagaggagggagattccccctcccctcccaagtgaccctcctgcctctggtatccttccttttgaaacgaagctcagcttcgaagatgtaacaagaataaaaggaaaaaattctaatgtaaaaaaaaaaaaaaaaaaaaaaaaaaaaaaa

SEQ ID NO: 308 - DNA, 782 bp, Homo sapiens
  SITE (645): n equals a,t,g, or c
  SITE (683): n equals a,t,g, or c
  SITE (693): n equals a,t,g, or c
  SITE (703): n equals a,t,g, or c
  SITE (761): n equals a,t,g, or c
  SITE (767): n equals a,t,g, or c
  SITE (780): n equals a,t,g, or c
cttgtgagaccacgcacaaggaattaggctttggctgcagcggtgctgaagcccatgctatgacagaagaagcaggcctttgaagctatcctcgggttaagaaatggtgccctaaagaggcaagcatccctttctccgttctgctgtaagacaccacatctgaaggagacagacttgaggcattcacaagcatccaaggatactggctcactgctggcttcctgtactttcttgagaaaagtgttttctttttactgactctcactgcttccttttggcctggtaccactggtggaacctggcagataatgggatttgaggagttaagtatctgttgacactgcagatactcttaaattagttaatcagactcaaatgggtcagtgctttcccttgatcttttgttgaagccttttccagaacgttgtctccaaagtgcatcctccctttggtctggaagttctgtggctaccctgtaccactggggtcaacgttttccagttggaagaggactacagggagagagggcggggttattggaaraaraagaagaamaaaagaactagataaaggagggcacatccctctcacttccgcttttcccttacctttctgctctcgggacccttaattcttcgtcacggnggccaggaccatttttgacccttgtccgggcccgggancccccccggncggaccccancccccgagcatggggaacggcgcttgttccagcgcgggggctggttttcttccggggnctctcngttgctgcctccngg

SEQ ID NO: 309 - DNA, 787 bp, Homo sapiens
  SITE (29): n equals a,t,g, or c
  SITE (34): n equals a,t,g, or c
cactggaagacccgcgctcggttccctantaacngccgccagtgtgctggaattcggctttacgkytgcgagaagaykwyagaaggggggtgaatgaccttcctagagcacttgagcagattcattatattttaaaaccagatggagtgtttatcggtgcaatgtttggaggcgacacactctatgaacttcggtgttccttacagttagcggaaacggaaagggaaggaggattttctccacacatttctcctttcactgctgtcaatgacctgggacatctgcttgggagagctggctttaatactctgactgtggacactgatgaaattcaagttaactatcctggaatgtttgaattgatggaagatttacaagaacaaaagtccagaatgttgacctaattttacaaaacaagctgcatatcagctgatgaatgcatgagaaattttcaaggctttcacagtggtcttaaggtatgggtgagagtaactgtgcttggaatagaaaagccctgctgcatcgagacacaatgctggcagctgcggcagtgtacagagaaatgtacagaaatgaagatggttcagtacctgctacataccagatctattacatgataggatggaaatatcatgagtcacaggcaagaccagctgaaagaggttccgcaactgtgtcatttggagagctaggaaaaataaacaaccttatgccaccggggaaaaaatcacaataaatatttattcagtgttaaaaaaaaaaaaaaaaaaaaaaaaaaaaaaaaaaa

SEQ ID NO: 310 - DNA, 680 bp, Homo sapiens
  SITE (653): n equals a,t,g, or c
aacatcctgaagcggacagcacagggctctgaagacgaagacatggccaccaaggccttcaatgcgctcaaggagctggtgcaggagtgcaatgctagtgtacagtccatgaagaggacagaggaactcatccacctgagcaagaagatccactttgagggcaagattttcccgctgatctctcaggcccgctggctggttcggcatggagagttggtagagctggcaccactgcctgcagcaccccctgccaagctgaagctgtccagcaaggcagtctacctccacctcttcaatgactgcttgctgctctctcggcggaaggagctagggaagtttgccgttttcgtccatgccaagatggctgagctgcaggtgcgggacctgagcctgaagctgcagggcatccccggccacgtgttcctcctccagctcctccacgggcagcacatgaagcaccagttcctgctgcgggcccggacggaaagtgagaagcagcgatggatctcagccttgtgcccctccagcccccaggaggacaaggargtcatcagtgagggggaagatttcccccaggttcartgtgttaggacatacaaggcactgcacccagatggagctgaccttggagaagactgacatcctgttcagtnaaggacctggaccagtgacggctggct

SEQ ID NO: 311 - DNA, 379 bp, Homo sapiens
  SITE (56): n equals a,t,g, or c
  SITE (85): n equals a,t,g, or c
  SITE (344): n equals a,t,g, or c
gatgcctcgggctgagctagatcctgccgagccgcgctctctgaggcgtcggcggnggcgcccctcccgccgtccccggtccggnccaaggagacctgcagagccgcggccatggaggcatctggctgtaccagttccggctcattgtcatcggggattccacagtgggcaagtcctgcctgatccgccgcttcaccgagggtcgctttgcccaggtttctgaccccaccgtgggggtgggattttttctcccgcttggtggagatcgagccaggaaaacgcatcaagctccagatctggggataccgcgggtcaagagaggttcagatccattcattcgcgcnaattacagggaattcagtaggtgggttttctctta

SEQ ID NO: 312 - DNA, 706 bp, Homo sapiens
  SITE (193): n equals a,t,g, or c
  SITE (395): n equals a,t,g, or c
  SITE (689): n equals a,t,g, or c
gtgcgtctttggtcaggttgttccttggctaagagggcagtcgtcgcggacccacgcggttagcaaggcttagtgctcgggccggccgccttcacttccctcccggcttttcctcccgacttatccactttaggggcstctcggagtgccggaggcccccggggaagagcggggtgccggtgtccgctccggnctcggatgggaagtggtgggaggagcgacccgggatgttcagtctgatggccagttgctgcggctggttcaagcggtggcgggagcctgtcagaaaggtgactcttttgatggtgggacttgataatgctggtaaaaccgcaacagcaaagggaatccaaggagtccatggaaaaattgtcttctgcaaaactggtccctgntgctgctgatctaaaggaataccctgaagatgtagctcctactgttggattttcaaaaattaaccttagacaaggaaagtttgaagtcaccatctttgacttgggaggtggaataagaattcggggaatctggaagaattactatgctgaatcctatggggtaatatttgttgkggattcmagtgatgaagagagaatggaagagacaaaagaggctatgtcagaaatgctaagacatcctaggatatcgggaaagcctatattggttttgggcaaataaacaagataaaaaanggagctttaggagaacc

SEQ ID NO: 313 - DNA, 674 bp, Homo sapiens
  SITE (667): n equals a,t,g, or c
tcaatgtatagttcctcggcgcgcctctgaccttttcccggagctcttcaatcccagaagctatagcacaacggctgaatcgccaggacccccggggaggcgtggcttcaggaccggaagaagctcctgttgccaagggaacggtgcctgccaagggcctgctcagcgactgatgcacagactgctgcagaggctgccggttttcccaacttctagagacggctttgctcattaccaggcatccttcccatgtaggcatcgagaagaaggctgagggaccctcgcaccagatttccatcccggagaccgatacgagtgcgtccattcctgttgccagctcctgcgccctccggactaacctcaaaaaccagctggtttgtaaatatttgaatcacattatgggattgctagacagactttcagtcttgcttggcctgaagaagaaggaggttcatgttttgtgccttgggctagataatagtggcaaaacgacgatcattaacaaacttaaaccttcaaatgctcaatctcaaaatatccttccaacaataggatycagcatagagaattcmaatcatccagtttgtcatttacagtgtttgactgtcaggtcmaggaagatacagaatctctgggacactattataagaaggcagctattattttnggcatga

SEQ ID NO: 314 - DNA, 727 bp, Homo sapiens
  SITE (595): n equals a,t,g, or c
  SITE (599): n equals a,t,g, or c
  SITE (620): n equals a,t,g, or c
  SITE (654): n equals a,t,g, or c
  SITE (661): n equals a,t,g, or c
  SITE (692): n equals a,t,g, or c
gtttcgctgttgctggctttttcaggagctgctcgctcgcagccagagacgctgcttttttttttccgggttcggagccgttccggatgctttaggctgccggatgtctgatctccggataactgaggcgtttctgtacatggattatctgtgttttagagcactttgctgcaagggaccaccacctgcacgaccagaatatgacctggtttgcataggcctcacaggttctggcaaaaccagtctgttgtccaaactctgcagtgaaagccccgataacgtcgtgtcgaccacaggttttagtattaaagcagtgccattccagaatgccatcttgaatgtaaaagaacttggaggggctgataacatccggaaatactggagccgctactaccaaggatctcaaggggtaatatttgtattagacagtgcctcttcagaggatgatttagaagctgctagaaatgagctgcactcagctcttcagcatccacagttatgcactttaccctttttaatattggccaatcaycargacaagccagcagcttgctcagtacaagaagtatggctcattagcatgacaactctttgncttncttgcttggacttttgcttgncacgttggaacctggaaaaaatgcatgtaattangaatggngctgggtatgctgcttttcaacatgaaaccntagttttcataggaaagcagaaaagcctatattaa

SEQ ID NO: 315 - DNA, 505 bp, Homo sapiens
  SITE (484): n equals a,t,g, or c
  SITE (489): n equals a,t,g, or c
ggcacgagggggcaagagcggcccccggggcyggtgtgtgatccctcgggatgaccccctsgtgctctatgtctatgctgcccctcaggacatgagggctcacacctccatccccctgctgggctaccaggtgactgttgggccccagggggaccctcgggtcttccagctacagcagtcaggccagctctacaccttcaaggccgagacggaggagctgaagggccgctgggtgaaggccatggagcgggcggcagtggctggagccccagctggcccaacgatggggacctgtccgactgagccactgccagccgytytcctgcccacctytccccaccctgaacccagytcctgccamagaytgacctgkggcytaagtgacccaytgscccaatggtgttttcagagttttatctgtttcccaggttggagtgcaaaaacatggttataaagcttgttttccgggttcatgatcctccgnttagnttccaagtagttggtt

SEQ ID NO: 316 - DNA, 1091 bp, Homo sapiens
  SITE (1059): n equals a,t,g, or c
ggaagaggctcactggccacacgtgggcttctctatgctcaggttttctgcaccaggctgacggatgcggggatccctccagaagtcatcatgggcatattctctaacatctcctccatccaccgcttccacgggcagttcctgctgccggagctgaagacgcggatcacggaggagtgggacacaaacccacggctcggggacatcctgcagaagctggccccattcctgaagatgtacggcgartatgtcaagaactttgaccgagccgtagggctggtgagcacgtggacccagcgctccccactgtttaaagacgtcrtccacagcatccagaagcaggaggtatgcgggaacctgacgctgcagcaccacatgctggagcccgtgcagagggtcccccggtacgagctgctgctcaaggactatctgaagaggctcccgcaggacgccccagaccggaaggatgcggagaggtccttggagctcatctccacagccgccaaccactccaatgctgccattcggaaagtggagaaaatgcacaagctcttggaggtgtacgagcagctgggtggggaakaagacattgtcaacccggccaatgaactgatcaaggagggccaaatccagaaactgtcagccaagaacggcaccccccaggaccgccacctcttcctgttcaacagcatgatcctttactgtgtgcccaagctgcggctcatgggccagaagttcagcgtccgggagaagatggacatctcaggcctccaggtgcaggatatcgtcaagccaaacacagcacatacattcatcataacgggwagaaaaaggtccctggagctgcagacgcgatcatccaggccaccatcgagaagcacaaacagaacagcgaaaccttcaaggcttttggtggcgccttyagccaggatgagggaccccagcctctytccagacatkgccttattcacggaggcaccagccctktgggagcctgtkggtkgaccaccgaaggcagtttcgggtgcagcagggyttggagcccagaaaattttcctnttaagaccagacgtgacaaggagagcagagct

SEQ ID NO: 317 - DNA, 488 bp, Homo sapiens
gaaaataggactgaccaagaagcagaaaagcaagatgaatgatgtgaagcttgctgtcttgggtggtgaaggaacaggcaaatctgcccttacagtgaggtttcttactaagcgattcattggagaatatgcttctaattttgaatctatctataagaagcacttgtgtttggaaaggaaacaactaaatctagaaatatatgacccttgttctcaaacacagaaagcaaaattctccctcacaagtgagcttcactgggcagatgggtttgttattgtgtatgacatcagtgataggtcttcatttgcttttgcaaaagcgctgatctacagaatccggggagccacaaactagtcattgtaaaagagctgtgggaatcagcagtgtttttggttggcaacaaacgagatctttgtcatgtgcgagaggttggctggggaagaagggcaaaagctggcactggaaaaccgatgccaattctgtgaac

SEQ ID NO: 318 - DNA, 346 bp, Homo sapiens
  SITE (321): n equals a,t,g, or c
  SITE (333): n equals a,t,g, or c
gggcgtggaaggggttgtatggcataggagacatgttggcccagaaccscmcccsccacttaggccttggctctcctgtccatctccccaaccagactcggtgaaatacctggagtgctcagcyctcacccagagaggcctgaaaaccgtgttcgacgaggccatccgggccgtgctgtgccctcagcccacgcggcagcagaagcgcgcctgcagcctcctctaggggtaagagtyccccactctagtgcccaactyccatacacagcaagccctggctgarcagtggcctttkgttcamtgtgaatggcatttagccangacagaaagaangtggtatggagga

SEQ ID NO: 319 - DNA, 316 bp, Homo sapiens
  SITE (308): n equals a,t,g, or c
aattcggcagagctgcgagcctaggctgtccccgccagccaccacctggctggcagcagctgtttacaggagtatggactgcccttcatggagaccagcgccaagacgggcctcaacgtggacttrgccttcacagccatagcaaaggagttgaagcagcgytccatgaaggctcccagcgagccgcgcttccggctgcatgattacgttaagagggagggtcgaggggcctcctgctgccgccctttgaacctggctgagctcagtcctcttgaggaagccgcccagtccctagaaaggctggacanagggtttt

SEQ ID NO: 320 - DNA, 535 bp, Homo sapiens
  SITE (477): n equals a,t,g, or c
  SITE (518): n equals a,t,g, or c
  SITE (524): n equals a,t,g, or c
aatcggtgtgggtttcttctcagtttgcacagcagatcactgggatgcggttctgtgaagcaagtgccaaggataacttcaatgtggacgagatatttttgaaacttgtcgatgacattctgaaaaaggtaaaaaaaagaatctacattataaaagtatatcatctgaaacctgttgtttcctttattgcttttttattgagaattttgtatttagaaaccaaaatacagtagttgtgctcaggcgcaagaaccaggtawggttgttaactcagccacagcacccggccgctgtagccgtttcccacccaggggcttctggtgtccttggggttggtatatgacatacttgcttcgccttaagatacagcagggtagacttaacagggtgtagcaatatgctgtgtttatttgacatttgcttgttttcccacccccgtttttctgtgaggattcagttggagacctagccaagtcngcaggtgtcttaggcggaaaagagagcccctggtgctgcgnttgcancccttcccgtt

SEQ ID NO: 321 - DNA, 959 bp, Homo sapiens
  SITE (652): n equals a,t,g, or c
  SITE (705): n equals a,t,g, or c
gcagtggcaagatggcgtccctggatcgggtgaaggtactggtgttgggagactcaggtgttgggaaatcttcgttagtccatctcctatgccaaaatcaagtgctgggaaatccatcatggactgtgggctgctcagtggatgtcagagttcatgattacaaagaaggaaccccagaagagaagacctactacatagaattatgggatgttggaggctctgtgggcagtgccagcagcgtgaaaagcacaagagcagtattctacaactccgtaaatggtattattttcgtacacgacttaacaaataagaagtcctcccaaaacttgcgtcgttggtcattggaagctctcaacagggatttggtgccaactggagtcttggtgacaaatggggattatgatcaagaacagtttgctgataaccaaataccactgttggtaatagggactaaactggaccagattcatgaaacaaagcgccatgaagttttaactaggactgctttcctggctgaggatttcaatccagaagaaattaatttggactgcacaaatccacggtacttagctgcaggttcttccaatgctgtcaactcartaggttttttgatagggcatagagaagagatacttttaagagaaggtaatcngatccgaggcttcttgactcgaaaagattgggccggaccattaaagcgcttcnttgcgcggattagcatcctttggaagtgtgcaacatgcaatttctcagcacttgcggtcaatatcaccagctttacaactctaacggcgcacgtccctatggaataaggggctcgagggggggatcttcttctcttcccggaaatacctgaataggtcgaacgagcgcggtaaaaacttttccggccttggtatcccggtagggcgacgttttcaccggagagctctttgaccggggtcggccatctttggctt

SEQ ID NO: 322 - DNA, 576 bp, Homo sapiens
  SITE (529): n equals a,t,g, or c
  SITE (541): n equals a,t,g, or c
  SITE (550): n equals a,t,g, or c
  SITE (556): n equals a,t,g, or c
ggatttaaatacctcctcatttgcagagtatcttcagccttcaacaaaatagaatgaaaacaacatatttaaaaaatctaacaccgaaacaccaaattaatccaagaatccactgagttcctccccgggcagaagaaatcaccattccagctgatgtcaccccagagagagttccaacacacattgtagattactcagaagcagaacagagtgrtgaacarcttcatcaagaaatatctcaggctaatgtcatctgtatagtgtatgccgttaacaacaagcattctattgataaggtaacaagtcgatggattcctctcataaatgaaagaacagacaaagacagcaggctgcctttaatattggttgggaacaaatctgatctggtggaatatagtagtatggagaccatccttcctattatgaaccagtatacagaaatagaaacctgtgtggagtgttcagcgaaaaacctgaagaacatatcagagctcttttattacgcacagaaagctggtcttcatcctancagggcccctgnactggccanaagganaaggagatgaaaccagcttt

SEQ ID NO: 323 - DNA, 725 bp, Homo sapiens
attccagaaaagagtactggaatacttggctgtcagacagctcaaaaataacctgaagggcccaatcctatgctttgttggccctcctggagttggtaaaacaagtgtgggaagatcagtggccaagactctaggtcgagagttccacaggattgcacttggaggagtatgtgatcagtctgacattcgaggacacaggcgcacctatgttggcagcatgcctggtcgcatcatcaacggcttgaagactgtgggagtgaacaacccagtgttcctattagatgaggttgacaaactgggaaaaagtctacagggtgatccagcagcagctctgcttgaggtgttggatcctgaacaaaaccataacttcacagatcattatctaaatgtggcctttgacctttctcaagttctttttatagctactgccaacaccactgctaccattccagctgccttgttggacagaatggagatcattcaggttccaggttatacacaggaggagaagatagagattgcccataggcacttgatccccaagcagctggaacaacatgggctgactccacagcagattcagataccccaggtcaccactcttgacatcatcaccaggtataccagagargcaggggttcgttctctggataaaaacttggggccatttgccgarctgtkgccgtgaaagtkgcaaaaaggacagcataaggaaacccaatttg

SEQ ID NO: 324 - DNA, 427 bp, Homo sapiens
  SITE (422): n equals a,t,g, or c
ggagcccgagccgctcctcccaatggcgaagaagacgtacgacctgcttttcaagctgctcctgatcggggattccggagtggggaagacctgcgtcctttttcgtttttcggatgatgccttcaatactacctttatttccaccataggagcaaaactgaatctcgaaagataaatgaagtttaccaggaaaagaaaactgggatgaggagaggatttacgaagtagcatatgctaaacgagagacatgagaaaacatgatgatcagggatgtcatgtagactgaagactttgatactaagaggcattttcacaattttatcctgaaagcatagagaaaacaaatcaacttgtcattttcaaaaacttaccctggctgtaatctcaataaaaggacatcttttaaagtcaaaaaaaaaaanaaaaa

SEQ ID NO: 325 - DNA, 450 bp, Homo sapiens
ggcacgagggcgaacagccccgacgcgaggacggggaaaccaaggcggcagcagggagaccctgaccgaggttccctgggaaccagtggtcgaagggctgagctgtgtggccagacaagaggtccctgccctcccccagtgagccctgctgttcccgtgggagccatgaagctgaacgagaggagtgtagcccactatgcactcagcgactycccagcggaccacatgggsttyctgcgcacctgggggggcccagggaccccaccgacccccagtggcactggccgaagatgytggtttgtcctcaagggcaamctgctattctyctttgagagtcgcgagggccgggccccaytgagcctggtggtgytggaaggctgcacagtggaactggccgaggctcccgtgcccgaggagtttgcctttgccatctgctttgatgccccctgg

SEQ ID NO: 326 - DNA, 417 bp, Homo sapiens
  SITE (25): n equals a,t,g, or c
  SITE (27): n equals a,t,g, or c
  SITE (28): n equals a,t,g, or c
ggttcatgatcttgtggatagctgngnnccgggagacacagtgactattactggaattgtcaaagtctcaaatgcggaagaaggttctcgaaataagaatgacaagtgtatgttccttttgtatattgaagcaaattctattagtaatagcaaaggacagaaaacaaagagttctgaggatgggtgtaagcatggaatgttgatggagttctcacttaaagacctttatgccatccaagagattcaagctgaagaaaacctgtttaaactcattgtcaactcgctttgccctgtcatttttggtcatgaacttgttaaagcaggtttggcattagcactctttggaggaagccagaaatacgcagatgacaaaaacagaattccaattcggggagacccccacatccttgttgtttt

SEQ ID NO: 327 - DNA, 1297 bp, Homo sapiens
  SITE (8): n equals a,t,g, or c
  SITE (1239): n equals a,t,g, or c
  SITE (1280): n equals a,t,g, or c
  SITE (1283): n equals a,t,g, or c
  SITE (1294): n equals a,t,g, or c
  SITE (1297): n equals a,t,g, or c
aaccggtnccggaattcccgggtcgacccacgcgtccggaaactgggaaaaagtctacagggtgatccagcagcagctctgcttgaggtgttggatcctgaacaaaaccataacttcacagatcattatctaaatgtggcctttgacctttctcaagttctttttatagctactgccaacaccactgctaccattccagctgccttgttggacagaatggagatcattcaggttccaggttatacacaggaggagaagatagagattgcccataggcacttgatccccaagcagctggaacaacatgggctgactccacagcagattcagataccccaggtcaccactcttgacatcatcaccaggtataccagagaggcaggggttcgttctctggatagaaaacttggggccatttgccgagctgtggccgtgaaggtggcagaaggacagcataaggaagccaagttggaccgttctgatgtgactgagagagaaggttgcagagaacacatcttagaagatgaaaaacctgaatctatcagtgacactactgacttggctctaccacctgaaatgccgattttgattgatttccatgctctgaaagacatccttgggcccccgatgtatgaaatggaggtatctcagcgtttgagtcagccaggagtagcaataggtttggcttggactcccttaggtggagaaatcatgttcgtggaggcgagtcgaatggatggcgagggccagttaactctgaccggccagctcggggacgtgatgaaggagtccgcccacctcgctatcagctggctccgcagcaacgcaaagaagtaccagctgaccaatgcttttggaagttttgatcttcttgacaacacagacatccatctgcacttcccagctggagctgtcacaaaagatggaccatctgctggagttaccatagtaacctgtctcgcctcactttttagtgggcggctggtacgttcagatgtagccatgactggagaaattacactgagaggtcttgktcttccagtgggtggaattaaagacaaagtgctggcggcacacagagcgggactgaagcaagtcattattcctcggagaaatgaaaaagaccttgagggaatcccaggcaacgtacgacaggatttaagttttgtcacarcaagctgcctggatgaagktcttaatgcacttttgatggkggtttactgcaagamcagacctggnctgttaaatacaaactggaggtccaaatcttaaatttttanaanttaaagtattnaan

SEQ ID NO: 328 - DNA, 424 bp, Homo sapiens
  SITE (395): n equals a,t,g, or c
  SITE (419): n equals a,t,g, or c
  SITE (423): n equals a,t,g, or c
tcgagttttttttttttttttttttgagcaaagcgtacaaaggttccaagggacaggaccaagaacgaggggctgagacatttacaacagcaggcattttctcttcctcttcttcacgggaggcgggcagaggactgctcggatcgcttcgtcaaacactgtcttgaggcctcgctgtgtgagcgccgagcactccaggtattttacagcacctacaggaaacacgaccacacggcaatgtacactcgaccccactctcttctgatcacaccaccagcgggaggcagctcctggggcccgggcgccttctgccggctcccagccctgcttccaccttccaacgctgacgttaagacccacagggccttgccagctggttcccaagagtacaccangcccttgaattgggagacacacancctnc

SEQ ID NO: 329 - DNA, 301 bp, Homo sapiens
  SITE (271): n equals a,t,g, or c
  SITE (278): n equals a,t,g, or c
  SITE (283): n equals a,t,g, or c
ttgtggcagggtccttggcagtgtctgtggctgacatgaccgctccagtcgtgggctcttctggaggggtgtatgctctcgtctctgcccatctggccaacattgtcatgaactggtcaggcatgaagtgccagttcaagctgctgcggatggctgtggcccttatctgtatgagcatggagtttgggcgggccgtgtggctccgcttccacccgtcggcctatcccccgtgcmctcamccaagctttgtggcgcacttgggtggcgttgncgttggnatcanctggggcttggtggtcct

SEQ ID NO: 330 - DNA, 351 bp, Homo sapiens
  SITE (206): n equals a,t,g, or c
  SITE (283): n equals a,t,g, or c
  SITE (331): n equals a,t,g, or c
tcagacgcggtttaaaaatccggaagaattcggcaaagtgaccctgcgcgtaaacagtgacggctckgtggtacgcctgaaagatgtcgcacgggttgaacttggcggtgaaaactataacgttatcgctcgtatcaacggaaaaccggcggcgggcctggggattaagctggcaaccggcgcgaatgctctcgataccgcgaaanccattaaggcaaaactggcggaattacagccattcttcccgcagatggaaaggttctctacccttatgacaacacgncattcgtccagctttctattcacgagggttaaaaaacgttgtttcgangccattaatgctggtgttcc

SEQ ID NO: 331 - DNA, 479 bp, Homo sapiens
  SITE (417): n equals a,t,g, or c
gcaaggcagcaggatggaggggtttgtaaaaatgccttccacctaccctgctgggcttgccgaggaggctctgagtgtgtgaaggggaagacaattatcgctaggctggagaatagaaagagcaccatcagtccagtgagttgcaagcctaatgctcacctgcagagacagaattcctgagtgaacgaacagagcagctcctcttccatctccagaaatgacctccaccttcaacccccgagaatgtaaactgtccaagcaagaagggcaaaactatggcttcttcctgcgaattgagaaggacaccgagggccacctggtccgggtggttgagaagtgtagcccagcagagaaggctggccttcaagatggagacagagttcttaggatcaatggtgtctttgtggacaaagaagnacatatgcaggttgtggatcttgtcagaaagagtggggaattcagttgactttactagttct

SEQ ID NO: 332 - DNA, 922 bp, Homo sapiens
aattcggcagagcagcgggcacgtscaacgaggaggaatgctggaacgggcacagcaaagccagatacttgcctgagatcatgaatgatgggctcaccaaccagatcaayaatcccgaggtggatgtggacatcactcggcctgacactttcatcagacagcagattatggctctccgtgtgatgaccaacaaactaaaaaacgcctacaatggcaatgatgtcaatttccaggacacaagtgatgaatccagtggctcagggagtggcagtgggtgcatggatgacgtgtgtcccacggagtttgaagtttgtcaccacagaggcccccgcagtggatcccgaccggagagaggtggactcttctgcagcccagcgttggccactccctgctctcctggtctctcacctgcattgtcctgggcactgcagagactgtgcagataatcttgggtttttggtcagatgaaactgcattttagctatctgaatggccaactcacttctttcttacactcttggacaatggaccatgccacaaaaacttaccgttttctatgagaagagagcagtaatgcaatctgcctccctttttgttttcccaaagagtaccgggtgccagactgaactgcttcctctttccttcagctatctgtggggaccttgtttattctagagagaattcttactcaaatttttcgtaccaggagattttcttaccttcatttgcttttatgctgcagaagtaaaggaatctcacgttgtgagggtttttttttttctcatttaaaataaaaaaggaagaaaraaaataattttccttgtaaaatcgggccaaaccccaagacagctacattttcaacaaaaaagcaaacagagaaaaataaatgaactttaacactgtaagttcagcattgacagcc

SEQ ID NO: 333 - DNA, 716 bp, Homo sapiens
acttacagccaaacaactcggagcaacaccctgccttcagatgtgggtaggaagtcagtaaccctgagaaaaatgaaacaagaaataaaggagatcatgtctccaactcctgtggagctgcacaaggtgaccttgtacaaggactctgacatggaggactttgggttcagtgtagcagatggcttactggagaaaggagtgtatgtcaaaaatattcgcccagctgggccaggagatcttggtggcttaaagccctatgacaggctcttacaggtgaatcatgtccgaaccagagactttgactgctgccttgttgtgcccctcatagcagaatccgggaataagctggacctggttattagtagaaacccactggcttcacagaagtctatagaccaacagagtctaccaggagattggagtgaacagaacagtgcttttttccagcagcctagccacggtggtaatttggagacacgagaacccactaatacattatagcaacgctttttataaagcaggacaaaagacaatatctacatggtgctaaaaatcctttaagatttctgtgacctttgaagcacagataatcaatcaacgtggcattaactgcaagcacaggggtcttttaaatctctctcatggctcatgttcacttcccttttcaagttgaagaggtttcttttttggtgaccactatggtatatgggtgggca

SEQ ID NO: 334 - DNA, 464 bp, Homo sapiens
  SITE (419): n equals a,t,g, or c
  SITE (434): n equals a,t,g, or c
ggacaacttctgcaaggcggtttctagtgcaaatcccctgctcagggtcttcatccagaaacgagaggaggccgagcgtggcagcctcggcgcgggctcgctgtgcaggcggaggcgggcgctggcgctgcgtgatgaaggaccccggcggcgtgcacacctggacatcggcctcccgcgcgacttccgccccgtatcatccatcatcgatgtggacctggtccccgagacgcaccggcgagtgcggctgcaccggcacggctgcgagaagccgctgggcttctacatccgcgatggcgccagcgtgcgcgtgaccccgcacgggctggagaaggtgcccggcatcttcatctcgcgcatggtaaccgggggcctggcggagagcaccgggctgctggctgtgaatgacgaggtcctgnaggtgaacggcattnagttgccgggaagagctggaccaagtcacg

SEQ ID NO: 335 - DNA, 922 bp, Homo sapiens
  SITE (40): n equals a,t,g, or c
  SITE (891): n equals a,t,g, or c
  SITE (894): n equals a,t,g, or c
  SITE (911): n equals a,t,g, or c
  SITE (918): n equals a,t,g, or c
gcctgggttcttcgagtaacttgcagttcaaggcggaacnatttaaaatcccatcaacaccaagatatccgcggagtgtcgtgggctccgagagaggttcagtgtcacattctgaatgcagcactcctccacagtcacccctgaacatcgacaccctgtcctcttgtagccagtcccagacctcagcctccacattgcccagaatcgctgtcaaccccgcgtccctcggggagcggagaaaggacaggccttatgtggaggagccacgccacgtgaaggtgcagaagggctcagagccgctgggcatctccatcgtgagtggagagaagggcggcatctacgtctccaaggtgaccgtggggagcatcgctcaccaggctggcctcgagtatggggatcagttactggagttcaacggcataaacctgcggaaccgccacggarcarcaggcgcsgctcatcatcgggcarcagtgtgataccatcaccatcctggcccartacaacccccacgtgcaccagctcagcagccactcccggtccagctcacacctggaccctgccggtacccactccactctccagggcagtggcaccaccaccccggagcatccatctgtcatcgacccactgatggagcaggacgaggggcctagcacccccccagccaagcagagcagctccaggattgcgggagatgccaacaagaagaccctggagccacgcgtttgtcttcatcaaaaagtcccagctggagttggggtgcacttgtgtggtgggaacctgcatggggtgtttttggccgaagtggaagatgacatcctgccaaggtccttgacggcttcgtgccaaggactcatccttggattattgcagctttgaagttcgganaanaaattggaggaattttntttgganatgt

SEQ ID NO: 336 - DNA, 1421 bp, Homo sapiens
ctgctttcttatctcacgatttaacagggaatagttcaggctgtgttgatgtatcaaacccgcagaacataccaaaacagcaataacattgcggtagtgcatcttttaaaaccagcgtggcgttaaccgattcaccaggaataatgaatggaacttttgacccaattgctgcaagccctgtgggcgcaggattttgaaaccctggccaatccatcgatgattggcatgttgtattttgtcttgtttgtaattttgttccttgaaaacggcttgcttccggcggcctttttaccgggcgacagtttactggtattggtcggcgtgttgattgcgaaaggcgcgatgggctatccgcaaacgattctgctgctgaccgttgccgccagcctcggctgctgggtcagctatattcaggggcgatggctgggcaatacccgcaccgtacaaaactggctatctcatttacccgcgcattatcatcaacgcgcacaccatctttttcataaacacggtttatcggcgctgttaattggtcgctttattgcgtttgtcagaacactgctgccgacgattgccgggttatcagggctgaataacgcgcgctttcagtttttcaactggatgagcggtctgctgtgggtattgatcctgacaactctgggttacatgctcggcaaaacgccggtatttttaaagtacgaggaccagctgatgtcatgcctgatgctgctcccggtggtgctgctggtgtttggcctggcaggttctctggtcgtgttatggaaaaagaaatatggaaatcgggggtaagggatgcaaatacctcgcatgtcgcttcgccagctagcctggtccggcgctgttttacttctggtcggcacgctgttgctggcctggtccgcggttcgccagcaagagtctacgctggcgattcgtgccgttcatcaaggcacaacgatgccagacggtttttcaatctggcatcaccttgacgctcatggcattcctttcaaaagtatcacccccaaaaacgacactctgttaattacatttgactccagcgaccagagcgccgccgcaaaagcggtcctcgacagaacattgccccatggctacatcattgcgcagcaggacaataacagtcaggctatgcagtggctgacccggttacgggataactctcatcgcttcggataacttcctgttatccgaaacatatcactcactttggtgatttcaccgtaactgtctatgattaatgaggcggtggttaacactaccgcttcgttgtctggacaatcgttcctttgtaataggtccgaatcacaatggaaggttcaagaatgaaataccgcatcgctttagctgtttctctctttgctcttagtgccggtacccaattcgccctatagtgagtcgta

SEQ ID NO: 337 - DNA, 592 bp, Homo sapiens
  SITE (45): n equals a,t,g, or c
  SITE (550): n equals a,t,g, or c
ggcacagctgcaccgcccgccctgccagacccgcccggaacggcntgcgtcgccgccagtagccgcagcaccgcagccttgggcctcgcgccggctatggccttgccctggggctgagccctcgaggttgtgaccgagattcccgacgagagagactgaggggaagagaggaaggaggggcgggctcctgggcaaggcattcgctcctgagcggaatcctgcaaagatggagaaggaggagacaacccgggagctgctgctgcccaactggcagggtagtggctcccacgggctgaccatcgcccagagggacgacggcgtctttgtgcaggaggtgacgcagaactcccctgcggcccgcactggggtkgtcaaggagggggaccagattgtgggtgccaccatctactttgacaacctgcagtcgggtgaggtgacccagctgctgaacaccatggggcaccacacggtgggcctgaagctgcaccgcaagggggaccgctctcccgagcctggccagacctggacccgtgaagtyttcagctcctgnagctctgaagtggttctgagcggggatgatgaagagtaccag

SEQ ID NO: 338 - DNA, 638 bp, Homo sapiens
  SITE (13): n equals a,t,g, or c
  SITE (37): n equals a,t,g, or c
  SITE (63): n equals a,t,g, or c
  SITE (545): n equals a,t,g, or c
  SITE (619): n equals a,t,g, or c
  SITE (629): n equals a,t,g, or c
cagaaggggattncgggctcccgctgctgggggaaanctgggttttcatggggcggcagccgnaggacaggacccgcagccatgaaccgcttcaatgggctctkmaaggtgtgctcggagcgccgctaccgccagatcaccatcccgaggggaaaggacggctttggcttcaccatctgctgcgactctccagttcgagtccaggccgtggattccgggggtccggcggaacgggcagggctgcagcagctggacacggtgctgcagctgaatgagaggcctgtggagcactggaaatgtgtggagctggcccacgagatccggagctgccccagtgagatcatcctactcgtgtggcgcatggtcccccaggtcaagccaggaccagatggcggggtcctgcggcgggcctcctgcaagtcgacacatgacctccagtcaccccccaacaaacgggagaagaactgcacccatggggtccaggcacggcctgagcagcgccacagctgccacctggtatgtgacagctctgatgggctgctggncctttccgggggggcggtggacctcccagtggcaacgcgggggccagcacaccctgccttgcactgtccccgtngccaacttgnccccaaccg

SEQ ID NO: 339 - DNA, 1744 bp, Homo sapiens
  SITE (2): n equals a,t,g, or c
  SITE (1723): n equals a,t,g, or c
  SITE (1737): n equals a,t,g, or c
gnwtgatacgccagytcgaaattaaccctcactaaagggaacaaaagctggagctccaccgcggtggcggccgctctagaactagtggatcccccgggctgcaggaattcggcacgagccacactacagggtagaacccagtctggaaggtgcactcaccaaaggaagtcaggaggaaagaagaaaattacaagggaacatgctgctcaactcatccatggaggacaaaatgctaaaagaaaacccagaagagaaactctttattgttcataaggctatcacagatctttctctccaagaaactagtgctgatgaaatgacattcagagaagggcatcagtgggagaagattcctctgagtggcagtaaccaggaaataagaagacagaaggagaggattactgagcagcctctcaaagaggaagaagatgaggacaggaagaacaaaggtcaccaggcagctgaaattgaatggctgggatttcgaaaacctagccaagctgacatgttacattctaaacatgatgaggagcagaaggtttgggatgaagaaattgatgatgatgatgatgataattgcaataatgatgaagatgaagttcgagtgatagaatttaagaaaaaacatgaagaggtttctcaatttaaagaggaaggtgatgcaagtgaggactccccactgagcagtgccagttcccaagctgtgacacctgatgagcagccaaccttagggaagaagagtgatatctccagaaatgcttattccagatacaatacaatatcctatcggaaaatcagaaagggaaataccaagcaaagaattgatgaattcgagtctatgatgcatttataaactaactggaactgagaaattctcatgcccactaaaggaaaagctaattctattgccccagggtgcatatttctatgccttatttgagttatcacttggagggaggtggaagttgactctctttttcactgtagaataatgtggaaataaccctagataaaaattcagtctgataacctcaaatcaaaaagctttaaataaattcttgggcatttatcttttaaaacttcactaatatagcattgtgtgataagcactaagcagtcagtcccctgggggaatctggcataattcggctataaatgtagcaatgcttggaaaggtagtcatcaaatgagactatttgaggggactatttgaaatgatyctggtatttcttttggtatctttcttcctgtacattggagtgatggaaagtctggtattaaaacctctcttacttttaaacttgattttgcagamtctggcaataarcctyccaaaatyctgtgccttttctattatcaccaaacaatatgttaagtggctttccttggcatctacagaraaaacattctatagccctccttcctaggtgttaccattcactgaatcttctctcagagggagatgagcaattgtcagtcaggataattctgtttgctaaatgttgcctttatgctttcaaactgaattaaacccattgtgaggttgacactgggaggggctagaagattggtgggcagcagactaaagagttatgttgggatagttttatttctgtggctggaaaatgaaaatcttgttctaggcacagtttaaagtccattgaaaaataaaaatggacagctttagcaccaatttttaaggaaaatggcccctctctatttnacccacattttgcnccttatt

SEQ ID NO: 340 - DNA, 993 bp, Homo sapiens
tggcggcgctaggggaacccgtgcggctggagagagatatttgtagagcaattgaattattggaaaaactacaaaggagtggagaagtaccaccacagaaacttcaggctttgcaaagagtccttcaaagtgaattctgcaatgctgtgagagaggtatatgaacatgtctatgagactgtggacatcagtagcagtcctgaagtgagagcgaacgctactgcaaaggctactgktgctgcatttgctgccagtgaaggacattctcatcctcgagttgttgagctaccaaaaacagaagagggccttggattcaatattatgggaggcaaagaacaaaactctccaatctatatatcccgaataattccaggtggaattgctgatagacatgggggcctcaaacgtggagatcaactcctctctgttaatggagtgagtgttgaakgagaacatcatgaaaaagctgtagaactgctgaaagccgcacaaggaaggttaaattartggtacgatacacacccaaagtcttagaagaaatggagtcgcgctttgaaaaaatgagatcagcaaaacgcaggcaacagacctaatacatttcaaaacttgatatttcattttgcgttttagctagagaagttttccttgtgacttactaatggctgcaatgccaatgattgtaagaaaacaracaaatttatcatgaaattctccttgtcattttataaatgcctattttaacatcatttatggttccagagatgcatacacttttttctgacaagaaaaagtaaaaggtgatgagggcaattctgtcctactgtttttacaggcctttttcaaatgcagattttgtcataaagttgttatagrttttttaaaatgcttttttaatrttaaaatgtacttttacattcttaatctttttttagaaaggaaaagttttcttcatttagctgctgatttaaaagtaaagttctccaattcttaaaaa

SEQ ID NO: 341 - DNA, 1116 bp, Homo sapiens
  SITE (7): n equals a,t,g, or c
  SITE (12): n equals a,t,g, or c
  SITE (14): n equals a,t,g, or c
  SITE (23): n equals a,t,g, or c
  SITE (31): n equals a,t,g, or c
  SITE (1061): n equals a,t,g, or c
  SITE (1070): n equals a,t,g, or c
  SITE (1075): n equals a,t,g, or c
  SITE (1087): n equals a,t,g, or c
tctaaantgaantnaaagctggngctccacncgcggtggcggccgctctagaactagtggatcccccgggctgcaggaattcggcacgagcgctctcggccctgcaagatgcccctgaagctgcgggggaagaaraargccaagtccaaggagaccgccgggctggtggagggcgagccgacgggcgcgggcggcgggagcctctcagcgtcccgggctcccgcacgcaggctggtcttccacgcgcactggcgcacggtagtgccacgggccgagtggagggcttctccagcatccaggagctctacgcccagatcgcgggcgcgtttgaaatctcgccgtcggagatcttatattgcactttaaacacacctaaaattgacatggaaagactcttaggaggacaactaggactagaagatttcatatttgcccatgtgaaaggaatcgaaaaagaagtgaatgtgtataaatctgaggattcacttggtctcaccattacagataatggtgttggctatgcttttataaagagaattaaagatggtggtgttattgactcagttaaaacaatctgtgttggggatcatattgaatccataaatggagaaaatattgttgggtggcgtcactatgatgttgctaagaagttaaaggaattaaaaaaggaggaactcctttactatgaagttaatagaacctaagaaggcatttgaaatagagctgaggtcaaaggctggaaagtcatcaggagaaaaaattggttgtggaagggcaacacttygcctgagatcaaaaggtcctgccaccgtggaagaaatgccttctgaaaccaaagcaaaggcaattgaaaagattgatgatgttcttgagttgtacatgggaattcgagatattgatttagccaccacaatgtttgaagctggaaaggacaaagtaaatccagatgaatttgctgtggcactttgacggaactcttggagactttgcgttcccagacggatttgtcttttgatggtttggggagtcattggtgatgccaacgagggggttatggtgtntccattccnctttngagaacaacccncgtctttttttccccttttttaaaaggcc

SEQ ID NO: 342 - DNA, 588 bp, Homo sapiens
  SITE (39): n equals a,t,g, or c
  SITE (492): n equals a,t,g, or c
  SITE (535): n equals a,t,g, or c
aaccactattgctctgttgtatgatgtagagtccgaaantgcctatgacatccggctgaagctgacgaaagaggtgctgacaattcagaaacaagatgttgtctgtgtgggtggaagccaccagggcaggaatcgcagaactgttacactccgcagacagccagttggcggcttgggcctgagtataaagggaggttctgagcacaacgtccctgtcgtcatatcaaaaatattcgaagaccaagcagctgaccagacagggatgttgttcgtaggagatgctgttctccaggttaatggcatacatgtagaaaatgcaactcatgaagaagtggtgcatctgctgagaaatgctggcgatgaagttaccatcaccgttgagtatctcagggaagcgccggcatttctraagctcccgttaggtccccagggccatccagcgaccacagcagtggggcctcctctcccctctttgacagcggtttgcatctnaacggaaactccagtaccacagccccatcgtcaacttcctcgnccatagctaaggacccgaggtatgagaagcgcttgctggacaacttgtccgtg

SEQ ID NO: 343 - DNA, 721 bp, Homo sapiens
  SITE (627): n equals a,t,g, or c
  SITE (677): n equals a,t,g, or c
  SITE (690): n equals a,t,g, or c
  SITE (706): n equals a,t,g, or c
  SITE (713): n equals a,t,g, or c
gtggagaccagattcttcaggtcaacaactacaatatcagcaatgtgtcccataactatgcccgagctgtcctttcccagccctgcaacacactgcatcttactgtgcttcgagagaggcgctttggcaaccgagcacacaaccattctgatagtaactctccacgagaagagattttccaagtggctcttcataaacgggactctggtgaacagcttggcattaaattggtgcgaaggacagatgagccaggggtttttattcttgacctgttggaaggggggttggctgcccaggacggcaggctaagcagcaatgaccgagtgctggccatcaatgggcacgacctgaagtatggaactccggagcttgctgcccagattattcaggccagtggagagagagtgaatttaacaattgctagaccagggaaaccccagcctggtaacaccattagagaagcaggaaatcatagcagcagcagccagcaccacacaccaccaccgtattatagcagaccaagctcacataaggatcttactcagtgtgktacatgccaagaaaaacacattactgtaaagaaggaaccacatgaatcccttggcatgaccstttgcttgggggcangggaaagtaaagaatggtgaacttgcccatcttttgtggaccagtggggncacccccatgggnttgcctttgcaccaanatggccngaattaaa

SEQ ID NO: 344 - DNA, 598 bp, Homo sapiens
  SITE (10): n equals a,t,g, or c
  SITE (60): n equals a,t,g, or c
  SITE (566): n equals a,t,g, or c
  SITE (598): n equals a,t,g, or c
ggacgccagntcgaaattaaccctcactaaagggaacaaaagctggagctccaccgcggnggcggccgctctagaactagtggatcccccgggctgcaggaattcggcacgagccgagtgtggataaccacgatggatcatccagtgaaggaatctttgtatccaagatagttgacagtgggcctgcagccaaggaaggaggcctgcaaattcatgacaggattattgaggtcaacggcagagacttatccagagcaactcatgaccaggctgtggaagctttcaagacagccaaggagcccatagtggtgcaggtgttgagaagaacaccaaggaccaaaatgttcacgcctccatcagagtctcagctggtggacacgggaacccaaaccgacatcacctttgaacatatcatggccctcactaagatgtcctctcccagcccacccgtrctggatccctatctyttgccagaggagcatccctcagcccatgaatactacgatccaaatgactacattggagacatccatcaggagatggacagggaggagctggagctggangaattggactctacagaatgaacagccaggan

SEQ ID NO: 345 - DNA, 283 bp, Homo sapiens
  SITE (263): n equals a,t,g, or c
  SITE (280): n equals a,t,g, or c
tggctgccgcgttggaagggccatacccagtggaggagatccgtctgccaagagctgggggccctctggggcttagtattgtcggaggctccgaccattccagccacccgtttggtgtccaggagcctggtgtgttcatctccaaggtgctcycgcggggcctggccgctcgcagcggcctgcgggttggggaccgcatcctggcagtgaacgggcaagacgtgcgggatgccacgcaccaagaatcagtcagtgccctgctncgcccttgctggaactntct

SEQ ID NO: 346 - DNA, 2669 bp, Homo sapiens
ccacgcgtccggctctctcgccaaccgtggtggctccttgcgttcctacatcctctcatctgagaatcagagagcataatcttcttacgggcccgtgatttattaacgtggcttaatctgaaggttctcagtcaaattctttgtgatctactgattgtgggggcatggcaaggtttgcttaaaggagcttggctggtttgggcccttgtagctgacagaaggtggccagggagaaggcagcacactgctcggagaatgaaggcgcttctgttgctggtcttgccttggctcagtcctgctaactacattgacaatgtgggcaacctgcacttcctgtattcagaactctgtaaaggtgcctcccactacggcctgaccaaagataggaagaggcgctcacaagatggctgtccagacggctgtgcgagcctcacagccacggctccctccccagaggtttctgcagctgccaccatctccttaatgacagacgagcctggcctagacaaccctgcctacgtgtcctcggcagaggacgggcagccagcaatcagcccagtggactctggccggagcaaccgaactagggcacggccctttgagagatccactattagaagcagatcatttaaaaaaataaatcgagctttgagtgttcttcgaaggacaaagagcgggagtgcagttgccaaccatgccgaccagggcagggaaaattctgaaaacaccactgcccctgaagtctttccaaggttgtaccacctgattccagatggtgaaattaccagcatcaagatcaatcgagtagatcccagtgaaagcctctctattaggctggtgggaggtagcgaaaccccactggtccatatcattatccaacacatttatcgtgatggggtgatcgccagagacggccggctactgccaggagacatcattctaaaggtcaacgggatggacatcagcaatgtccctcacaactacgctgtgcgtctcctgcggcagccctgccaggtgctgtggctgactgtgatgcgtgaacagaagttccgcagcaggaacaatggacaggccccggatgcctacagaccccgagatgacagctttcatgtgattctcaacaaaagtagccccgaggagcagcttggaataaaactggtgcgcaaggtggatgagcctggggttttcatcttcaatgtgctggatggcggtgtggcatatcgacatggtcagcttgaggagaatgaccgtgtgttagccatcaatggacatgatcttcgatatggcagcccagaaagtgcggctcatctgattcaggccagtgaaagacgtgttcacctcgtcgtgtcccgccaggttcggcagcggagccctgacatctttcaggaagccggctggaacagcaatggcagctggtccccagggccaggggagaggagcaacactcccaagcccctccatcctacaattacttgtcatgagaaggtggtaaatatccaaaaagaccccggtgaatctctcggcatgaccgtcgcagggggagcatcacatagagaatgggatttgcctatctatgtcatcagtgttgagcccggaggagtcataagcagagatggaagaataaaaacaggtgacattttgttgaatgtggatggggtcgaactgacagaggtcagccggagtgaggcagtggcattattgaaaagaacatcatcctcgatagtactcaaagctttggaagtcaaagagtatgagccccaggaagactgcagcagcccagcagccctggactccaaccacaacatggccccacccagtgactggtccccatcctgggtcatgtggctggaattaccacggtgcttgtataactgtaaagatattgtattacgaagaaacacagctggaagtctgggcttctgcattgtaggaggttatgaagaatacaatggaaacaaaccttttttcatcaaatccattgttgaaggaacaccagcatacaatgatggaagaattagatgtggtgatattcttcttgctgtcaatggtagaagtacatcaggaatgatacatgcttgcttggcaagactgctgaaagaacttaaaggaagaattactctaactattgtttcttggcctggcacttttttatagaatcaatgatgggtcagaggaaaacagaaaaatcacaaataggctaagaagttgaaacactatatttatcttgtcagtttttatatttaaagaaagaatacattgtaaaaatgtcaggaaaagtatgatcatctaatgaaagccagttacacctcagaaaatatgattccaaaaaaattaaaactactagttttttttcagtgtggaggatttctcattactctacaacattgtttatattttttctattcaataaaaagccctaaaacaactaaaatgatttgtataccccactgaattcaagctgatttaaatttaaaatttggtatatgctgaagtctgccaagggtacattatggccatttttaatttacagctaaaatattttttaaaatgcattgctgagaaacgttgctttcatcaaacaagaataaatatttttcagaagttaaaaaaaaaaaaaaaaaaaaaaaaaaaaaaaaaaaaaaaaaaaaaaaaaaaaaaaaaaaaaaaaa

SEQ ID NO: 347 - DNA, 1045 bp, Homo sapiens
  SITE (3): n equals a,t,g, or c
  SITE (1023): n equals a,t,g, or c
ggncacgagggcascatccgcttccggttcccagactgaattgtcagtgagcggagtctgaggtcgctgtggactgcccactgggccttgcccgagatggacagccggattccttatgatgactacccggtggttttcttgcctgcctatgagaatcctccagcatggattcctcctcatgagagggtacaccacccggactacaacaatgagttgacccagtttctgccccgaaccatcacactgaagaagcctcctggagctcagttgggatttaacatccgaggaggaaaggcctcccagctaggcatcttcatctccaaggtgattcctgactctgatgcacatagagcaggactgcaggaaggggaccaagttctagctgtgaatgatgtggatttccaagatattgagcacagcaaggctgttgagatcctgaagacagctcgtgaaatcagcatgcgtgtgcgcttctttccctacaattatcatcgccaaaaagagaggactgtgcactagaaagttgcagcccacagcccttcatgtggactctgtcatgacatgctaactagacttcaggggagccacttctgttttcagcccctccctggaatagtgagttgggaggatggggagacagctaaccaactgcattacccaaaccatattgcacttttagttccctagttttctaggtgagcttcattccctgaaaggaggatgatgatatctaggcataacctagcctgtgaggaacctagttaggaaagacaactgacatttattgaatatcatgcactagtcccttacatatgtcatattttaattatagaaatcagtagcaaaaagaatcttggggattttccatctgacttccctggccatcttatcccatccttgcactaccagaagattcatacacttttgagactccagtgagacgctgttttcaccccttcctcctcctagcctctctcccaaaaagtaaaacacaatgctgaagaaaaaaaaaaaaaaaagggnggccgttttaaagggatccaag

SEQ ID NO: 348 - DNA, 1455 bp, Homo sapiens
tatttttttttttttttttttgtttaaaatcaaatctttattcaaaagatagtcaaggctgayaacttatgcagtctgtgacaaagagcaagtcaagccaaggaaaaagctctcacaaagaacgtagctctgttctcttaaaatgtgtaactgttttcctggtagagcaaaatttcttgaaaggggcccagttgcgactttaagcagcgtttaaacagcctgcctccgtgtccagcatttaaatcagcacaagagaatcggctgcctgtgggccctgcctgagcctcagcctagcttggagtctgaggctccaaggaggcctgtgtgtataagccatcccatggtcaccctcctggacacgcccccctcatggcagcccccaccttaagcagcaggccggctgcaacccatcatccragggtggttgccctttgctgcaggagggcgggaagccccccctgcctgccctgccctscagtggcttcaggcatctgggatggagtggtccatggtgtggtggagcaggactggaggcaactttttgaccatgtgctcgtagatcacactggggatgatggtcagggtgacaacgttcccagccgtggccagaatctccatgatctttttgtccttcagcccgataacattctgcccgtcyacctcacacacgtagtggttggtgaggagcccgttgcrggccgcagaactccctttgaccagagagacaatcttccccttcttgatcacgaagccgacgtggcccatgctgtccttgtgcatggtgacagtccgctggaacggcctgtcccgaaccaccacgacaatcttatcgcctgatgccttcttcaccacctgatgggctttgtgcgagctccacccagcacagtcacgcccgtcaatctgcaggagctggtccccaaagcgcagccccacaagggatgcaggggtgttggcctggaccaactgcacaaagagcccctggtcgaccttccgcagcctcagcccggtcttgccgcgctcgtccttgcacaggtggatctcgcgcaccccgggcttgatctcagctcgccgcacgcccaggctgtacccggttaccggtgccaccatctggccgggcccggggcccgagaccgctgtactgtcaccctctggaatctgaagcaggctctcctggacttcttggctggagagggaaagacccatataattttccagttctgccaagtttgggtacaaaactggtggtggggaaatgctgttgcctggactggcagggctggcatcttgggtgaggctctgacctgggcctgaatggcttggtccacttttaggtcctctagagatgggtacagggatgacatggctgattctcagaacaccctgcaggcaaggtgctgctccacgaccttctccagctgctgccgctgctgaatctgtttccctccctgaaacgta

SEQ ID NO: 349 - DNA, 682 bp, Homo sapiens
  SITE (682): n equals a,t,g, or c
ggtgagctgtcgcgggcggcgcccggccttgctcaacgcccagcagtccccaccgtcgctgccgccgccaccgccctcggccgctgccgaggcctcctgcagccatcatgtccgccagcgccgtctacgtgctggacctgaagggcaaggtgctcatctgccggaactaccgtggcgacgtggacatgtcagaggtggagcacttcatgcccatcctgatggagaaggaggaggaggggatgctgtcgcccatcctggcccacgggggggtccgtttcatgtggatcaaacacaacaacctgtatctggttgccacatccaagaagaacgcgtgcgtgtcgctggtcttttctttcctctataaggtggtgcaggtgttttccgagtacttcaaggagctggaggaggagagcatccgggacaactttgttatcatctacgagctgctggacgagctcatggacttcggctacccccagaccaccgacagcaagatcctgcaggagtacatcactcaggaaggccacaagctggaaacaggggccccgcggccaccagccaccgtcaccaacgcggtgtcctggcggtccgaaggcatcaagtatcggaagaatgaggtgttcttggacgtcatcgagtctktcaacctyttggtcagcgccaacggcaatgtcctgcgcan

SEQ ID NO: 350 - DNA, 1031 bp, Homo sapiens
  SITE (1024): n equals a,t,g, or c
gtgtgtttcagtgggtagttttattaacattraggagatcaaagagattgtmaaaaggttgcagtttgtttcaaaaggctgtraatcggtggagatgactctscgaagaaatgggctaggacagcttggcttccatgtcaactatgagggcattgtggcggatgtggagccctacggttatgcctggcaggcagggctgaggcagggcagtcgcctggtggagatctgcaaggtggcggtagccaytctgagccatgagcagatgatcgacctcctgagaacatctgtcacggtgaaggttgtcatcattcccccgcatgatgactgcaccccgcggaggagttgctctgaaacctaccgcatgccagtgatggagtacaaaatgaatgaaggtgtttcatacgaattcaagtttcccttccgaaataataacaagtggcagaggaacgccagcaagggcctcattcacctcaagtcccgtcccagtgcagagtcccatgacctcgcggctgaatgctggaaaaggagatgggaagatgccttcctccagaaagagccgccaacatccctcgaagcatctccagtgacgggcgcccactagagaggcggctgtctcctggttcggacatctatgtgamggtctcatccatggctttagcaagatcccagtgtcggaactctcctagcaacttgtcttcatccagtgatactggttctgtggggggcacttacaggcagaagtccatgcccgaagtttggagtgagccgtagatccccagcctccattgacaggcagaacacccagtcagatattggtggcagcggaaaatccacgcctagctggcaaagaagtgaggatagcattgctgaccagatggagccaacatgccatctcccarcagtatcaaaggtactgccagctttcccgagararccccagtkggagattaatgcggcaggatccagtggttatttgtctccaaacaaacaagggattcttgatagcattattcgagcattccantagcata

SEQ ID NO: 351 - DNA, 1067 bp, Homo sapiens
  SITE (54): n equals a,t,g, or c
ggcacgagggggtattcaagacacacaccaaatggacactttctcttgcaagtnaacagaaagagacgcacagtcattacagggggatcgtgcattgtgccatgacaagtktcccatgcttggggatagtaacccaggctaaatcgctgtcctcggtccacatcccccaccccagctttcatgcctacctggaagggccctcatcttcagtcgctttctctctcccaggccacagtggctgccttcacagccagcgagggccacgcacatcccagggtagtggagctacccaagacggatgagggcctaggcttcaacatcatgggtggcaaagagcaaaaytcgcccatctacatctcccgggtcatcccagggggtgtggctgaccgccatggaggcctcaagcgtggggatcaactgttgtcggtgaacggtgtgagcgttgagggtgagcagcatgagaaggcggtggagctgctgaaggcggcccagggctcggtgaagctggttgtccgttacacaccgcgagtgctggaggagatggaggcccggttcgagaagatgcgctctgcccgccggcgccaacagcatcagagctactcgtccttggagtctcgaggttgaaaccacagatctggacgttcacgtgcactctcttcctgtacagtatttattgttcctggcactttatttaaagatatttgaccctcactgagtgtctgtgtgtctgtcctgcatccctgggttggtgtcttgagatgtggagggaatgcgaggagctgaggtcaggccaagccgttgagaagccttttccagagtctgagaacagaggttaagmcctctccctaggtctgaaggcggagacaggccggcttccaagagactagtccgagggcggagggcggaggcagggacccagtctgggtctgagtgctggggcagaactgaggacaacgctgcctacccttaagagcgtctgagggcgaaggccaagtcccttcctccagagtcctgaaacgcagccggagccagtgggcggcctctgtgtgggcggggcggagcgaacc

SEQ ID NO: 352 - DNA, 748 bp, Homo sapiens
  SITE (702): n equals a,t,g, or c
  SITE (721): n equals a,t,g, or c
gcttctacatccgcctctgcgccggctgccacccgcgctccctccgccgccgccgccttgctgctgctcaaagctgctgccgccccttgggctaaaaggttttcaaatggaacattttgatgcatcacttagtacctatttcaaggcattgctaggccctcgagatactagagtaaaaggatggtttcttctggacaattatatacccacatttatctgctctgtcatatatttactaattgtatggctgggaccaaaatacatgaggaataaacagccattctcttgccgggggattttagtggtgtataaccttggactcacactgctgtctctgtatatgttctgtgagttagtaacaggagtatgggaaggcaaatacaacttcttctgtcagggcacacgcaccgcaggagaatcagatatgaagattatccgtgtcctctggtggtactacttctccaaactcatagaatttatggacactttcttcttcatcctgcgcaagaacaaccaccagatcacggtcctgcacgtctaccaccatgcctcgatgctgaacatctggtggtttgtgatgaactgggtcccctgcggccactcttattttggwgccacacttaatagcttcatccacgtcctcatgtactcttactatggtttgtcgtcagtcccttccatgcgtccatacctctggtggknggggaaaggaaaggtcccnttaaacttcaaagggggccaagcttgg

SEQ ID NO: 353 - DNA, 871 bp, Homo sapiens
ggcaaatacaacttcttctgtcagggcacacgcaccgcaggagaatcagatatgaagattatccgtgtcctctggtggtactacttctccaaactcatagaatttatggacactttcttcttcatcctgcgcaagaacaaccaccagatcacggtcctgcacgtctaccaccatgcctcgatgctgaacatctggtggtttgtgatgaactgggtcccctgcggccactcttattttggtgccacacttaatagcttcatccacgtcctcatgtactcttactatggtttgtcgtcagtcccttccatgcgtccatacctctggtggaagaagtacatcactcaggggcagctgcttcagtttgtgctgacaatcatccagaccagctgcggggtcatctggccgtgcacattccctcttggttggttgtatttccagattggatacatgatttccctgattgctctcttcacaaacttctacattcagacctacaacaagaaaggggcctcccgaaggaaagaccacctgaaggaccaccagaatgggtccatggctgctgtgaatggacacaccaacagcttttcacccctggaaaacaatgtgaagccaaggaagctgcggaaggattgaagtcaaagaattgaaaccctccaaaccacgtcatctgattgtaagcacaatatgagttgtgccccaatgctcgttaacagctgctgtaactagtctggcctacaatagtgtgattcatgtaggacttctttcatcaattcaaaacccctagaacgtatacagattatataagtagggataagatttctaacatttctgggctctctgacccctgcgctagactgtggaaagggagtat

SEQ ID NO: 354 - DNA, 1262 bp, Homo sapiens
  SITE (1261): n equals a,t,g, or c
ccacgcgtccgcggacgcgtrggagaggatccggcgccgaatcactgactggcacaggtgttgggaaaatgatccacagtctatttctcataaactgttccggtgacatatttctagagaagcactggaagagcgttgtgagccagtctgtctgtgattatttctttgaagctcaagagaaagctgctgatgttgaaaatgtaccacctgtcatttcaacacctcaccactacctcatcagtatctaccgggataagctcttctttgtatctgtcatacagaccgaagtgccacctctctttgtaattgagttcctacatcgagttgctgacacttttcaggactactttggtgagtgttcagaggctgcaattaaggataatgtggtcatagtatatgaactcttagaagaaatgttagacaatggatttccactggctaccgaatctaacattttgaaagaattgattaaaccaccaacaattctacgctctgttgtcaactctattacaggcagtagtaatgttggggacacactccccaccgggcagctgtccaacataccatggcgtcsggcaggggtaaagtacacaaacaatgaagcctattttgatgttgttgaagaaatagacgcaattatagataaatcaggatctacagtctttgcagaaattcagggggtcattgatgcttgcattaaactatctggaatgcctgatctctccctttctttcatgaaccctaggcttctggatgatgtcagctttcacccctgcatccggttcaagcgttgggaatctgaaagagttttgtcatttattcctccagatggaaatttccgactcatatcataccgtgtcagctcacaaaatctagtggcaataccagtgtatgtgaacatagtatcagctttaaggagaacagttcttgcggcagatttgatataacaattggaccaaagcagaatatggggaaaactattgaaggaattacagtgacagttcacatgccaaaagttgtgctgaacatgaacctgacacccacacaaggcagctatacatttgatccagtcaccaaggtactaacatgggatgtgggaaaaattactccacaaaagctcccaagtcttaaaggactggtaaatttacagtctggagcccccaaaccagaararaatccgagcctcmacatacagtttaagatccascacttgctatttcaggcttaaaartwaaccgtttggacwtktwtgggaraaatnt

SEQ ID NO: 355 - DNA, 823 bp, Homo sapiens
  SITE (4): n equals a,t,g, or c
  SITE (192): n equals a,t,g, or c
cggntttggagcatatacccaacttttctctggatgatatggtaaagctcgtagaagtccccaacgatggagggcctctgggaatccatgtagtgcctttcagtgctcgaggcggcagaaccctggggttattagtaaaacgattggagaaaggtggtaaagctgaacatgaaaatctttttcgtgagaatnattgcattgtcaggattaatgatggcgaccttcgaaatagaagatttgaacaagcacaacatatgtttcgccaagccatgcgtacacccatcatttggttccatgtggttcctgcagcaaataaagagcagtatgaacaactatcccaaagtgagaagaacaattactattcaagccgttttagccctgacagccagtatattgacaacaggagtgtgaacagtgcagggcttcacacggtgcagagagcaccccgactgaaccacccgcctgagcagatagactctcactcaagactacctcatagcgcacacccctcgggaaaaccaccatccgctccagcctcggcacctcagaatgtatttagtacgactgtaagcagtggttataacaccaaaaaaataggcaagaggcttaatatccagcttaagaaaggtacagaaggtttgggattcagcatcacttccagagatgtaacaataggtggctcagctccaatctatgtgaaaaacattctcccccggggggcggccattcaggatggccgacttaaggcaggagacagacttatagaggtaaatggagtaggtttagtgggcaaatcccaagaggaagttgtttcgctgttgag

SEQ ID NO: 356 - DNA, 1781 bp, Homo sapiens
ggcacgmgccgcgcctcccggcgctccctccccgactcctaagtccttcggccgccaccatgtccgcctcggctgtcttcattctggacgttaagggcaagccattgatcagccgcaactacaagggcgatgtggccatgagcaagattgagcacttcatgcctttgctggtacagcgggaggaggaaggcgccctggccccgctgctgagccacggccaggtccacttcctatggatcaaacacagcaacctctacttggtggccaccacatcgaagaatgccaatgcctccctggtgtactccttcctgtataagacaatagaggtattctgcgaatacttcaaggagctggaggaggagagcatccgggacaactttgtcatcgtctacgagttgctggacgagctcatggactttggcttcccgcagascaccgacagcaagatcctgcaggagtacatcactcagcagagcaacaagctggagacgggcaagtcacgggtgccacccactgtcaccaacgctgtgtcctggcgctccgagggtatcaagtataagaagaacgaggtcttcattgatgtcatagagtctgtcaacctgctggtcaatgccaacggcagcgtccttctgagcgaaatcgtcggtaccatcaagctcaaggtgtttctgtcaggaatgccagagctgcggctgggcctcaatgaccgcgtgctcttcgagctcactggccgcagcaagaacaaatcagtagagctggaggatgtaaaattccaccagtgcgtgcggctctctcgctttgacaacgaccgcaccatctccttcatcccgcctgatggtgactttgagctcatgtcataccgcctcagcacccaggtcaagccactgatctggattgagtctgtcattgagaagttctcccacagccgcgtggagatcatggtcaaggccaaggggcagtttaagaaacagtcagtggccaacggtgtggagatatctgtgcctgtacccagcgatgccgactcccccagattcaagaccagtgtgggcagcgccaagtatgtgccggagagaaacgtcgtgatttggagtattaagtctttcccggggggcaaggagtacttgatgcgagcccactttggcctccccagtgtggaaaaggaagaggtggagggccggccccccatcggggtcaagtttgagatcccctacttcaccgtctctgggatccaggtccgatacatgaagatcattgagaaaagtggttaccaggccctgccctgggttcgctacatcacccagagtggcgattaccaacttcgtaccagctagaagggagaagagatgggggcttgaacacggggcttccttacagccccggatgcagattttagagggagggcaggtgcgggctgtgtgtgtctgtgtgagggcaggtcctggacttggcagtttcttgctcccagcacccgccccttcctcacctcttccttattccataggctgggagagaaactctctctgcttccctcgcccttggagctttccccatccccctgattttatatgaagaaatagaagaggggcttgaagtccccctcgcgagtgccttcttgcaattacctgccttagcgggtgttgcgggtccctccttcacagccgctgagcccagaggtcccgctggcccctcctctgaattttaggatgtcattaaaaagatgaatctaaaaaaaaaaaaaaaaaaaaaaaaaaaaaaaaaaaaaaaaaaaaaaaaaaaaaagg

SEQ ID NO: 357 - DNA, 1833 bp, Homo sapiens
  SITE (1): n equals a,t,g, or c
  SITE (11): n equals a,t,g, or c
  SITE (15): n equals a,t,g, or c
  SITE (1375): n equals a,t,g, or c
  SITE (1662): n equals a,t,g, or c
  SITE (1726): n equals a,t,g, or c
  SITE (1734): n equals a,t,g, or c
ntttgatgacncgtngctctaatacgactcactatagggaaagctggtacgcctgcaggtaccggtccggaattcccgggtcgacccacgcgtccgccatcaggagatggacagggaggagctggagctggaggaagtggacctctacagaatgaacagccaggacaagctgggcctcactgtgtgctaccggacggacgatgaagacgacattgggatttatatcagtgagattgaccctaacagcattgcagccaaggatgggcgcatccgagaaggagaccgcattatccagattaatgggatagaggtgcagaaccgtgaagaggctgtggctcttctaaccagtgaagaaaataaaaacttttcattgctgattgcaaggcctgaactccagctggatgagggctggatggatgatgacaggaacgactttctggatgacctgcacatggacatgctggaggagcagcaccaccaggccatgcaattcacagctagcgtgctgcagcagaagaagcacgacgaagacggtgggaccacagatacagccaccatcttgtccaaccagcacgagaaggacagcggtgtggggcggaccgacgagagcacccgtaatgacgagagctcggagcaagagaacaatggcgacgacgccaccgcatcctycaacccgctggcggggcagaggaagctcacctgcagccaggacaccttgggcagcggcgacctgcccttcarcaacgagtctttcatttcggccgactgcacggacgccgactacctggggatcccggtggacgagtgcgagcgcttccgcgagctcctggagctcaagtgccaggtgaagagcgccaccccttacggcctgtactaccctagcggccccctggacgccggcaagagtgaccctgagagcgtggacaaggagctggagctgctgaacgaagagctgcgcagcatcgagctggagtgcctgagcatcgtgcgcgcccacaagatgcagcagctcaaggagcagtaccgcgagtcctggatgctgcacaacagcggcttccgcaactacaacaccagcatcgacgtgcgcagacacgagctctcagatatcaccgagctcccggagaaatccgacaaggacagctcgagcgcctacaacacaggcgagagctgccgcagcaccccgctcaccctggagatctcccccgacaactccttgaggagagcggyggagggcatcagctgcccgagcacgaaggggctgtggggaccacggaagcctacgggccagcctccaagaatctgctctycatcacggaagatcccgaagtgggcacccctacctatagcccgtccctgaaggagctggaccccaacnaggccctggaaagcaaagagcggagagccagcgacgggagccggagccccacgcccagccagaagctgggcagcgcctacctgccctcctatcaccactccccatacaagcacgcgcacatcccggcgcacgcccagcactaccagagctacatgcagctgatccagcagaagttggccgtggagtacgcgcaaagccagatgagcctggtgagcatgtgcaaggacctgagctctcccaccccgtcggagccgcgcatggagtggaaggtygaagatccgcagcgncggggacgcgctacatcaccaagaggcccgtgcgggaaccgcctgctgcgggagcgcgccctgnaagatccnggtagagcgcaggctatgaccaccgacgacgacgcggtgagcgaggatgaagatgggggcgctactggagcaaggtggagaggaagcagcaccttggtg

SEQ ID NO: 358 - DNA, 616 bp, Homo sapiens
  SITE (612): n equals a,t,g, or c
ttaaatccactttaaaggatgaatcattgagcgtatatcatcttggaaaaagtcactcagcgtgatcttcgcaggaagtttgtttgctttgttccagaactccattggaaacacaacccagtccgtccaactgaaagaaaagagaggagtggtgctcctgtacatcctgcttggcaccatcgggaccctggtggccgtgctggcggcgagtgccctcctctacaggcactggattgaaatagtgctgctgtaccggacctaccagagcaaggatcagacgcttggggataaaaaggattttgatgctttcgtatcctatgcaaaatggagctcttttccaagtgaggccacttcatctctgagtgaagaacacttggcccwgagcctatttcctgatgttttagaaaacaawtatggatatagcctgtgtttgcttgaaagagatgtggctccaggaggagtgtatgcagaagacattgtgagcattattaagagaascaraagargaatatttatcttgagccccaactatgtcaatggacccagtatctttgraactacaagcagcagtgaatcttgccttggatgatscaaacactgaactgcattttnaatt

SEQ ID NO: 359 - DNA, 483 bp, Homo sapiens
tggtgggttaaccatacggaggtgactattccttacctggccacagatgtgacttgtgtggggccaggagcacacaagggccaaagtgtgatctccctggatctgtacacctgtgagttagatctgactaacctgattctgttctcactttccatatctgtatctctctttctcatggtgatgatgacagcaagtcacctctatttctgggatgtgtggtatatttaccatttctgtaaggccaagataaaggggtatcagcgtctaatatcaccagactgttgctatgatgcttttattgtgtatgacactaaagacccagctgtgaccgagtgggttttggctgagctggtggccaaactggaagacccaagagagaaacattttaatttatgtctcgaggaaagggactggttaccagggcagccagttctggaaaacctttcccagagcatacagcttagcaaaaagacagtgtttgtg

SEQ ID NO: 360 - DNA, 1428 bp, Homo sapiens
tgcaaggccaggaagctacagggaaagttctgatcaaaatacacaaagacacaagccaggtccccaccgcgcttggsgatgcatccatagcagccttsgtgctgtggacactccctggggcccagcgaaggggagagtttgctcccaaaggcgcaccaatgaccaacatttgccccccggaggaaagaactggaaccagggtcaaggccaacctgtcagaggtgcttgtgtccagtgtcctgggggtcaacgtgaccagcactgaagtctatggggccttcacctgctccatccagaacatcagcttctcctccttcactcttcagagagctggccctacaagccacgtggctgcggtgctggcctccctcctggtcctgctggccctgctgctggccgccctgctctatgtcaagtgccgtctcaacgtgctgctctggtaccaggacgcgtatggggaggtggagataaacgacgggaagctctacgacgcctacgtctcctacagcgactgccccgaggaccgcaagttcgtgaacttcatcctaaagccgcagctggagcggcgtcggggctacaagctcttcctggacgaccgcgacctcctgccgcgcgctgagccctccgccgacctcttggtgaacctgagccgctgccgacgcctcatcgtggtgctttcggacgccttcctgagccgggcctggtgcagccacagcttccgggagggcctgtgccggctgctggagctcacccgcagacccatcttcatcaccttcgagggccagaggcgcgaccccgcgcacccggcgctccgcctgctgcgccagcaccgccacctggtgaccttgctgctctggaggcccggctccgtgactccttcctccgatttttggaaagaagtgcagctggcgctgccgcggaaggtgcggtacaggccggtggaaggagacccccagacgcagctgcaggacgacaaggaccccatgctgattcttcgaggccgagtccctgagggccgggccctggactcagaggtggacccggaccctgagggcgacctgggtgtccgggggcctgtttttggagagccatcagctccaccgcacaccagtggggtctcgctgggagagagccggagcagcgaagtggacgtctcggatctcggctcgcgaaactacagtgcccgcacagacttctactgcctggtgtccaaggatgatatgtagctcccaccccagagtgcaggatcatagggacagcgggggccagggcagcggcgtcgctcctctgctcaacaggaccacaacccctgccagcagccctgggaccctgccagcagccctgggaaaaggctgtggcctcagggcgcctcccagtgccagaaaataaagtccttttggattctgaaaaaaaaaaaaaaaaaaaaaa

SEQ ID NO: 361 - DNA, 547 bp, Homo sapiens
  SITE (522): n equals a,t,g, or c
  SITE (528): n equals a,t,g, or c
  SITE (537): n equals a,t,g, or c
cgccgcgcccgccaagccggggggcgcgggcggctccaagaagctggtcatcaagaacttccgagacagacctcggctgcccgacaactacacgcaggacacgtggcggaagctgcacgaggcggtgcgggccgtgcagagcagcacctccatcaggtacaacctcgaggagctctaccaggctgtggaaaatctctgttctcacaaagtctccccaatgctctacaagcaactgcgtcaggcctgtgaagaccacgtccaggcacagatccttccgtttagagaagactcactagatagtgttttatttttaaagaagattaacacgtgctggcaggaccactgcagacaaatgatcatgatcagaagcatcttcctgttcttggaccgcacctatgtgctgcagaactccacgsttgcccttccatcttgggrttattgggrtttaggaactgttttaggaacccmtattattagtgrtaaaatggtttcagagttaaaaccatttggtgggattcccantgttgnccgagcgcnagaggagccg

SEQ ID NO: 362 - DNA, 1311 bp, Homo sapiens
  SITE (730): n equals a,t,g, or c
  SITE (755): n equals a,t,g, or c
  SITE (956): n equals a,t,g, or c
  SITE (1293): n equals a,t,g, or c
  SITE (1302): n equals a,t,g, or c
  SITE (1309): n equals a,t,g, or c
gaggagacagagctggggatgccagtggcgtggaggccccgatgatgatccgcctggtgaatggctcaggtccgcacgagggccgcgtggaagtgtaccacgaccggcgctggggcaccgtgtgtgacgacggctgggacaagaaggacggagacgtggtgtgccgcatgctcggcttccgcggtgtggaggaggtgtaccgcacagctcgattcgggcaaggcactgggaggatctggatggatgacgttgcctgcaagggcacagaggaaaccatcttccgctgcagcttctccaaatggggggtgacaaactgtggacatgccgaakatgccagcgtgacatgcaacagacactgaaagtgggccagagcccaagttcggggtcctgcacagagcacccttcctgcatccctggggtggggcacagctcggggccaccctgaccatgcctcgaccacaccccgtccagcattctcagtcctcacacctgcatcccaggaccgtgggggccggtcrtcatttccctcttgaacatgtgctccgaagtataactctgggacctactgcccgtctctctcttccaccaggttcctgcatgaggagccctgatcaactggatcaccactttgcccagcctctgaacaccatgcaccaggcctcaatatcccagttccctttggccttttagttacaggtgaatgctgagaatgtgtcagagacaagtgcangcagcagcgatggttggtagtatanatcatttactcttcaracaattcccaaacctccattagtccaagagtttctacatcttcctccccagcaagaggcaacgtcaagtgatgaatttcccccctttactctgcctctgctccccatttgctagtttgaggaagtgacatagaggagaagccagctgtaggggcaagagggaaatgcaagtcacctgcaggaatncagctagatttggagaagggaatgaaactaacattgaatgactaccatggcacgctaaatagtatcttgggtgccaaattcatgtatccacttagctgcattggtccagggcatgtcagtctggatacagccttacctccaggtagcacttaactggtccattcacctagactgcaagtaagaagacaaaatgactgagaccgtgtgcccacctgaacttattgtctttacttggcctgagctaaaagcttgggtgcaggacctgtgtaactagaaaagttgcctacttcagaacctccagggcgtgagtgcaaggtcaaacatgacttggcttcangccaccatnaatgtanga

SEQ ID NO: 363 - DNA, 250 bp, Homo sapiens
ggtgatcgaggctgcggagacgcctttcacggkgggtgtcgaggtggacgtcttcgggaaactgggccgttcgcctcccaatgtccagttcaccttccaacagcccaagcctctcagtgtggagccgcagcagggaccgcaggcggscggcaccacactgaccatccacggcacccacctggacacgggctcccaggaggacgtgcgggtgaccctcaacggcgtcccgtgtaaagtgacgaatttgggg

SEQ ID NO: 364 - DNA, 392 bp, Homo sapiens
ggcagaggtggtgcggccccttggagcgccggaagcccgcarwgccggagccgcagcgccggaacctcagaggcgggtcgcagcggcgcagaggagggctgaagaagatgcagagcagcctgaagctggtggactgtatcatcgaggtccacgatgcccggatcccactttcaggccgcaaccctctgtttcaggaaacccttgggcttaagcctcacttgctggtcctcaacaagatggacttggsggatcttacagagcagcagaaaattatgcaacacttagaaggagaaggcctaaaaaatgtcatttttaccaactgtgtaaaggatgaaaatgtcaagcagatcatcccgatggtcactgaactgattgggagaagccaccgctac

SEQ ID NO: 365 - DNA, 472 bp, Homo sapiens
  SITE (12): n equals a,t,g, or c
  SITE (219): n equals a,t,g, or c
  SITE (445): n equals a,t,g, or c
  SITE (464): n equals a,t,g, or c
gcacgtagtgtncactggaccccccaatgcgggcaagagcagcctagtgaacctgctcagtcggaagcctgtgtccatcgtgtccccggagccagggaccacccgtgacgtgctggagaccccagtcgacctggccggatttcctgtgctgctgagcgacacggctgggttgcgggagggcgtggggccgtggagcaggagggcgtgcggcgcgcccgnggagaggctagagcaggctgacctcattctggccatgctggatgcttctgacctggcctctccctccagttgcaacttcctggccaccgtcgtagcctctgtgggagcccagagccccagtgacagcagccagcgccttcctcctggtgctgaacaattcggacctgctktccccggaggcccaagttccggttctgactgccccgcaatgctgtgtctgtttganggaaagggttgaaggctcnggagcgtt

SEQ ID NO: 366 - DNA, 1167 bp, Homo sapiens
  SITE (3): n equals a,t,g, or c
  SITE (287): n equals a,t,g, or c
agnctggaagtcctggatgccagagacccattaggctgccgctgcttccaaatggaggaggctgtcctgcgagcacaaggcaacaagaagctggtcctggtcttgaacaagattgacctggtccccaaggaggttgtggagaaatggctggattaccttcggaatgagttgccaaccgtggctttcaaggccagtacccagcatcaggtcaaaaacctgaatcgttgcagtgtgccagtagatcaggcctctragtcactgctgaaaagcaaagcctgytttggagntgaaaacctcatgagggttctggggaactattgccgccttggtggaagtgcgcacccacattcgtgtgggtrttgtgggtcttcccaatgttgggaagagcagcctgatcaatagcctgaagcgcagccgcgmrtgcagcgtgggagctgttcctggaattaccaaattcatgcaggaggtctacctggacaagttcatccggctcttggatgctccaggcattgtcccagggcccaactcagaggtgggcaccatcctgcgtaactgcgtccacgtgcagaagctggcagaccctgtgaccccagtggagaccatcctgcagcgctgcaacctggaggagatttccaactattatggcgtctctgggttccagaccactgagcactttctgacggcagtggcccaccgtttggggaagaagaagaagggaggcttatatagtcaggaacaggcggccaaagctgtcctagctgactgggtgagcgggaagatcagcttctatataccaccaccagccactcacactctgcccacccatctcagtgctgagatcgttaaggaaatgaccgaggtctttgacatcgaggatactgagcaggccaatgaagacaccatggaatgcttggccaccggagaatctgatgagctgttgggtgacacggacccacttgaaatggagatcaagttgctccattctccgatgacgraaatagcagatgccattgaaaataaaaccaccgtgtataagattggagatctcactgggtattgcaccaatccgaaccgtcatcagatggggtgggctaaacgcaatgtggaccaccgccctaagagcaacagtatggtggatgtctgctcagtggaccgccgttcagtgct

SEQ ID NO: 367 - DNA, 982 bp, Homo sapiens
actagttctagatcgcgatctagaactagtccggactaaccctcggatgactcatccgggtacaatgcagtatatttgtcaaggagactgaatcatatatgggggaaaccacttctcaggcagccagctggttctcaggtcagcaagagacgatccatttttatcggaagctttatagtagcaataatgctaatacccagcactcgggctccacaatgtagaggaaatggcatcgctggcagtgacagctatattgtgcgtgtcaaggctgtggttatgaccagagatgactccagcgggggatggttcccacaggaaggaggcgggatcagtcgcgtcggggtctgtaaggycatgcaccccgaagscaatggacgaagcggctttctcatccatggtgaacgacagaaagacaaactggtggtattggaatgctatgtaagaaaggacttggtctacaccaaagccaatccaacgtttcatcactggraggtcgataataggaagtttggacttactttccaaagccctgctgatgcccgagcctttgacaggggagtaaggaaagcaatcgaagaccttatagaaggttcaacaacgtcatcttccaccatccataatgaagctgarcttggcgatgatgacgtttttacaacagctacagacagttcttctaattcctctcagaagagagagcaacctactcggacaatctcctctcccacatcctgtgagcaccggaggatttataccctgggccacctccacgactcataccccacagaccactatcacctcgatcagccgatgccaaggccctaccgccagtgagcttcccggacgacgacgaggagatcgtgcgcatcaacccccgggagaagatctggatgacggggtacgaggattaccggcacgcacccgtcagggcaagtacccggacccctcggaggacgcggactcctcctacgtgcgcttcgcaagg

SEQ ID NO: 368 - DNA, 624 bp, Homo sapiens
ccacaacggatgaagatgacagtgagtatgaggactgtccagaggaggaggaagacgactggcagacgtgctcagaagaagacggtcccaaggaagaggactgcagccaggactggaaggaaagctctactgcagattctgaggctcggagcaggaaaaccccacagaagaggcagatacacaattttagccatctggtatccaagcaggagttactggagctctttaaggagctacacactgggagaaaggtgaaagatgggcaacttacggtcggactggtgggctaccctaatgttggtaagagttcaacaatcaacaccatcatgggcaacaagaaagtatctgtgtctgccacacctggtcacacaaagcactttcagactctctatgtggagcctggcctctgcctgtgtgactgtcctggcttggtgatgccatcttttgtgtctaccaaggcagaaatgacttgcagcggaatcctcccaattgatcagatgagagatcatgttcctcctgtatcactaatawcctttctgctttggaaacactctagttattacgtgcatattagggcttcaggtttattttgggcatttgagggattcagatttgatgaagaat

SEQ ID NO: 369 - DNA, 1104 bp, Homo sapiens
aaagatgggcaacttacggtcggactggtgggctacctaatgttggtaagagttcaacaatcaacrccatcatgggcaacaagaaagtatctgtgtctgccacacctggtcacacraagcactttcagactctctatgtgragcctggcctctgcctgtgtgactgtcctggcttggtgatgccatcttttgtgtctaccaaggcagaaatgacttgcagcggaatcctcccaattgatcagatgagagatcatgttcctcctgtatcactagtttgccagaatattccaagacatgttttagragctacctatggcattaacatcataacgcctagagaggatgaagatccccaccgacctccaacatcggaagaactgttgacagcttatggatacatgcgaggattcatgacagcgcatggacagccagaccagcctcgatctgcgcgctacatcctgaaggactatgtcagtggtaagctgctgtactgccatcctcctcctggaagagatcctgtaacttttcagcatcaacaccagcgactcctagagaacaaaatgaacagtgatgaaataaaaatgcagctaggcagaaataaaaaagcaaagcagattgaaaatatcgttgacaaaacttttttccatcaagagaatgtgagggctttgaccaaaggagtccaggctgtgatgggttacaagcccgggagtggtgtagtgactgcatccactgcgagctctgagaacggggcggggaagccctggaaaaaacatggcaacagaaataaaaaagaaaaaagtcgtagactctacaagcacctggatatgtgaggttgggctgcaacagaaatgtcatctgcattgtgcagatggaaaagagcagaagctgcctgttgcctgtggaactgtcccaagacactagcactgtagaacgggccctgctcttgcagagcacggctgcacccaacagtctccatgtcaagaccaagggcctcctggaaacaccaactctgacaaaaaggagtcatctgggagcccgagaatcctactcctggccgggcacagtggcacgcaccaacatggagaaaccccgtctytactaaaa

SEQ ID NO: 370 - DNA, 1045 bp, Homo sapiens
  SITE (154): n equals a,t,g, or c
  SITE (978): n equals a,t,g, or c
ttttttttttttggcagcaagcctctcacttgttgtaggactgcaagacactggaccgaaagcctccaacacaaaccctagctgccaacctgctcatttcttaggttccactggtgagagcagctttaacacacaggcccaaggcactacggtncacctcacaggccagtaagaaacaggccctttaactggagattttaaaggttacaggttatagctttaactccttctgagacagcatccatttctcaagaggcctgagcaggaagctccgggagaaccaagcatgcggasstgctcagggacgtccactgggaagcctggtgtccactcccacctgcttgggccctgcaactggggtccctggagctggccaggctgtggggcgccagagagcacagcaccctagtgaccagcatggagcttctggaccgggtgagctgtcttgagcctcaaccacccaggtcaggaggtctgggaggccacatgcctccggccctccctacccggacaagttcagggcaaagtctcagccggggggtggccccgcaggacgtcgaggtccagcatcacggaacccagcagcccacggcggaaagtctgcaggaagtcacgggctgccgcaggatagttaggctgaataacgttcacgttacccgtgcccgtgagcaccttcaccttctgcgtcttccccagcttcacagccacactcttcagcacgcgctctacgttgtcacaggcactgcccaggccgtagtgctgcacgtacccaaagcgctggtgtttgttgagggtgtacagcaggtagtcagccatggtctcctccccgaccaggtggtccagcaccgttccacacagggccagcttcaggcctgtctccacactttcaatccgaggagccagcacgccaggagtgtccaacaggaacatcaggggccgctcagagacctgaattttggacatcacagctctggtgantcccaggctcgccacccaccctggtggctttccctgtaggaaaaggagaaaaggaggctcaaatgta

SEQ ID NO: 371 - DNA, 781 bp, Homo sapiens
  SITE (12): n equals a,t,g, or c
  SITE (691): n equals a,t,g, or c
  SITE (736): n equals a,t,g, or c
  SITE (739): n equals a,t,g, or c
  SITE (760): n equals a,t,g, or c
ccaaggggctgnaagaagatgcagagcagcctgaagctggtggactgtatcatcgaggtccacgatgcccggatcccactttcaggccgcaaccctctgtttcaggaaacccttgggcttaagcctcacttgctggtcctcaacaagatggacttggcggatcttacagagcagcagaaaattatgcaacacttagaaggagaaggcctaaaaaatgtcatttttaccaactgtgtaaaggatgaaaatgtcaagcagatcatcccgatggtcactgaactgattgggagaagccaccgctaccaccgaaaagagaacctggagtactgtatcatggtcattggggtccccaacgtgggcaagtcctccctcatcaactccctccggaggcagcacctcaggaaagggaaagccaccagggtgggtggcgagcctgggatcaccagagctgtgatgtccaaaattcaggtctctgagcggcccctgatgttcctgttggacactcctggcgtgctggctcctcggattgaaagtgtggagacaggcctgaagctggccctgtgtggaacggtgctggaccacctggtcggggaggagaccatggctgactacctgctgtacacccttaacaaacaccagcgctttgggtacgtgcagcactacggcctgggcagtgcctgtgacaacgtanarcgcgkgstkaaaaagtgtggctgtgaarctggggaagacscanaangtgaaggtgctcacgggcacnggtaacgtgaacggtattcag

SEQ ID NO: 372 - DNA, 1890 bp, Homo sapiens
  SITE (1117): n equals a,t,g, or c
gttttaagtaggctatwaaaatcaagttgctgtcttcagagggtctgtggtcctctgatcaacataggctggtgggagtacaggactcgcctcctcagggttccctgtgctgccacttttcagccatggccacaagtgaacagagtatctgccaagcccgggcttccgtgatggtctacgatgacaccagtaagaaatgggtaccaatcaaacctggccagcagggattcagccggatcaacatctaccacaacactgccagcaacaccttcagagtcgttggagtcaagttgcaggatcagcaggttgtgatcaattattcaatcgtgaaagggctgaagtacaatcaggccacgccaaccttccaccagtggcgagatgcccgccaggtctacggcttaaactttgcaagtaaagaagaggcaaccacgttctccaatgcaatgctgtttgccctgaacatcatgaattcccaagaaggaggcccctccagccagcgtcaggtgcagaatggcccctctcctgatgagatggacatccagagaagacaagtgatggagcagcaccagcagcagcgtcaggaatctctagaaagaagaacctcggccacagggcccatcctcccaccaggacatccttcatctgcagccagcgcccccgtctcatgtagtgggcctccaccgccccccccacccccagtcccacctccacccactggggctaccccacctcccccacccccactgccagccggaggagcccaggggtccagccacgacgagagctccatgtcaggactggccgctgccatagctggggccaagctgagaagagtccaacggccagaagacgcatctggaggctccagtcccagtgggacctcaaagtccgatgccaaccgggcaagcagcgggggtggcggaggaggcctcatggaggaaatgaacaaactgctggccaagaggagaaaagcagcctcccagtcagacaagccagccgagaagaaggaagatgaaagccaaatggaagatcctagtacctccccctctccggggacccgagcagccagccagccacctaactcctcagaggctggccggaagccctgggagcggancaactcggtggagaagcctgtgtcctcgattctgtccagaaccccgtctgtggcaaagagccccgaagctaagagcccccttcagtcgcagcctcactctaggatgaagcctgctgggagcgtgaatgacatggccctggatgccttcgacttggaccggatgaagcaggagatcctagaggaggtggtgagagagctccacaaggtgaaggaggagatcatcgacgccatcaggcaggagctgagtgggatcagcaccacgtaaggggccggcctcgctgcgctgattcgtcgagcccatccggcgacagaggacagccagaagcccagccagccccagactccagtgcaccagagcacgcacaggagcctgggcgcgctgctgtgaaacgtcctgacctgtgatcacacatgacagtgaggaaaccaagtgcaactcctgggtttttttagattctgcctgacacggaacaccaggtctgctcgtcttttttgtgttttatatttgcttatttaaggtacatttctttgggtttctagagacgcccctaagtcacctgcttcattagacggtttccaggttttctcccaggtgacgctgttagcgcctcagctggcggtgacagccggcccagcgtggcgccaccacacaccgcagagctgtccaggcacagctccgtccccagcgctcatggtgttgaaactgtctgtcatgcaccacggtgtctgtgtccacacagtaataaacggtttactgtccgcaaaaaaaaaaa

SEQ ID NO: 373 - DNA, 755 bp, Homo sapiens
  SITE (693): n equals a,t,g, or c
  SITE (702): n equals a,t,g, or c
  SITE (728): n equals a,t,g, or c
  SITE (743): n equals a,t,g, or c
  SITE (747): n equals a,t,g, or c
gcagatctggtaccaaaggagaatttggagagctggctaaattatttgaagaaagaattgccaacagtggtgttcagagcctcaacaaaaccaaaggataaagggaagataaccaaggtatcctttattagtggtaagaaatgtgattctttcagattttggttgaaatatgatgagtgtacaaaatcttgatttaagtgaatgaaaaattacaagatccaactctgatttcagccagagatcatctgaaaggcaatgtagttatcttaagagctgggctctggagcctgattgcttggggtttgttgaaatttatcaggtaagttgccagaataattcaactatttggaattttagcgtgtgaaggcaaagaagaatgctgctccattcagaagtgaagtctgctttgggaaagagggcctttggaaacttcttggaggttttcaggaaacttgcagcaaagccattcgggttggagtaattggtttcccaaatgtggggaaaagcagcattatcaatagcttaaaacaagaacagatgtgkaatgttggkgtatccatggggcttacamggagcatgcaagttgyccccttggrcaaacagatcacaatcatagatagtcccgascttcatcgtatctttcacttaattcctcctctgcgctttgctctgcgaagtccagcaaagtattgnaagtaattnaaacccgatcggaaggctgcccaatncccatcccttttccncaangcctggat

SEQ ID NO: 374 - DNA, 1457 bp, Homo sapiens
gcagcgccggaacctcagaggcgggtcgcagcggcgcagaggaggtcagctgcgggagcgtttccggggacggtgccgccatgagattgaccccgcgcgcgctgtgcagcgccgcccaggccgcctggcgggagaacttccccctgtgcggtcgcgacgtggcgcgctggttcccgggccacatggccaaggggctgaagaagatgcagagcagcctgaagctggtggactgtatcatcgaggtccacgatgcccggatcccactttcaggccgcaaccctctgtttcaggaaacccttgggcttaagcctcacttgctggtcctcaacaagatggacttggcggatcttacagagcagcagaaaattatgcaacacttagaaggagaaggcctaaaaaatgtcatttttaccaactgtgtaaaggatgaaaatgtcaagcagatcatcccgatggtcactgaactgattgggagaagccaccgctaccaccgaaaagagaacctggagtactgtatcatggtcattggggtccccaacgtgggcaagtcctccctcatcaactccctccggaggcagcacctcaggaaagggaaagccaccagggtgggtggcgagcctgggatcaccagagctgtgatgtccaaaattcaggtggagtcctcaggggccaggcccagcactctgtcaagagctctgcaggcgtctggcacctgccgacctctgtgtggcttccggctgctgaccacgcttccctcccctccactcagtgtccccgctgagcacccccggggcaggcactgcccctgcccttattccacagtcgtcatagtctttgcgccaaacctttggggaaggcacgctgttttccccatttccagatgaggaggccactgtccagggccatgcagtggtcaggacagacctgagtgtggcgccccccgccccaccctccactcccttccttgtgttctccttgggagcagaagacaagctgttgggacctgacgcttttatttattctccaaattaagtgggaattagatcctctggggaaccctggagcttggtgagagtgacgctgccatggggttgggtccctgaggccttcctcggagcattgggtgccaggggctgcccaggcttcctgagtggcccacctgggtgggaggctgccaccgcggcctgatcatgccctctgtgcccacacaggtctctgagcggcccctgatgttcctgttggacactcctggcgtgctggctcctcggattgaaagtgtggagacaggcctgaagctggccctgtgtggaacggtgctggaccacctggtcggggaggagaccatggctgactacctgctgtacaccctcaacaaacaccagcgctttgggtgagtgcagtgaatgcagggcagctggggcccctcctcctagtcacctcatttaaaaaaaaaaaac

SEQ ID NO: 375 - DNA, 560 bp, Homo sapiens
  SITE (556): n equals a,t,g, or c
ggccgcccttttttttttyttttttttttttagcagcttcaaacacaaacatttattatctcatagtttctgtaagtcagaaatgtgggaccaatttagctgggtgattctggctcatagtccccatgaagttctagtcaggatattagcagtggctgtaattatctgaaggcttgtttgtggctggaggacttgctttcaggatggttcacttcatgtggttgttgctagaaggctccagttccttgctggttgttggcagatgacctcaattcctcacatggatctcttcatacatctctcctccagtgtcttcacgtatagtggctggcttctcccagagtgatccaagagagaaagcaagatggaatccagaaattttcttaggatctaccctcagaagtcacacttcattttcaacacattccgtgtggtagaartgagtcctaggaacagcctacactcaggaagaggggattagmcccaaggagagagaagataaaataartktccgatttaaaacgccatactcackgcctttgacaccaatattaantttc

SEQ ID NO: 376 - DNA, 153 bp, Homo sapiens
  SITE (152): n equals a,t,g, or c
gagacccagcccatgacggaggtggacctgttcgtctccaccaagaggatcaaggtcttgacagcggactcccaggaggccatgatggaccacgccctgcataccatctcctacacagccgacatcggctgcgtgctggtgctgatggcgcng

SEQ ID NO: 377 - DNA, 703 bp, Homo sapiens
cagggatggcaagatcttttagcatttaggggatgcctttgttagtaaccgttcacaatgggcagctcccggctgagggtctttgaccctcatttggagaggaaagattccgccgcggcgctctcagaccgagagctgcccttgcctaccttcgatgtgccttatttcaaatacatcgacgaggaggatgaggacgatgaatggagcagccgctcgcagtcttccaccgaggatgactcagtggactctctgctctctgacagatatgtggtggtgtccgggaccccggagaagattttggagcaccttttgaatgacttgcacctggaagaagtccaggacaaagaaacagagaccctcctggatgacttccttctmacgtacactgtcttcatgacaactgatgacttgtgccaggctctgttaaggcactattctgctaagaagtatcaaggcaaagaggaaaactcagaygttccgsgtaggaaacgtaaagtcttgcatcttgtttcccagtggattgctctgtacaaagactggttacctgaagatgaacattcaaaaatgtttttaaagaccatatataggaatgtactggatgatgtttatgaatatccaatacttgaaaaagaattgaaagaatttcaaaagatacttggaatgcaccgtcgtcacactgtagatgaatattcaccacaaaaaa

SEQ ID NO: 378 - DNA, 448 bp, Homo sapiens
  SITE (438): n equals a,t,g, or c
caccaggaggtacggggcaagatgatgtctggacacgtggagtaccagatcctggtggtgacccgtctggctgcgttcaagtcggccaagcacaggcccgaggatgtcgtccagttcttggtctccaaaaagtacagcgagattgaggagttttaccagaaactgagcagtcgttatgcagcagccagcctccccccactacccaggaaggtcctgtttgttggggagtctgacatccgggagaggagagccgtgttcaatgagatcctgcgctgtgtctccaaggatgccgagttggcaggcagcccagagctgctagagttcttagctccagatccccaggggctgcagggctcaccagcagagattcctctgtcctgggatgggcacagacatccaggcagaatgatggaagaggcttttcgacttttttgaggnggcaagacca

SEQ ID NO: 379 - DNA, 873 bp, Homo sapiens
  SITE (1): n equals a,t,g, or c
  SITE (84): n equals a,t,g, or c
ncctgcatggccggcccgggtggggggcgcgggggggcccgggcgccatgcggggggggcacaaagggggtcgctgtgcctgtncccgtgtgatccgaaaagtgctggcaaaatgcggctgctgcttcgcccgggggggacgtgaatcctattccattgcgggcagtgaggggagtatatcggcttctgctgcctccggtctggctgccccctctggccccagctctggcctcarctctggcccctgttccccaggccccccagggccgtcagtggcctgaggagatggttggatcattccaaacattgtctcagtgtggaaatgaggcagacagtggtcaggcaggaccatatgagaactggatgttggagccagctctagccacaggagaggagctgccggaactgaccttgctgaccacactgttggarggccctggagataagacgcagccacytgaagaggagactttgtcccaagcccctgagagtgaggaggaacagaagaagaaggctctggaaaggagtatgtatgtcctgagtgaactggtagaaacagagacaatgkacgtggacgacttggggcacattgtggagggttatatggccaccatggctgctcagggggtccccgagagtcttcgaggccgtgacaggattgtgtttgggaatatcccgcaaatctatgagtggcaccgagactatttcttgcaagagctacaacggtgtctgacagatcctgattggctggctcagctattcatcaaacacgagcgccggctgcatatgtatgtggtgtactgccactggataaacaggcccttggtgacatcccccaggctccccatgactctcctccagtctctccaactc

SEQ ID NO: 380 - DNA, 363 bp, Homo sapiens
  SITE (362): n equals a,t,g, or c
gaaaagaagattcagcgactttcttggtttgcacagcaaattagcaagcaaatatttacatgttggttatattgtgccaccagctccagaaaagagtatagtagggatgaccaaggtcaaagtgggtaaagaagactcatcatccactgagtttgtagaaaaacggagagcagctcttgaaaggtaattctagacagctatattttattactctcatgtttgtaccttaatataaatgtaattccattatatggcaaaactgtgttttaatgattaaattttttccaaagtaccacttggtggctttttaagactgcttttaaacyttttttaaggaaattacytcctttcaacaaagtacng

SEQ ID NO: 381 - DNA, 955 bp, Homo sapiens
gggggcggtgaaagaagtttgctgacgaagatggcgactgaggcacagagtgaaggggaggtgccagcccgcgaatccggccggagtgatgccatctgcagttttgtgatctgcaatgattcttcccttcraggtcagcccattatctttaatcctgacttttttgtggagaaactccgacatgagaaacctgagattttcactgagttggtggtcagcaatatcacaaggctcatcgatttacctggaactgagttggctcagctgatgggggaagtggaccttaagttgcctggcggggctggcccagcatcaggattcttccggtctctcatgtctctcaagcgaaaggaaaaaggagtgatatttgggccccactgacggaggaaggcattgccaggatataccaactgattgagtatctacacaaaaacttgcgagtagagggtttgtttagagtaccgggtaatagtgtccgacagcagattttaagggatgctctcaataatggaactgacattgacttggaatcaggggaatttcactcaaatgatgttgccactttgctgaagatgtttctaggagagttgccggagcctctgctgacacataaacacttcaatgcacacctcaaaatcgctgatttgatgcagtttgatgataaaggaaacaagaccaatataccagacaaggaccggcaaattgaggctctccagttgctcttcctcattctccctcctcctaatcgtaatttgctgaagttattgcttgatctcctataccagacagcaaagawacaagacaagaacaagatgtcagcctataaccttgcccttatgtttgcaccccatgtcctgtggccaaaaaatgtcactgcaaatgaccttcaggagaatatcacaaagttaaacagtgggatggcttttatgattaaacactcccagaaactttttaa

SEQ ID NO: 382 - DNA, 446 bp, Homo sapiens
  SITE (67): n equals a,t,g, or c
  SITE (429): n equals a,t,g, or c
gcggctggaccacaccttccacctggagctggaggccgccaggctcctgcgcgccctggtgcttgcntgggaccctggcgtgagaaggcaccggccctgtgcccagggcaccgtgctgctgcccacggtcttccgagggtgccaggcccaacagctggccgtgcgcctggagcctcaggggctgctgtatgccaagctgaccctgtcggagcagcaggaagcccctgccacagctgagccccgcgtctttgggctgcccctgccactgctggtggagcgggagcggccccccggccaggtgcccctcatcatccagaagtgcgttgggcagatcgagcgccgagggctgcgggtagtgggactgtaccgtctttktggctcagcggcagttaaagaaagagcttcgggatgcctttgagcgggacagtncagcggtctgcctatct

SEQ ID NO: 383 - DNA, 339 bp, Homo sapiens
  SITE (204): n equals a,t,g, or c
  SITE (234): n equals a,t,g, or c
cagtgtcggcccaaacacaatgcccaggttgttggcagacatcttgttttccataaatcgtgcagccaccstgaacagatgggccaccaggtgccgcaggtgttgtagttagagtcaggcagctgtaccaagagggtcttcagcgagcggataacctcagggctggggctgggggtcccagggtcgtccccagggtctgcatgnaaggtcttagccagagagatgaaggcgtcntagaggtggaaggggatcacgggctcggtgagctcctgaagaaatcgcttgaggacactcgagacgtcatgaggcgagttccccgacagctccaccaacgctcgg

SEQ ID NO: 384 - DNA, 403 bp, Homo sapiens
  SITE (343): n equals a,t,g, or c
agacgcctggatcaacatagatggcaaaaccatggacatcacagtgaaaggggctgaagcacccccaccgctatgtgctggacgccgcacaaacccacatttacatgctcatgaagaaggattcttatgctcgctatttaaaatctccgrtctataaggacatgctggccaaagctattgaacctcaggaaaccaccaagaaaagctccaccctgcccttttatgcggcgtcamctgcgctccagcccaagccctgtyatcctgaggacagctggaagwggragccaaggcccgagaagcagccaacactgtgggacatcacccagccgggccagcacatggnttcccagcccccatctgaccgtgttacaacggggacctgcatgcccccgttttcttttag

SEQ ID NO: 385 - DNA, 561 bp, Homo sapiens
ttcggcagagcttttccgtgggttgcctgtgcaaattcatggggaactggtctgaaacatgacgtggaaattcaggctgtgacatcaaaacgtcaccccccaggagagcgagtctattctgtgccattctgactccagtcagccttattggttccagccagtttcagccagtcagccagttttgttgcaagcagagagaattataacaagctgtttcttcgtctgtcttcttgcaagatgagacccattgggcatgatggctaccatcccacctctgtagctgagtggctggattccattgaactgggcgactacaccaaagcctttctaatkaatggstacacttcgatggacctgttgaaaaaaatctgggaggttgaacttattaatgktttaaaaatcaatttgattggccacaggaaacgtattttggcatctctggggagacaggctgcacgacgatcccccacagaagccccctcggtccatcaccctcagggcgatgcaaggaggagaagaaatggaaaactactttgatggatattccccgatcaaaactgg

SEQ ID NO: 386 - DNA, 682 bp, Homo sapiens
  SITE (456): n equals a,t,g, or c
  SITE (584): n equals a,t,g, or c
  SITE (599): n equals a,t,g, or c
  SITE (678): n equals a,t,g, or c
ctaccgctattaccccgtggacggctactccctgcttaaacgcttccctcttcatcctcttacaggacccagatgccctgtccaaacagtgggacaatggttggaaagcattgggctacctcagtacgagaaccacctgatggctaatggatttgacaatgtgcagtttatgggaagcaatgttatggaagatcaggatktgttggaaattggaatccttaattctgggcacagacaaagaattctacaggcaatccagctccttccaaagatgagacccattgggcatgatggctaccatcccacctctgtagctgagtggctggattccattgaactgggcgactacaccaaagcctttctaattaatggctacacttcgatggacctgttgaaaaaaatctgggaggttgaacttattaatgttttaaaaatcaatttgattggccacagganacgtattttgggcatctctgggagacaggctgcacgacgatcccccacagaagccccctcggtccatcaccctcagggaacccagtgggtaatcacactcctccttcagttgtctccatcacttaggncaaagcactttacancacttggtggcttccctaggacgtttccttcacattattcatggcaggggcgatggcaagggagggaggaaggaattgnaaaa

SEQ ID NO: 387 - DNA, 415 bp, Homo sapiens
  SITE (87): n equals a,t,g, or c
  SITE (399): n equals a,t,g, or c
acatctcctacaagctggtgcccacgcacacgcaggtgaaggtgcatcgggctacaagcacttcgactggctgtacgcgcgcctggngagaagttcccggtcatctccgtgccccacctgcccgagaagcaggccaccgccwttcaggagsgacttcatctctaagcgcaggaagggcctgatctggtggatgaaccacatggccagccacccagtgctggcgcagtgcgacgtcttccagcacttcctgacgtgccccagcagcaccgacgagaaagcctggaagcagggcaagaggaaggccgagaaggacgagatggtgggcgccaacttcttcctgacccttagcacgccccccgccgctgcccttgactgcagaagtggagagcaagatcgaanggtttcaatgctttca

SEQ ID NO: 388 - DNA, 909 bp, Homo sapiens
  SITE (857): n equals a,t,g, or c
  SITE (897): n equals a,t,g, or c
  SITE (903): n equals a,t,g, or c
gcccaaaatgggccgcaggagcattgagtcccccagtttggggttctgcacagataccctccttccccacctcctagaggatgatctgggccagctgtctgacctggagccagagccagatgcccaaaattggcagcatacagtgggcaaggatgtggtggctgggctaacccagcgggagattgaccggcaagaggtcatcaatgagctgtttgtgactgaagcttcccacctgcgcacactccgggtcctggacctgatcttctaccagcgaatgaagaaggaraacctgatgccccgggaggagctggcccggctcttcccgaacctgcctgaactcatagagattcacaattcctggtgtgaagccatgaagaagctccgggagaaggccccatcatcaaagagatcagtgacctcatgctggcccggtttgatggccctgcccgagaggaactccagcaagtggctgcacagttctgttcctatcagtcaatagccctagagctaatcaagaccaagcaacgcaaggagagtcgattccagctcttcatgcaggaggctgagagccaccctcagtgtcggcggctgcagctgagagacctcatcatctctgagatgcagcggctcaccaagtacccgctgctgctggagagcatcatcaagcacacagagggtggcacctctgagcatgagaagctgtgccgggcccgggaccagtgccgggagattytcaagtatgtgaatgaagcggtaaaacaaacagagaaccgccaccgtttaagarggytaccagaaacgcytggatgccaccgcctggagagggccagcaamcccctggsagcagattcaagagntggatcttacaaccagaaaatgatccatgaaggaccctgnactggnagttca

SEQ ID NO: 389 - DNA, 335 bp, Homo sapiens
gtaatcagcacggactggcgcatctggaaaaagcgagtgcacgcgggcaatacagcctgttattgctggggatggtttcactttgcgcactgattctgatcctctggcgcgtggtttatcgctcagtcacgcgtccacttgccgaacaaacgcaggcgctgcaacggctgctggacggtgatattgactcccctttcccggaaaccgctggcgtacgggagctggataccatctcactggccgtcgttttacaacgtcgtgactgggaaaaccctggcgttacccaacttaatcgccttgcagcacatccccctttcgccagctggcgtaatagc

SEQ ID NO: 390 - DNA, 1066 bp, Homo sapiens
  SITE (963): n equals a,t,g, or c
  SITE (1041): n equals a,t,g, or c
ggaaacttcacaatggcaccattcaacgtaaactaaaatatgagcggatggtttctcgctctttgggcgcaaatccagatgacctgaaggacccaattaaaattagtatcccacgctacgtcctctgcgggcaaggaaaggatgcacacttcgagtttgaggtcaagattactgtcctagatgagacatggactgtattcaggcgttacagtcgytttcgagaaatgcataaaacattgaagttaaagtatgcagagcttgctgcccttgaatttcctccaaagaaactatttggaaataaggatgaacgtgtgattgctgagagacgaagtcacttagagaaatacctcagggactttttcagcgtgatgctccagtccgcaacatctcccctccacatcaacaaagtgggactgactctctcgaaacataccatttgtgagttttcaccattcttcaagaaaggagtctttgactacagcagccacgggacggggtagagccaggggtgatggaggaaccaccacagcagtgccttctcgtcgaagcgggctccgatgcagggcagctcccccatgcgaggatccgggtctgcctcctcctgctgaagacagacatgcagcagcgggcccgggccacctcacgtttccatacctagtgcctgagtttggggatgggatgctctgcctgctgatgtggccctgacaggcagccgttaccgttccattgcggttgaacgtggccttttcccacagtgcttccttctcactgcgcagcaaagttcgtcccctgtggcaagatagatgtggttgggccatcgtgggttccctgagcccagccagcctgggacctcccaaagtgggtggcttaccakaccacccttaaatgactttcatctggkttcctctttcaccaaaatatactcgtattttttatatttcttccatgtggctggctatattncaagaaaagcattttaaattatttcattgtaattttttctttttttccctcatttgaatcagaacttttatataaaancccaaacactgaaggttttacacag

SEQ ID NO: 391 - DNA, 649 bp, Homo sapiens
  SITE (335): n equals a,t,g, or c
ctgttggaatttatgaacagtatttatcagaaaaggcatctccaagagttactgttgatgactatttagtagcaaaattagcagatactttgaatcatgaagatccaacccctgaaatctttgatgacattcaaagaaaggtatatgaattgatgctacgagatgaaagattttatccttccttcagacagaatgcactttatgtgcgcatgttagctgagcttgacatgttaaaagatcctagtttcagaggatccgatgatggggatggagaatcttttaatgggtctcctacaggaagcataaatttgtctttagatgacctttcaaatgtntcktctgatgactcagtacaacttcatgcctacatttcagacacaggcgtttgtaatgatcatggcaagacatatgcattatatgccatcactgtacaccggcgcaacctaaacagtgaggagatgtggaaaacctatcgtcgttatagtgacttccatgacttccacatgagaatcactgaacagtttgaaagtctctcaagcatattgaaacttcctggaaaaaagacttttaataatatggatagagattttttagaaaagagaaaaaaggatctaaatgcatatttgcagttactgttagctcctgaaat

SEQ ID NO: 392 - DNA, 2045 bp, Homo sapiens
cgtccgcggacgcgtgggagcgggagtggcggggcgcagcaaagggagctggagcgcatggctgaggtcttggtcaccggggaacagctacggctcaggctgcacgaagaaaaggttattaaagatagacgtcatcatctcaagacctacccaaactgttttgtcgcaaaagaactgattgactggctgattgaacacaaagaggcttctgacagagagacggcaattaaactcatgcagaaattagcagaccggggcattattcaccatgtgtgtgatgagcataaggaattcaaggatgtcaaactcttctaccgctttagaaaggatgacggcaccttcccattggataatgaagtgaaggcctttatgagaggacagaggctatatgaaaagctgatgagccctgaaaacacactcctgcagcccagggaggaggaaggggtcaagtatgagcgcaccttcatggcatctgaattcctggactggctggttcaggaaggtgaggccaccacgaggaaagaggcagagcagctttgccaccggcttatggagcatggcatcatccagcatgtgtccagcaagcacccatttgtggacagcaatcttctctaccagttcagaatgaacttccggcggaggcgaagactgatggagctgctcaatgaaaagtccccctcctcccaggaaactcatgacagtcccttctgcctgaggaagcagagccatgacaatcggaaatctaccagctttatgtcagtgagccccagcaaggagatcaagatcgtgtctgcagtgaggagaagcagcatgagcagctgtggcagcagcggctacttcagcagcagccccaccctcagcagcagcccccctgtgctctgcaaccccaagtccgtgctgaagagacctgtcacctctgaggaactccttactcccggggctccgtatgcaaggaagacattcacgattgttggtgacgcggttggctggggttttgtggtgcgaggaagtaagccatgccacatccaggctgtagaccccagtggccctgcagccgcagcaggaatgaaggtctgtcagtttgtcgtctctgtcaacgggctcaatgtcctgcatgtagactaccggaccgtgagcaatctgattctgacgggcccacggacgattgtcatggaagtcatggaggagttagagtgctgagctcctgggcctcccagccctccagtggcctgtgggtgagggaagccagaatgacacaaagcaatgcaaagacaagattgccatgcaaatggatggttttggacatacgagtcttctccgcacatacatgtctaaagttgagttttatacactgaatgtggaagaaccgggtatcatatcttttttaaaaaatgtcagtgtagaaaacatttgggaaaccattttcctacatgatagaactgccttactagatttctatttgtagctctcattcattgttttttatcttagtttgcagaaaggtgttgaaatgcttctctagcccaaacagcgacatgctaaagtccccttcttcagagtcaatagagtagttgttaaaggttttaaattgtactttctccaaaattagcatgcagctatttaatagggaatctagatttcaccaagattcaaatcaaagcaacatttaaaggaataagacctgttcactagcattttcaagggggttctaaagcattcaagtgcttaaaagccataaaaaatgacttcttaattcctgcctttagtgtcaacttttaagttaatacaggtttcaattgtggcattaggaaaaaaaaaaaaaccttgtgatgctatggttgggggtagttagggagagactacatgaaattgtgtgcccctattttctttctgatcctaaatcattttgttttataaatcagctatagcatctttctagaattaatcctgaatatgttgaatgttaaaatagagaagtttgtatatacacataattaaaaatcaacccttctggcaagaaaaaaaaaaaaaaaaaaaaaaaaaaa

SEQ ID NO: 393 - DNA, 1882 bp, Homo sapiens
  SITE (5): n equals a,t,g, or c
acaangatgacggcaccttcccttggataatgaagtgaaggcctttatgagaggacagaggctatatgaaaagctgatgagccctgaaaacacactcctgcagcccagggaggaggaaggggtcaagtatgagcgcaccttcatggcatctgaattcctggactggctggttcaggaaggtgaggccaccacgaggaaagaggcagagcagctttgccaccggcttatggagcatggcatcatccagcatgtgtccagcaagcacccatttgtggacagcaatcttctctaccagttcagaatgaacttccggcggaggcgaagactgatggagctgctcaatgaaaagtccccctcctccsaggaractcatgacagtcccttctgcctgaggaagcagagccatgacaatcggaaatctaccagctttatgtcagtgagccccagcaaggagatcaagatcgtgtctgcagtgaggagaagcagcatgagcagctgtggcagcagcggctacttcagcagcagccccaccctcagcagcagcccccctgtgctctgcaaccccaagtccgtgctgaagagacctgtcacctctgaggaactccttactcccggggctccgtatgcaaggaagacattcacggtaggctgatggtctggcctttttctcccgtgctgcccatttttctgcaccgtgtccatgtgtcaatgggtagcttatagactgaaatgaaaactacttttctaattttctttttgtttttagcgtaattatgatactaggctttcttgacctcaaggcactaaggtgcattaggacttcacatgcgttattattaatataccatttaaaaattttttgatgtgttctttgttaaagaaaagatttccattatgcatttattctaatttaattgcaaatgatgccaataatcccttctgcattaggattaattctagaaattatttaaaacattaggggagtgttaagctagagaaaggaaactgtgggataaacttttctaccgtaggcagggtgcttcgacaatgtgtgcatgccttgaggtacacgagcctctgacttgctgtgagcagctccggaccacctgccccttcttggaggtcctttaggttcctaatgcctacattggatttcttcaaatggaatgaaagtgctcctttcagcatcaccgcacccactccccttcctgtgtctccttctgtcaatctcctcaaattcacgttcataccctcttcaaaacacttctcctccttcatcttttaactttagtggcattgcctcaggctgggggagaattctatccacactcagtcatgctgcaaacatttgctgagggctatttcacattctgaatgctgaggagttaatasgagaaaggcgctgacaacatgtctgtaccagaggaaaagataaactccaccttcggaagtgaaattgagtataatatacaaataacagcaaactgtaaagtaacggaagtgcctgaaaatcttgagcatttccacaaaaattttcatttgcctccctgtttttcctcagtctccagcattcaagagaggtagattgttattttgaaagtatttatttttgatttttaatttaaatgccaacattgttagtaattgattgtgaatgtgtttcagctgtgttttggttgggatatgtgtgaaagatgtggctaggagctgtccagggaattaaactgccagctctaataatgatttctatagaaaaggccttctctaattccaaacaacttttggattagagtctacttgtacattgtgaactttatgtactttttcactttttttccccccttggtggagaaaggggcatggtggagcccttggtggaggg

SEQ ID NO: 394 - DNA, 788 bp, Homo sapiens
  SITE (5): n equals a,t,g, or c
  SITE (38): n equals a,t,g, or c
  SITE (40): n equals a,t,g, or c
  SITE (42): n equals a,t,g, or c
  SITE (93): n equals a,t,g, or c
  SITE (713): n equals a,t,g, or c
  SITE (733): n equals a,t,g, or c
cccgncatacgaaacaccttccactttatttagaaaancngnccctccaccgcggtggcggccgctctagaactagtggatcccccgggctgnaggaattcggcacgagcagcatgctgcatccctgggaggagggagctcttaaggaagttccaagtggatgtaaagctggatcccgccacggcgcacccgagtctgctcttgaccgccgacctgcgcagtgtgcaggatggagaaccatggagggatgtccccaacaaccctgagcgatttgacacatggccctgcatcctgggtttgcagagcttctcatcagggaggcattactgggaggttctggtgggagaaggagcagagtggggtttaggggtctgtcaagacacactgccaagaaagggggaaaccacgccatctcctgagaatggggtctgggccctgtggctgctgaaagggaatgagtacatggtccttgcctccccatcagtgcctcttctccaactggaaagtcctcgctgcattgggattttcttggactatgaagccggtgaaatttcattctacaatgtcacagatggatcttatatctacacattcaaccaactcttctctggtcttcttcggccttactttttcatctgtgatgcaactyctcttatcttgccacccacracaatagcagggtcaggaaattgggcatycagggatcatttarnatcctgcttctgatgtaarnagatratcatctctaaaaattctgktcccaagagcagtcctaagcgtatcgaacg

SEQ ID NO: 395 - DNA, 505 bp, Homo sapiens
  SITE (416): n equals a,t,g, or c
  SITE (433): n equals a,t,g, or c
  SITE (455): n equals a,t,g, or c
cttctttaactttctcaggaatgtttctcttagatccagtgagaataagatggacagcagcaatcttgcagtaatatttgcaccgaatcttcttcagacaagtgaaggacatgaaaagatgtcttctaacacagaaaagaagctacgattacaggctgcagtagtacagactcttatcgattatgcatcaratattgggcgtgtaccarattttwtcctggaaaagataccagccatgttgggtattgatggtctctgtgctactccatcactggaaggctttgaagaaggtgaatatgaaactcctggtgaatataagagaaagagaagacaaagtgtaggagattttkttagtggagcactaaataawtttaaacctaacagaacaccttctattacacctcaagaagaaaganttgcccagctatctgantcaccatggttcttacaccaangctaagcgtacattgccataggttcttctcctggtttctccatttcacat

SEQ ID NO: 396 - DNA, 2403 bp, Homo sapiens
  SITE (1): n equals a,t,g, or c
  SITE (10): n equals a,t,g, or c
  SITE (18): n equals a,t,g, or c
  SITE (41): n equals a,t,g, or c
  SITE (2398): n equals a,t,g, or c
ncgggttttnggccagtnccatccaaatgggcgtggaaaangggtttrcctcacggggttttccaagtctccaccccattrcgtcaatggagtttgtttkggcaccaaaatcaacgggrctttccaaaatgtsgtaacaactccgccccattgacgcaaatggcsggtaggcgtgtacggtggaggtctatataagcagagctcgtttagtgaaccgtcagatcgcctggagacgccatccacgctgttttgacctccatagaagacaccgggaccgatccagcctccggactctagcctaggccgcgggacggataacaatttcacacaggaaacagctatgaccactaggcttttgcaaaaagctatttaggtgacactatagaaggtacgcctgcaggtaccggtccggaattcccgggtcgacccacgcgtccgcagatatggtggacaatcgtttcctggtacattttgacaactgggatgagagctatgactattggtgtgaagcatcaagtccacatattcatccagttggttggtgtaaggaacatagaagaacccttattactccaccaggttatccaaatgtgaaacatttttcttgggataaatacttagaagaaaccaattctttacctgctcctgcaagagctttcaaagtgaaacctcctgcatggattccagaaaaaaatgaagcttgaggttgtagacaaaaggaaccctatgtttattagagtagcaactgtggcagacacagatgatcaccgggtaaaagttcactttgatggctggaacaattgctatgattactggatagatgcagattctcctgatattcaccctgtaggctggtgttcaaaaacaggacatccccttcagcctcctttgagccccttagaattaatggaagcttcagaacatggtggatgctcaaccccgggatgtaaagggattggccatttcaagagagcgagacatctgggccctcacagtgctgccaactgtccctattcagaaatcaatttgaataaagaccgtatttttccagaccgcttaagtggtgagatgcctccggctagtccgtcatttccaagaaataaaaggacagatgcaaatgaaagctcttcttcccctgaaatcagagaccagcatgctgatgatgtcaaagaagactttgaagagagaacagaaagtgaaatgagaacatcacatgaagccagaggtgcccgggaagaacccaccgtccagcaggcacagcgtcggtcagctgtctttctgtcctttaagtccccaattccatgtctgcccttgcgctgggagcagcaaagcaaacttcttccaactgtcgcaggaatccctgccagtaaagtttccaaatggagcacagacgaggtgtcagaatttatacagagcttacctgggtgtgaagaacatggaaaggtatttaaagatgaacaaattgatggagaagcatttctacttatgactcaaacagacattgttaaaattatgagcattaaactgggccctgctctcaaaattttcaattccatcctgatgttcaaagctgcagagaagaattctcacaatgaactttgaagatggtgaattctgaataccatcagcattctgctttaaagctcatgttttattcaaagcacaaggacggttataactcctaagtgagaagtctccaaaactcaaaagagcaacactatcggattatttatattactcaagagacaatatatatgaattcttatgaaagtgcttgagcttttaaccaggtactgtctaacaacagtcatcttttggttctgttcactgagctaaatttatctttgtaaatctttttgagtctggggggtggggggaaggggggcttcattaattatttatggtaatggggggcagagtaagaacttttggcattttgtaaacattgttgaattctctttcatgtacactgtttctttttcaatactttcagaaacctttttatataatcaaatttcaatttaaaccaaattagtcgaaacctggctaagtttagccagtaggactgttatctgtattgttaattttgtgccatattttgaattgcaacattatgctaagtataactttgcaagtcatgatattgcctaactgcttgtcataattgtcagggctgaatagttgtaagaatgacttttctttgaatcagtatttttccttttgcacgcattatgaaatgttaaacaaattacttttcaccagcatctttactataattaccaaaaacatgtatataaaagaatgaaattgaaaaataaaatatataaacataaaaaaaaaaaaaaaaaaaaaaaaaamaaagggcggccgctctagaggatcctcgaggggcsccaanttacg

SEQ ID NO: 397 - DNA, 713 bp, Homo sapiens
  SITE (494): n equals a,t,g, or c
  SITE (552): n equals a,t,g, or c
  SITE (638): n equals a,t,g, or c
  SITE (676): n equals a,t,g, or c
  SITE (682): n equals a,t,g, or c
  SITE (711): n equals a,t,g, or c
gcacacagcagtttggcgtcagtctgcaatacctcaaagacaaaaatcaaggcgaactcatcccccctgtgctgaggttcacagtgacgtacctgagagagaaaggcctgcgcaccgagggcctgttccggagatccgccagcgtgcagaccgtccgcgagatccagaggctctacaaccaagggaagcccgtgaactttgacgactacggggacattcacatccctgccgtgatcctgaagaccttctgcgagagctgccccagccgcttctgaccttccaggcctacgagcagattctygggatcacctgtgtggagagcagcctgcgtgtcactggctgccgcagatcttacggagcctcccagagcacaactacgtcgtcctccgctacctcatgggcttctgcatgcggtgtcccgggagagcatcttcaacaaaatgaacagctctaacctggcctgtgtcttcgggctgaattttgatctggccatnccagggggtctccttccttgagtgcccttgtgcccctgaacatgttcacttgaactgnttgatcgaggtactatgaaaaggatctttaggcaaccctggaaggcaccttggggaagcacgggcttggcaaccaatggggaacanggggaacaagggcaagccccttttgcaaggaagcttgngcccangggccacaaggccaacgggccctttaacnaa

SEQ ID NO: 398 - DNA, 2488 bp, Homo sapiens
ggtaccggtccggaattcccggggctaagataaaggatgatcttgaagaccttatagttattgggatgagagcaaaacattggtgacatttttctgaaatattcaaaagatttggtaaaaacctaccctccctttgtaaacttctttgaaatgagcaaggaaacaattattaaatgtgaaaaacagaaaccaagatttcatgcttttctcaagataaaccaagcaaaaccagaatgtggacggcagagccttgttgaacttcttatccgaccagtacagaggttacccagtgttgcattacttttaaatgatcttaagaagcatacagctgatgaaaatccagacaaaagcactttagaaaaagctattggatcactgaaggaagtaatgacgcatattaatgaggataagagaaaaacagaagctcaaaagcaaatttttgatgttgyttatgaagtagatggatgcccagctaatcttttatcttctcaccgaagcttagtacagcgggttgaaacaatttctctaggtgagcacccctgtgacagaggagaacaagtaactctcttcctcttcaatgattgcctagagatagcaagaaaacggcacaaggttattggcacttttaggagtcctcatggccaaacccgacccccagcttctcttaagcatattcacctaatgcctctttctcagattaagaaggtattggacataagagagacagaagattgccataatgcttttgccttgcttgtgaggccaccaacagagcaggcaaatgtgctactcagtttccagatgacatcagatgaacttccaaaagaaaactggctaaagatgctgtgtcgacatgtagctaacaccatttgtaaagcagatgctgagaatcttatttatactgctgatccagaatcctttgaagtaaatacaaaagatatggacagtacattgagtagagcatcaagagcaataaaaaagacttcaaaaaaggttacaagagcattctctttctccaaaactccaaaaagagctcttcgaagggctcttatgacatcccacggctcagtggagggaagaagtccttccagcaatgataagcatgtaatgagtcgtctttctagcacatcatcattagcaggtatcccttctccctcccttgtcagccttccttccttctttgaaaggagaagtcatacgttaagtagatctacaactcatttgatatgaagcgttaccaaaatcttaaattatagaaatgtatagacacctcatactcaaataagaaactgacttaaatggtacttgtaattagcacttggtgaaagctggaaggaagataaataacactaaactatgctatttgatttttcttcttgaaagagtaaggtttacctgttacattttcaagttaattcatgtaaaaaatgatagtgattttgatgtaatttatctcttgtttgaatctgtcattcaaaggccaataatttaagttgctatcagctgatattagtagctttgcaaccctgatagagtaaataaattttatgggygggtgccaaatactgctgtgaatctatttgtatagtatccatgaatgaatttatggaaatagatatttgtgcagctcaatttatgcagagattaaatgacatcataatactggatgaaaacttgcatagaattctgattaaatagtgggtctgtttcacatgtgcagtttgaagtatttaaataaccactcctttcacagtttattttcttctcaagcgttttcaagatctagcatgtggattttaaaagatttgccctcattaacaagaataacatttaaaggagattgtttcaaaatatttttgcaaattgagataaggacagaaagattgagaaacattgtatattttgcaaaaacaagatgtttgtagctgtttcagagagagtacggtatatttatggtaattttatccactagcaaatcttgatttagtttgatagtgtgtggaattttattttgaaggataagaccatgggaaaattgtggtaaagactgtttgtacccttcatgaaataattctgaagttgccatcagttttactaatcttctgtgaaatgcatagatatgcgcatgttcaactttttattgtggtcttataattaaatgtaaaattgaaaattcatttgctgtttcaaagtgtgatatctttcacaatagcctttttatagtcagtaattcagaataatcaagttcatatggataaatgcatttttatttcctatttctttagggagtgctacaaatgtttgtcacttaaatttcaagtttctgttttaatagttaactgactatagattgttttctatgccatgtatgtgccacttctgagagtagtaaatgactctttgctacattttaaaagcaattgtattagtaagaactttgtaaataaatacctaaaacccaagtgtaaaaaaaaaaaaaaaaaaaaaa

SEQ ID NO: 399 - DNA, 442 bp, Homo sapiens
  SITE (351): n equals a,t,g, or c
gtaatatgtgaaaggatttgataatgcaatggaattggttaaaaacatgacagaacgtattccccagttcaaatcagtggttgaagaaattcagaaacagaaaatctgtgggagcttaactttgcagcatcacatgctagaacctgttcagcggattccccggtatgagatgctccttaaggactatctaaggaaattgcctcctgattccctggactggaatgatgctaaaaaatcacttgaaattatatctacagcagcaagccattctaatagtgcaataaggaaaatggagaacctaaagaaactcttagagatttatgaaatgttgggagaagaagaagacattgnaaacccttcaaatgaactaatarmwgaaggacagatcctcaaactagctgctcgaaacacttcagcacaagaacgctaccttttcttattc

SEQ ID NO: 400 - DNA, 1619 bp, Homo sapiens
  SITE (131): n equals a,t,g, or c
  SITE (223): n equals a,t,g, or c
  SITE (1087): n equals a,t,g, or c
  SITE (1159): n equals a,t,g, or c
  SITE (1594): n equals a,t,g, or c
  SITE (1603): n equals a,t,g, or c
gggcgcgggaagcacagcccggccctccaggtccccaaggagaccccagcctcctgctgcccactgtgagcgacctccccggggctcctctggaagcggctccggcaagtatcgagtttgcctgtgcggantgggggagcctccggctttcctgtttgctttgttaattattttcgtccccagaggaaggcgggccggccccctcattccctgctgggccccncctccctgaagatctacacagcagatctactcacaaaagtccacccagcagaagcaggaggatggtggttgtgggtcctctgtgagcagccctgttaacctttaaaccagcacggccgccgcagctgtgagcctagcacctgatcagtggagagctgtggattgcatgtttgtttgccattgcccccgccamcctgcaagttgcaccttctagaatcagcaagccaagctcctctcacccagcgtaatgatgcggaaatgcaaatgcaccatcatgttgtgacccatattgcgaaaattagaaaaaaggaagttgtgtttcgctattgcacgaattcagcccagaggagaaactcgctcgccttcagaagacagtacctcctaaatggctctactttgaacctgctgggcaaggaagagattttcaaggaaaccatctaccgtgtgcaagctcctgccggccaaccccagaccccagcacggagccaggcgcctgtgcccgccraccctcagcatcctcctcagaaaggctggtggcatcaggaagcccctggccagcctccacctgagcccagtgagctcagctttaaggatggagtcaggcagggggtcctcaacccctccaggacccattgctgccctagggatgccagacactgggcctggcagttcctccctagggaagcttcaggcgctccctgttgggcccagagcccactgtggggaccctgtcagcctggctgcagcaggggacggctctccagacataggccccacgggagagctgagtggtagcttaaagatccccaaccgggacagcgggatcgacagtccmtcctccagtgtggctggagagaactttccntgcgaggagggcttggargctggcccaagccccactgtactgggggcgcacgcaragatggcyctggacagncaggtcccgaaggtcaccccccargargaggcggacagcgacstgggtkaggaacctgactytgagaacaccccccagaaggctgacaaggatgccggcctggcccagcactctggcccccagaagcttctccacattgcccaggagctcctgcacaccgaggagacctatgtgaagcggctgcacctgctggaccaggttttytgcaccaggctgacggatgmggggatccctccagaagtcatcatgggcatattctctaacatctcctccatccaccgcttccacgggcagttcctgctgccggagctgaagacgcggatcacggaggagtgggacacaaacccacgggcttcggggacatcctgcagaagctggccccatttcctgaagatgtaccggcgagtatgttcaagaactttgaccgagccgtanggctgggtnaagcacgtggacccag

SEQ ID NO: 401 - DNA, 797 bp, Homo sapiens
cgctgtgtgagccgagaggagccgggtgccacgcttcgtgcagcagtgcatccgcgccgtcgaggccgcggtacgtgcgctgcgggggtgagggcggcaggcattggggtgcccgcagcctcctgccaggaccgcagctggagacccctggatggacgcagggtccagggggaaagtacgggaggccccgagtgggagtcatagcagggacccgtagccccaccctatccccatccctgaacccgggatcagcgcctccctctggcccagggctggacatcgacgggctgtaccgcatcagtggaaacctggccaccatccagaagctacgctataaggtggaccacgatgagcgccttgacctggatgacgggcgctgggaggacgtccacgttatcaccggagccctgaagctcttctttcgggagctgcccgagcccctcttccccttctcgcacttccgccagttcattgcggccatcaagttgcaggaccaggcccggcgcagccgctgtgtgcgtgacttggtgcgctygctgcccgctcccaaccacgacactctgcggatgctcttccagcacctctgccgggtgatcgagcacggcgagcagaaccgcatgtcggtgcagagcgtggccattgtgttcgggcccacgctgctgcggcccgaggtggaagagaccagcatgcccatgaccatggtgttccagaaccaggtggtggagctcatcctgcagcagtgcgcggacatcttcccgccgcactgactgctggcctgtgactggggcggcggccgc

SEQ ID NO: 402 - DNA, 397 bp, Homo sapiens
  SITE (161): n equals a,t,g, or c
  SITE (182): n equals a,t,g, or c
ggcagagcggactacagcatgaaggaattttccgggtgtcaggttcccaggtggaagtgaatgacatcaaaaatgcctttgagagaggagaggaccccctggctggggaccagaacgaccatgacatggattccatagctggtgtcctgaagctttacttncgggggctggaacaccctctnttccccaaggacatctttcatgacctgatggcctgcgtcacaatggacaacctgcaggagagagctctgcacatccggaaagtcctcctagtcctgcccaaaaccactctgattatcatgagatacctctttgccttcctcaatcatttatcacagttcagtgaagagaacatgatggacccctacaacctcgccatctgctttcggggccctcg

SEQ ID NO: 403 - DNA, 522 bp, Homo sapiens
  SITE (454): n equals a,t,g, or c
ttgcacagacccacgccgagcgccactgcctcctcccgagtctggcagtctccctgagccagcagccagtccaccagcttgctcccgggaagcactgacttgtaggtcttcaggtggtaatcacggtctttgatcaccggggtgtagaggctgtgaagacggcagtaaagcctcacacccttggacatgatgtcctccagctcacttcgggccttgtaggtgccatcgtcgtagcggaagcgatacatcacctgctcattcttgaactggtgcttgtcggaaacatggtggatgatgccattctccaacagggcttggcccaagttgactccttcttccgtcttgctgatttcaccaatttctaggagccaggcaacgaactcattgccaagaaagcacttggggacagtgctcagtttctccggcggtccttgatgaggttcaccttcttgtncatcatcatgtggtacagcttctcccccttctccgcaatcatgacgtaggcatcacgctccatgccca

SEQ ID NO: 404 - DNA, 450 bp, Homo sapiens
  SITE (400): n equals a,t,g, or c
  SITE (420): n equals a,t,g, or c
  SITE (424): n equals a,t,g, or c
  SITE (443): n equals a,t,g, or c
gcgctgcttgaaatctacgagaaggatgagaagatccagaagcatcttcaggactccttggcagatctgaagagcctatacaacgaatggggatgcacaaattatattaacctgggctccttcctcatcaaaccagtacagagagtaatgcgttacccgctgttgctaatggagttgctgaattccaccccagaatcccacccagataaagtgcctttaaccaatgcagtccttgcggtcaaggaaatcaaygttaacattaatgaatataaacggcgaaaggacctggtcctcaagtaccgtaagggtgatgaagatagccttatggagaaaatttccaaactgaacatccactccatcatcaagaaatccaaccgagttagcagtcacctgaagcatntcactggctttgctcctcanatanaagatgaaagtatttgaanaaacaga

SEQ ID NO: 405 - DNA, 610 bp, Homo sapiens
  SITE (24): n equals a,t,g, or c
  SITE (45): n equals a,t,g, or c
  SITE (61): n equals a,t,g, or c
  SITE (596): n equals a,t,g, or c
  SITE (608): n equals a,t,g, or c
aatgcattgtgccttgtggttgtncaccctgtggctgttctggtngaattggccctcttcntcctaaacaaggagtaaagtctgatgactctataagcaagattatatacactggcgccaaattactaatcttttccatatgtgaacagatgggcttcccaacacgatctccttcagcctggaagaggaagaggaactggagggtggagagtcagcagaaatccacgtgcttctcagaagatctcgtggcagagcagctgacctacatggatgcacaactcttcaagaaagtagtgcctcaccactgcctgggctgcatttggtctcgaagggataagaaggaaaacaaacatttggctcctacgatccgtgccaccatctctcagtttaataccctcaccaaatgtgttgtcagcaccatcctggggggcaaagaactcaaaactcagcagagagccaaaatcattgagaagtggatcaacatcgctcatgaatgtagactcctgaagaatttttcctccttgagggccatcgtttcggcactgcagtctaawtccatctatcggttaaaaaagacttgggstgccgttcccaanggaccgaatgcnga

SEQ ID NO: 406 - DNA, 552 bp, Homo sapiens
  SITE (531): n equals a,t,g, or c
  SITE (537): n equals a,t,g, or c
  SITE (549): n equals a,t,g, or c
gacttggggcagattgtggagggttatatggccaccatggctgctcagggggtccccgagagtcttcgaggccgtgacaggattgtgtttgggaatatccagcaaatctatgagtggcaccgagactatttcttgcaagagctacaacggtgtctgaaagatcctgattggctggctcagctattcatcaaacacgagcgccggctgcatatgtatgtggtgtactgtcagaataagcccaagtcagagcatgtggtgtcagagtttggggacagctactttgaggagctccggcagcagctggggcaccgcctgcagctgaacgacctcctcatcaaacctgtgcagcggatcatgaaataccagctgctgctcaaggattttctcaagtattacaatagagctgggatggatactgcagacctagagcaagctgtggargtcatgtgctttgtgcccaagcgctgcaacgatatgatgacgctggggaaaattgcggggatttgaagggcaactgattgctcagggggnaaactnttgggcccaggnaca

SEQ ID NO: 407 - DNA, 1489 bp, Homo sapiens
aaacaggggaggttgtgtgtgggggtgggaatggccaccatggctgctcagggggtccccgagagtcttcgaggccgtgacaggattgtgtttgggaatatcctgcaaatctatgagtggcaccgagactatttcttgcaagagctacaacggtgtctgaaagatcctgattggctggctcagctattcaycaaacacgagctccggcagcagctggggcaccgcctgcagctgaacgacctcctcatcaaacctgtgcagcggatcatgaaataccagctgctgctcaaggwttttctcaagtattacaatagagctgggatggatactgcagacctagagcaagctgtggaggtcatgtsctttgtgcccaagcgctgcaacgatatgatgacgctggggagattgcggggatttragggcaaactgactgctcaggggaagctcttgggccaggacactttctgggtcaccgagcctgaggctggagggctgctgtcttcccgaggtcgagagaggcgcgtcttcctctttgagcaaatcatcatcttcagtgaagccctgggaggaggagtgagaggtggaacacagcctggatatgtatacaagaacagcattaaggtgagctgcctgggactggaggggaacctccaaggtgacccttgccgctttgcactgacctccagagggccagagggtgggatccagcgctatgtcctgcaggctgcagaccctgctatcagtcaggcctggatcaagcatgtggctcagatcttggagagccaacgggacttcctcaacgcattgcagtcacccattgagtaccagagacgggagagccagaccaacagcctggggcggccaagagggcctggagtggggagccctggaagaattcrgcttggagatcaggcccagggcagcacacacacacccatcamtggctctctcccctctctgctgctgtcacccaaaggggaggtggccagagccctcttgccactggataaacaggcccttggtgacatcccccaggctccccatgactctcctccagtctctccaactccaaaaacccctccctgccaagccagacttgccaagctggatgaagatgagctgtaactggtgaaaaccatgggggtggtgctgactcagccgcctattccccaaggagcttcagggcagtccttctggcactgctccagaattcctccttcttggtgtgtctggagggtgggcaaggctgggagggatatcaacttggaggagaacacctagacccaaggacttttttctgcccaaggaacacagtttccttcagctcccatccctatgcatgcatcatggtccccccaaaaggaggatatgtgggtgggtgggagggctggggcaggggccagatagaaattattggttttgttttttaattttgtttttcctgttttctgagaataaaggttttgttatatcaccacacaccacrrgr

SEQ ID NO: 408 - DNA, 914 bp, Homo sapiens
  SITE (833): n equals a,t,g, or c
  SITE (835): n equals a,t,g, or c
  SITE (861): n equals a,t,g, or c
  SITE (885): n equals a,t,g, or c
  SITE (909): n equals a,t,g, or c
ccgcgggcagtggcagtcagcctccccgctttgtgctacctgcggcccggctctcctccgcgcccccactcgcgctgcgatgacgcgctcactgttcaagggaaacttttggagtgcagacatcctcagcaccatcggctatgacaacattatccaacatctgaacaatggccgcaagaactgcaaagagtttgaagactttctaaaagaaagggcagcaattgaagagaggtatggcaaagatctgctcaacctctctaggaagaagccgtgtggacagtctgaaatcaacaccctgaagcgggcccttgaagtcttcaagcagcaagtagacaatgtggcacaatgtcacattcagcttgcacagagtttaagagaagaggccaggaagatggaagaattcagggaaaagcaaaaactacaacgaaaaaagacagagctcmtaatggrtgctatccmtwaacaaaagagyttacaattcaagaaaaccatggatgcaaagaagaactatgagcagaaatgccgggacaaagatgaggcagaacaggccgtcagccggagtgccaacctggtgaacccgaagcaacaagaaaagctttttgtgaactggcaacttcaaagaccgcagtagaggactcagacaaagcatacatgctgcacatcggcaccctggataaggtccgagaagagtggcagagtgagcacatcaaggcctgcgaggcattttgaggctcaagaatgtgaaccaataaacttctttccggaatgcattgtgggtacatgtgaatcactgtcacaacaatgtgtacccgtgatgaaatgtacgaccaatncnaagagttagaaatgtgcagcattcanaagggcatttgatacttgggaatnacgcaaactggcagattccccagnccctt

SEQ ID NO: 409 - DNA, 447 bp, Homo sapiens
  SITE (358): n equals a,t,g, or c
  SITE (394): n equals a,t,g, or c
  SITE (408): n equals a,t,g, or c
  SITE (422): n equals a,t,g, or c
ggagtggctgaccgccttgctggagcggagatgcagccgccgccccgaaaagtgaagccggcccaggaggtgaagcttcgcttcctggaacagctgagcatccttcagacctggcagcagagggaggcggatctgctggaggacatcagatcctacagcaagcagagggcagccattgaacgggagtatgggcaggcactccagaaactggctggcccattcctgaagagggaagggcaccggagcggtgagatggacagcaggacagtgttcggtgcctggcgctgcctgctggatgccaccgtggctgggggccaaacccgactccaggcgtctgaccgataccgtgacctagcanggggtacagggcggacgccaaggagcaagtgcttangaaaggaacagagnacctccagagggcncaagcttgaggtctgcagtctgtcc

SEQ ID NO: 410 - DNA, 1178 bp, Homo sapiens
  SITE (1032): n equals a,t,g, or c
  SITE (1071): n equals a,t,g, or c
  SITE (1171): n equals a,t,g, or c
gttacctgcagaggctgccctgaagctccctgtggcctggagactatgtacaagaggaatggtctgatggctagcgtgttggtcacctctgccactccacagggcagcagcagctcggactctctggagggccagagctgcgactatgccagcaagagctatgatgccgttgtcttcgatgtcttgaaagtgaccccagaggagtttgctagccagattacattaatggatatacctgtgtttaaagctatccagccggagaactagccagctgtggatggtaagaaggagaaacacagtcttgcccctaacgttgtggcctttacccggagtttaaccaggtcagtttttgggttgtacgagaaattctaacagcacagactttaaaaataagggcagaaatcctcagccattttgtgaaaatagccaagaaacttctagaactcaacaaccttcattctctcatgtctgtggtatcagcattacaaagtgctcccatcttcaggctgacaaaaacctgggctcttttaaatcgaaaagacaagactacctttgagaaattggactacctgatgtcgaaagaagataattacaagcggacacgggaatatatccgaagcctgaagatggttccaagtattccctatctaggaatctatcttctggatttaatctacattgattctgcatatcctgcctcaggagtatcatggaaaatgaacaaagatccaatcagatgaacaatattcttcgaataattgctgatttacaagtttcctgcagctatgatcacctcaccaccctgccccatgtgcagaagtacctgaagtccgtacgctacattgaagagctccagaagtttgtggaagacgacaactacaaactgtcgctcagaatcgaaccaggaagcagctctccaagactagtctcttccaaggaagatcttgcaggtccctctgctggctccggttctgcgaggttcagccggaggcacctgtcctgacacatctgttgctggcagcctccccacanctccagtgcccagacacagggaagagccacagcctaggnaacaatatggatgtgttcagttgagtgttagttgaggagtaaaagtgcgacatttcccttcggagaaaggcaagggcacctacttggacgacagtgttcntagagtt

SEQ ID NO: 411 - DNA, 773 bp, Homo sapiens
  SITE (677): n equals a,t,g, or c
  SITE (734): n equals a,t,g, or c
gcgtctgcgagatcgagcggcgggcgctgcgcaccaagggcatctaccgggtcaatggggtaaagacacgcgtggagaagctgtgccaggccttcgagaacggcaaggagctggtcgagctgtcgcaggcctcgccccacgacatcagcaacgtcctcaagctctacctgcgtcagcttcccgagccgctcatctccttccgcctctaccacgagctcgtagggctggccaaggacagcctgaaggcagaggccgaggccaaggcggcgtcccggggccggcaggacggctcggagagcgaggcagtggcggtggccctggcaggtcggctgcgggagctcctgcgggacctgccgcctgagaaccgggcctcgctgcagtacctgctgcgtcacctacgcaggatcgtggaggtggagcaggacaacaagatgacccccgggaacctgggcatcgtgttcgggcccacgctgcttcggccacggcccaccgaggccaccgtgtccctctcctccctggtggattatccccatcaggcccgcgtcatcgagactctcatcgtccactacggcctggtcttcgaggaggagccggaggagacccccggsggccaggacgagtcatccaaccagcgagctgaggtagtcgtccaggtgccgtacctggaggcgggcgangcggyggtctacccgctgcaggaggcggcggcggacgggttcagagaatcccgagtngtgtccaacgattcggactcggacctagaggaggcctcc

SEQ ID NO: 412 - DNA, 1356 bp, Homo sapiens
gggagccgctcagyacctggcccctgcscaccycgcaggatcgtggaggtggagcaggacaacaagatgacccccgggaacctgggcatcgtgttcgggcccacgctgcttcggccacggcccaccgaggccaccgtgtccctctcctccctggtggattatccccatcaggcccgcgtcatcgagactctcatcgtccactacggcctggtcttcgaggaggagccggaggagacccccgggggccaggacgagtcatccaaccagcgagctgaggtagtcgtccaggtgccgtacctggaggcgggcgaggcggtggtctacccgctgcaggaggcggcggcggacgggtgcagagaatcccgagttgtgtccaacgattcggactcggacctagaggaggcctccgagctgctgtcctcatcggaggccagtgccctgggccacctcagcttcctggagcagcagcagagcgaggccagcctagaggtggcttctggcagccacagcggcagtgaggagcagctggaggccacagcccgggaggacggggacggggacgaggacggcccggcccagcagctctcaggattcaacaccaaccagtccaacaacgtgctgcaggccccactgccccccatgaggctccgtggcgggcggatgacrctgggctcctgcagggaaaggcagccggaattcgtgtgagctggggtggggctgggaccacaggtggcttctctctygcctgctcctgtccctccagcacgtcccctgcaccacggcatagcttaggtgcgccgtcctggggtcgctgccgagagcgcctggacttcgacgtcccaccagcgggcgcctcctcccagaggcttccaggagcacgagggccttgcggcacaggactgtgccctgtrctgtcccctgcaccccggctcagctgagctggggaacactgctgtcgtgtgaagtcacagtggccttgttggtgcccacagggctgtgtggatggaggaagctgtccctgcccagtgcatcccccaggtcatcacggggamgcaggaggcaggccctgccctgccctctcctcacaggtctgttgcagggactccagaaaccattctgggagccgtggatgggggcggagctggggtttggtgcagtttccagggtgcagtacagcagggcctgaatactggccctggactcccttttccagaacaccaggtgtggccacctggggctcaggtacacagtggggtctctcggaagccaccgtgtggttctttcacaggcacgtttattttgctgaaataaaaagtttttaatcgggaaaaaaaaaaaaaaaaaaaaaaaaaaagg

SEQ ID NO: 413 - DNA, 1402 bp, Homo sapiens
ctacggctcaggctgcacgaagaaaaggttattaaagatagacgtcatcatctcaagacctacccaaactgttttgtcgcaaaagaactgattgactggctgattgaacacaaagaggcttctgacagagagacggcaattaaactcatgcagaaattagcagaccggggcattattcaccatgtgtgtgatgagcataaggaattcaaggatgtcaaactcttctaccgctttagaaaggatgacggcaccttcccattggataatgaagtgaaggcctttatgagaggacagaggctatatgaaaagctgatgagccctgaaaacacactcctgcagcccagggaggaggaaggggtcaagtatgagcgcaccttcatggcatctgaattcctggactggctggttcaggaaggtgaggccaccacgaggaaagaggcagagcagctttgccaccggcttatggagcatggcatcatccagcatgtgtccagcaagcacccatttgtggacagcaatcttctctaccagttcagaatgaacttccggcggaggcgaagactgatggagctgctcaatgaaaagtccccctcctcccaggaaactcatgacagtcccttctgcctgaggaagcagagccatgacaatcggaaatctaccagctttatgtcaatgtcctgcatgtagactaccggaccgtgaacaatctgattctgacgggcccacggacgattgtcatggaagtcatggaggagttagagtgctgagctcctgggcctcccagccctccagtggcctgtgggtgagggaagccagaatgacacaaagcaatgcaaagacaagattgccatgcaaatggatggttttggacatacgagtcttctccgcacatacatgtctgaagttgagttttatacactgaatgtggaagaaccgggtatcatatcttttttaaaaaatgtcagtgtagaaaacatttgggaaaccattttcctacatgatagaactgccttactagatttctatttgtagctctcattcattgttttttatcttagtttgcagaaaggtgttgaaatgcttctctagcccaaacagcgacatgctaaagtccccttcttcagagtcaatagagtagttgktaaaggttttaaattgtactttctccaaaattagcatgcagctatttaatagggaatctagatttcaccaagattcaaatcaaagcaacatttaarggaataagacctgttcactagcattttcaagggggttctaaagcattcaagtgcttaaaagccataaaaaatgacttcttaattcctgcctttagtgtcaacttttaagttaatacaggtttcaattgtggcattaggaaaaaaaaaaaccttgtgatgctagg

SEQ ID NO: 414 - DNA, 2270 bp, Homo sapiens
  SITE (9): n equals a,t,g, or c
taggtgacnctatagaagagctatgacgtcgcatgcacgcgtacgtaagcttggatcctctagagcggccgccctttttttttttttttttcttgccagaagggttgatttttaattatgtgtatatacaaacttctctattttaacattcaacatattcaggattaattctagaaagatgctatagctgatttataaaacaaaatgatttaggatcagaaagaaaataggggcacacaatttcatgtagtctctccctaactacccccaaccatagcatcacaaggttttttttttttcctaatgccacaattgaaacctgtattaacttaaaagttgacactaaaggcaggaattaagaagtcattttttatggcttttaagcacttgaatgctttagaacccccttgaaaatgctagtgaacaggtcttattcctttaaatgttgctttgatttgaatcttggtgaaatctagattccctattaaatagctgcatgctaattttggagaaagtacaatttaaaacctttaacaactactctattgactctgaagaaggggactttagcatgtcgctgtttgggctagagaagcatttcaacacctttctgcaaactaagataaaaaacaatgaatgagagctacaaatagaaatctagtaaggcagttctatcatgtaggaaaatggtttcccaaatgttttctacactgacattttttaaaaaagatatgatacccggttcttccacattcagtgtataaaactcaacttyagacatgtatgtgcggagaagactcgtatgtccaaaaccatccatttgcatggcaatcttgtctttgcattgctttgtgtcattctggcttccctcacccacaggccactggagggctgggaggcccaggagctcagcactctaactcctccatgacttccatgacaatcgtccgtgggcccgtcagaatcagattgctcacggtccggtagtctacatgcaggacattgagcccgttgacagagacgacaaactgacagaccttcattcctgctgcggctgcagggccactggggtctacagcctggatgtggcatggcttacttcctcgcaccacaaaaccccagccaaccgcgtcaccaacaatcgtgaatgtcttccttgcatacggagccccgggagtaaggagttcctcagaggtgacaggtctcttcagcacggacttggggttgcagagcacaggggggctgctgctgagggtggggctgctgctgaagtagccgctgctgccacagctgctcatgctgcttctcctcactgcagacacgatcttgatctccttgctggggctcactgacataaagctggtagatttccgattgtcatggctctgcttcctcaggcagaagggactgtcatgagtttcctgggaggagggggacttttcattgagcagctccatcagtcttcgcctccgccggaagttcattctgaactggtagagaagattgctgtccacaaatgggtgcttgctggacacatgctggatgatgccatgctccataagccggtggcaaagctgctctgcctctttcctcgtggtggcctcaccttcctgaaccagccagtccaggaattcagatgccatgaaggtgcgctcatacttgaccccttcctcctccctgggctgcaggagtgtgttttcagggctcatcagcttttcatatagcctctgtcctctcataaaggccttcacttcattatccaatgggaaggtgccgtcatcctttctaaagcggtagaagagtttgacatccttgaattccttatgctcatcacacacatggtgaataatgccccggtctgctaatttctgcatgagtttaattgccgtctctctgtcagaagcctctttgtgttcaatcagccagtcaatcagttcttttgcgacaaaacagtttgggtaggtcttgagatgatgacgtctatctttaataaccttttcttcgtgcagcctgagccgtagctgttccccggtgaccaagacctcagccatgcgctccagctccctttgctgcgccccgccactcccgctggtgctgctgtcactgccagcactgccagtgctgccgccctcctccatggttttagggccgtgcggctaccactggctccgctgtccgccgagggtttgggtgctcggatcagtctgccctcacagacgcttcccgcgccatctttgttcggggcagctccggacgcgtgggtcgacccg

SEQ ID NO: 415 - DNA, 329 bp, Homo sapiens
  SITE (258): n equals a,t,g, or c
  SITE (312): n equals a,t,g, or c
  SITE (315): n equals a,t,g, or c
ggacagtgcagcggtctgcctatctgaggacctgtaccccgatatcaatgtcatcactggcatcckcaaggattatcttcgagagttgcccaccccactcatcacccagcccctgtataaggtggtactggaggccatggcccgggaccccccaaacagagttccccccaccactgagggcacccgagggctcctcagctgcctgccagatgtggaaagggccacgctgacgcttctcctggaccacctgcgcctcgnctcctccttccatgcctacaaccgcatgaccccacagaaacctttttggggggnccnccccggttttgggg

SEQ ID NO: 416 - DNA, 1289 bp, Homo sapiens
  SITE (1250): n equals a,t,g, or c
gccaggtgctggtgctagtggagcgaaggaggacactgtacatacagggcgagcggcggctggacttcatgggttggctgggggccatccagaaagcagccgccagcatgggggacacgctgtcggagcagcagcttggggactcggatatcccggtgatcgtgtaccgctgtgtggactacatcacgcagtgcggcctgacctccgagggcatctaccgcaagtgtgggcagacatcgaagacacagcggctgctggagagcctgcggcaggatgcgcgctctgtgcacctcaaggagggcgagcagcacgtggatgatgtttcctcggcgctcaagcgcttcctgcgcgacctgcctgatgggctcttcactcgcgcccagcgcctaacctggctggaggcctcagagattgaggacgaggaggagaaggtctccaggtaccgagagctgctggtgcggctgccccctgtcaaccgggccacagtgaaggcccttatcagccacctgtactgtgttcagtgcttctcagacacgaaccagatgaacgtgcacaacctggcaattgtgtttgggcccacgctcttccagacagatgggcaggactacaaggctggccgtgtggtggaagacctcattaaccactatgtggtggtgtttagtgtggatgaggaagagctcaggaagcagcgggaggagatcactgccattgtgaagatgcgcgtggctggcactgccagtgggacccagcatgccggtgacttcatctgcacagtgtatctggaagagaagaaggcagagactgagcagcatatcaaggtcccagcatccatgactgctgaggagctcaccctggagatcctggatcgccggaacgtgggcatcagggagaaggactattggacctgctttgaggtcaacgagagggaggaggcagagcgccccctgcactttgcggagaaggtgctgcccatcctgcacgggctgggcacggacagccacctggtggtgaagaagcaccaggccatggaggccatgctgctgtacctggccagccgtgtcggtgacaccaagcatggcatgatgaagttccgtgaggaccgcagcctcctgggcctgggcctgccctcaggtggcttccacgatcgctacttcatcctcaacagcagctgcttgcggctctacaaggaggtccggagycagaggccgtggagcggggcccctgagaccagtcaccggcctgagaaggantggctattaagagtctcaaagtctaactgggagtggaaa

SEQ ID NO: 417 - DNA, 795 bp, Homo sapiens
  SITE (628): n equals a,t,g, or c
  SITE (766): n equals a,t,g, or c
  SITE (777): n equals a,t,g, or c
  SITE (778): n equals a,t,g, or c
ggaaagtttttcctgacggagttttggctgcggcagcggcggcggcggccggagcgggccatggacgcgctcaagtcggcggggcgggcgctgatccggagccccagcttggccaagcagagctgggggggcggtggccggcaccgcaagctgcctgagaactggacagacacgcgggagacgctgctggaggggatgctgttcagcctcaagtacctgggcatgacgctagtggagcagcccaagggtgaggagctgtcggccgccgccatcaagaggatcgtggctacagctaaggccagtgggaagaagctgcagaaggtgactctgaargtgtcgccacggggaattatcctgacagacaacctcaccaaccagctcattgagaacgtgtccatatacaggatctcctattgcacagcagacaagatgcacgacaargtgtttgcatacatcgcccagagccagcacaaccagagcctcgagtkccacgccttcctctgcaccaagcggaagatkgcacaggctgttaccctcaccgtagcccaggccttcaaagtcgcctttgagttttggcaggtgtccaaggaagagaaagagaagagggacaaagccagccaagagggangggacgtcctgggggcccgccaagattgcaacccctccttgaagagttggtcgcactgggaactgctggacttagaggagacagttaaggcccgttgttccaaggttcagggccaacaccaccaacttggacgagtgncggggccaaanncttgattggcacatttt

SEQ ID NO: 418 - DNA, 1394 bp, Homo sapiens
gaaaatccttaaacagctaattgctccccactctggcttctcccgccagcggatgtgaccctggaccctgagacagctcatcctaacctagtcctgtcagaggatcgtaagagcgtcaagttcgtggagacaagactccgggatctccctgacacaccaaggcgtttcaccttctacccttgcgtcctggctactgagggtttcacctcaggtcgacactactgggaggtggaggtgggcgacaagacccactgggcagtgggtgtatgccgggactccgtgagccgaaagggcgagttgactccactccctgagactggctactggcgggtgcggctatggaatggggacaaatatgcagccaccaccacaccttttacccctttgcacatcaaggtgaaacccaagcgggtaggcatattcctagactatgaggccggcacactgtctttctacaatgtcacagaccgctctcatatctacaccttcactgatacttttactgagaaactttggcccctcttctacccaggcatccgggctggacggaagaatgctgcaccacttaccatcaggcccccaacagattgggagtgacaggttgggatgtgggaatgactggggtgaggcagggtcaagtgctacgggcctccttcccgtgtcctgctggaacgtcttcgtgtccacctgggtccagtcctgaatcatcttggagaaacaccttggtttctaggatggttttgtgtggagggggaggtaggactgggctggatgagagagcacagytgtgacttcctcctaactgtcagggtggggagctggttcccagaggattgtctaccctgaagtccatcaggttttcttgcacaaggacgggtcargaaggaaggagaggcttttccagaaacaaaaaatctgtgagggtctgacttgctcaaaccagaggaggaaacagaaacccctgcacatctttttagggggttctttgacccaggatagtcttgcttcttgaggtagatcacaggggtctgtgtacctctgaattcatgagagatgaaygacagatgctctcatgggtctagatattgaggartttttctgagggcagagattaaccatcacaagattcttacattactactaataaacaagaactgaaaacaaaaacaaaaacaaaaacaaaccgagacagatcccccatttgtctctcttcactccctcttctcttcttccacatgtctctgcagtcttttctgcagcagccatttgttcaaagagcccacttccttgaacagctgcttgccaggctgcatggtcatataatgttaggtgaagagtgaagagctctgcatgaggccccactgtctatctaagagcaagggttcttgcctcaa

SEQ ID NO: 419 - DNA, 959 bp, Homo sapiens
  SITE (846): n equals a,t,g, or c
  SITE (863): n equals a,t,g, or c
  SITE (890): n equals a,t,g, or c
  SITE (901): n equals a,t,g, or c
  SITE (956): n equals a,t,g, or c
  SITE (958): n equals a,t,g, or c
tgggaaacccckktggcggytcgctctagcccgggcggatcccccgggctgcaggctttggcaccatccgctctaccacatgcgtgtacaaagggaaatggctctacgaggtcctcatctcctcccaggggctcatgcagatcggctggtgcaccatcagctgccgcttcaaccaggaggagggggttggagatacacacaactcctatgcctatgatggcaaccgcgtgcgcaagtggaatgtgaccacaacgaattatggcaaggcgtgggcagcgggggacatcgtgagctgcctgattgacctggatgatggcactctgtccttctgcctgaacggtgtatcactgggcactgcctttgagaacctgtccaggggcctgggtatggcctacttcccagccatcagcctctctttcaaggagtccgtggccttcaactttggcagccgtcctctgcgatatcattttgtgaagatggctgtggactgctcagaagctcttggggaggctgggatgaggggctccctaccccaggggtgccatgggctggtggcaggccctggctgctgcagagttagtggggggccatgtagagtgtcgaagaaaactttcctcgcagcagcctggttggttgggtgcccttgtctccactgaacagatgaggaatgtgaagcatcctccctagggagaataagtgggcaagttgtgatgcaaaccagccctgccctagagcccargccccggggtggggggtgggcaagtggaragggagtaggcatgtctgagccacagataaggcgttgctggcttaactctggcacctacccagtggcaggctaccggnccctgcaggacccaccnagtgctgacctggtgcggcacagaagntgctgggctgnttccggcaatgcttaatgtggagctggaccctgtggtgaactggggctggccaancng

SEQ ID NO: 420 - DNA, 945 bp, Homo sapiens
gggaaattggaagacttggtggcgaacgagggtcaggacctgcatcctgcctcagagagttatcgacgtatccggaatgtgggatcagaggctggtgaggttggccctgttgcagcatctgcgggccttctatggtattaaggtgaagggtgtccgtgggcagtgcgatcgcaggagacatgaaacagcagccacggaaatagggggtaaaatatttggagtaccttttaatgcactgccccattctgctgtaccagaatatggacacattccaagctttcttgtcgatgcttgcacatctttagaagaccatattcataccgaagggctttttcggaaatcaggatctgtgattcgcctaaaagcactaaagaataaagtggatcatggtgaaggttgcctatcttctgcacctccttgtgatattgcgggacttcttaagcagttttttagggaactgccagagcccattctcccagctgatttgcatgaagcacttttgaaagctcaacagttaggcacagaggaaaagaataaagctatactgttgctctcctgtcttctggctgaccacacagttcatgtattaagatacttctttaactttctcaggaatgtttctcttagatccagtgagaataagatggatagcagcaatcttgcagtaatatttgcaccaaatcttcttcagacaagtgaaggacatgaaaagatgtcttctaacgcagaaaagaaggtacgattacaggctgcagtagtacagactcttatcgattatgcatcagatattggtaagatgtagttgcattattaacagaatttgtttaaatgaggaaaatctctgtttctttcaaaggaactatgaaggcaactgttagaaagttggtatattactgacctcacccccaccctacagtaccggcccctcctgcaaagaaaaaaaaa

SEQ ID NO: 421 - DNA, 818 bp, Homo sapiens
  SITE (157): n equals a,t,g, or c
  SITE (285): n equals a,t,g, or c
  SITE (761): n equals a,t,g, or c
  SITE (811): n equals a,t,g, or c
gagctcgatgaccctgtgacctctgcacggttgctgcctcgctggagggaggctgctgagctgccccagaagaatcagcgcctggagaaatataaagatgtgattggctgcctgccgcgggtcaaccgccgcacactggccaccctcattgggcatntctatcgggtgcagaaatgtgcggctctaaaccagatgtgcacgcggaacttggctctgctgtttgcacccagcgtgttccagacggatgggcgaggggagcacgaggtgcgagtgctgcaagagctnattgatggctacatctctgtctttgatatcgattctgaccaggtagctcagattgacttggaggtcagtcttatcaccacctggaaggacgtgcagctgtctcaggctggagacctcatcatggaagtttatatagagcagcagctcccagacaactgtgtcaccctgaaggtgtccccaaccctgactgctgaggagctgactaaccaggtactggagatgcgggggacagcagctgggatggacttgtgggtgacttttgagattcgcgagcatggggagctggagcggccactgcatcccaaggaaaaggtcttagagcaggctttacaatggtgccagctcccagagccctgctcagcytccctgctcttgaaaaaagtccccctgggcccaagctggcttgccttcttcacaggtattccgacgtgagagcccacgggtggggctgtttgcggtgttcgtgaggagccacntcgtttgttggggaagccgtttccagggagaggttctttcttgttgcgtnggccgtt

SEQ ID NO: 422 - DNA, 440 bp, Homo sapiens
acctcgcgtccctaggcggcggcggccgggcgtcccgggatggccttcatggagaagccgccagccggcaaggtgctgctggacgacacggtgccgctgacagcagccatcgaggcgagccagagcctgcagtcccacacggaatatattattcgagtgcaaagaggaatttctgtggaaaacagctggcagattgttagaagatacagtgactttgatttgcttaacaacagcttacagattgcaggcctaagtctacctcttcctcccaaaaaattgattggtaacatggatcgtgaattcatagctgaaaggcagaaaggtcttcagaactatctcaacgtgatcacaacaaatcatatcttgtctaattgtgactggttraraagttttaggatccaaacaactattccgcaaactatactgagattgccttgcaa

SEQ ID NO: 423 - DNA, 536 bp, Homo sapiens
tgaagttcctggcacggctggccgaggagcaggaggtgaacaagatgacacccagcaacatcgccatagtcctgggacccaacttgctgtggccacctgagaaagaaggggaccaggcccagctggatgcagcctccgtgtcttccatccaggtggtgggcgtcgtcgaggcgctgatccagagcgcagacaccctcttccctggagacatcaacttcaacgtgtcaggcctcttctcagctgttaccctccaggacacagtcagtgacaggctggcctctgaggaacttccgtccactgccgtgcccaccccagccamcamcccggytccggytccggytccagytccagctmcgggcccagccttggcttcagcagctaccaaggaaaggacagagtctgaggtgcctcccagaccagcctyccccaaggtcaccaggagtcccccggagacagctgccccagtggaggacatggctcggaggaccaagcgcccggcgccagccggcccaccatgccgccccccaggtytccgg

SEQ ID NO: 424 - DNA, 774 bp, Homo sapiens
  SITE (688): n equals a,t,g, or c
  SITE (696): n equals a,t,g, or c
  SITE (714): n equals a,t,g, or c
  SITE (720): n equals a,t,g, or c
  SITE (741): n equals a,t,g, or c
ggccatcatctccggcatgaacatgagccctgtctccaggctgaagaagacctggggccaaagtgaggacggccaagtttttcatcctcgagcaccagatggacccaacgggaatttctgcaactacaggacagccctgcgcggggcggcccaccgctccctgacggcccacagcagccgagagaagattgtcattcctttcttcagcctgctcatcaaagacatctacttcctgaatgagggctgcgccaaccgccttcccaatggacacgtcaactttgagaaattcctggagctggccaagcaggtgggggagttcatcacctggaaacaagtggagtgtcccttcgagcaagacgccagcatcacccactacctgtacaccgcccccatcttcagtgaggatggtctttatttggcttcttatgaaagtgagagcccagagaaccaaacagaaaaagaaagatggaaagctctaagatcttctattttggggaagacatgaaagcgctgagctgagggacgaggaagagctggagcccgcagaagccgtccacagccctgcctcagtggcccagtgggcagaggccagggagtgcctcactattttgcaaatgccgaccctgtggcctgctgsccgccccccccccccamaagtggccatamgggcacaggagacttttatggncctttggncctggcaggaaccaaggnctcaanacgtgcgggccgggacaatgncttggggggacaatcctggcctttaaggaaccg

SEQ ID NO: 425 - DNA, 652 bp, Homo sapiens
gggtcgacccacgcgtccggtgaagttggctgctacgtggcttctcgacccctgaccaaggacagcaattattttgaggtgtctattgtggacagtggagtccggggcaccattgctgtggggctggtccctcagtactacagcttggwtcaccagcctggctggttgcctgactctgtagcctaccatgctgatgatggcaagctgtacaatggccgagccaagggccgccagtttgggtcaaagtgcaactccggggaccggattggctgtggcattgagcctgtgtcctttgatgtgcagaccgcccagatcttcttcaccaaaaatgggaagcgggtgggctctaccatcatgcccatgtccccagatggactgttcccagcagtgggcatgcactccctgggtgargaagtgcggctgcactcaacgctgagctgggccgtgargacgacagcgtcatgatggtggacagttacgaggatgaatkgggccggctacatgatgtcagagtctgtgggactctgctggagtacttagggaaagcgggtgagctgttgtgctgctgggcctccctttggccctcgcttcccaccctacgatgtatgaaatgtatgtacagaccagagatgtttatacagccgataaagat

SEQ ID NO: 426 - DNA, 1010 bp, Homo sapiens
  SITE (995): n equals a,t,g, or c
ggtggaccccagcaaatgtccagcctcggagctgccagagcaccaggccagacttcggaacagctgcgaggagcctccccgtctgaccattcattgcctcttctgcaccagctggttccctgcggagctgggcatcgtgttctcaagctggcgagaagcatgtaaagaacgtggctctgaggtgctgggcccccgactggtgtgcgcctccctcttcctgcggctcctgtgccctgccatcctggcacccagcctctttggtttggcaccagaccatccagcacccggcccagcccgcaccctcacactgattgccaaggtcatccagaacctcgccaaccgtgccccgttcggtgagaaggaggcctacatgggcttcatgaatagcttcctggrggaacatggaccagccatgcaatgcttcctggaccaggtagccatggtggatgtggatgctgcccccagtggttaccagggcagtggtgatctggccctccagttagctgtcctgcatgcccagctctgtacaatttttgctgagcttgaccagacaacccgagacaccctggaaccactgcccaccatcctgcgagccattgaggagggccagcctgtgcttgtgtcagtgccaatgcgtctcccactgcccccggcccaggtccactccagcctctccgcagggagaagcccggcttcctggccccccgggacctccccaagcacacccctctcatctccaagagccagtctctgcgcagtttcgccgctcagagagttgggcccggccacggccggacgaagagcggcccctgcggcggccccggccggtgcagcgcacgcagagtgtcccggtccggcgtcctgcccgccgccgccaatctgcggggccctggccgcgacccaaaggctccctgagcatgggaccagcgccccgsgcccggccttggacccgggamtccgcttcgctgcttcggaagcgtcggtaaccttggcancgccaaattggaaca

SEQ ID NO: 427 - DNA, 1352 bp, Homo sapiens
  SITE (671): n equals a,t,g, or c
  SITE (1292): n equals a,t,g, or c
  SITE (1316): n equals a,t,g, or c
  SITE (1340): n equals a,t,g, or c
gtgacactatagaaggtacgcctgcaggtaccggtccggaattcccgggtcgacccacgcgtccgctcaagagcaggctcagtcaggcaaccaagaattcaggcagcagtcaaggcctaggaggcagcccgggtagtcacagccatacgaccatggccaacaaggtggagacgctgaaggaggaggaggaggagctgaagaggaaagtggagcaatgcagggacgagtacttggctgacctgtaccactttgttaccaaggaggactcctatgccaactacttcattcgtctcctggagattcaggccgattaccatcgcaggtcactgagctcgctggacacagccctggctgagctgagggagaaccacggccaagcagaccactccccttcgatgacagccacccacttccccaggtgtatggggtgtcgctggcaacccacctgcaagagctgggccgggagattgccctgcccatcgaggcctgcgtcatgatgctgctttctgarggcatgaaggaagarggtctcttccgtctggctgctggggcctcggtgctgaagcgtytmaagcagacaatggcctcggacccccamagcctggaggagttctgctccgamccgsamgctgtggcaggtgccctcaagtcctatctgcgggagctgccanagcctctgatgaccttcgacctctatgatgactggatgagggcagccagcctgaaggagccaggggcccggctgcaggccctccaagaggtgtgcagccgcctaccccccgagaacctcagcaacctcaggtacctgatgaagttcctggcacggctggccgaggagcaggaggtgaacaagatgacacccagcaacatcgccatagtcctgggacccaacttgctgtggccacctgagaaagaaggggaccaggcccagctggatgcagcctccgtgtcttccatccaggtggtgggcgtcgtcgaggcgctgatccagagcgcagacaccctcttccctggagacatcaacttcaacgtgtcaggcctcttctcagctgttaccctccaggacacagtcagtgacaggctggcctctgaggaacttccgtccactgccgtgcccaccccagccaccaccccggctccggctccggctccagctccagctmcggccccagccttggyttcagcagctaccarggaaaggmcagagtctgaggtgcctcccagaccagcctcccccaaggtcaccaggagtcccccggagacagctgccccartggaggacatggctcggnaagaaatgaagttgggcttgtggnaaggggaaggaaggggaacaagangggtggggccgg

SEQ ID NO: 428 - DNA, 2493 bp, Homo sapiens
  SITE (2475): n equals a,t,g, or c
taagctatttaggtgacactatagaaggtacgcctgcaggtaccggtccggaattcccgggtcgacccacgcgtccggcgaatacccttgatctttcaaaaactgatttctcgaattgaagagagaggtttggaaacagaaggcctcttacggatccctggagctgccattagaatcaagaatctttgccaagaactagaagcaaagttttatgaagggacttttaattgggaaagtgtcaaacagcatgatgccgccagcctgctgaagctcttcattcgggagttgccccagccactgctcagtgtggagtatctcaaagcctttcaggctgtccagaatcttccaaccaagaagcagcaactacaggctttgaaccttcttgtcatcctcctacctgatgcaaacagggacacactgaaggcccttcttgaatttctccaaagagtaatagatmataaagaaaaaaataaaatgacagtcatgaatgtagcaatggtcatggccccgaatctctttatgtgtcatgcattgggattgaagtccagtgaacagcgagaatttgtaatggcagctgggacagcaaataccatgcacttattgattaagtaccaaaaacttctgtggacaattcccaagtttattgtaaaccaagtgaggaagcaaaacacggaaaatcataaaaaggataaaagagccatgaagaaattgctgaagaaaatggcttatgaccgagaaaaatatgaaaagcaagataagagtacaaatgatgctgacgttcctcagggagtgattcgagtgcaagctccccatctttcgaaagtttccatggcaatacagctaactgaagaactaaaagccagtgatgtacttgccaggtttctcagccaagaaagtggggttgcccagactctcaagaaaggagaagtttttttgtatgaaattggaggaaatattggggaacgctgccttgatgatgacacttacatgaaggatttatatcagcttaacccaaatgctgagtgggttataaagtcaaagccattgtagaagacttaacaagctgcagataaccatgtggacttctgtcataattcttgctgagtcaagagtgtaaataaaagaaatggcaggactcatattattcagttgtacccaagtatttaaaaatgactctcttaagccttaaaaagtcatagatttgtgctgctgccagaattatattaattattattaatgttattattagaaaaaaaatttctggagtgagagtaaagaggcttaattagtttgtgggcagttttcatatgctctgtgaaatgtgtccagatgtgacatagttttttttttttaatatgtggaaatgtcttctcttcccattcttttctcctaaaatcatatatactgtaatatatgctctctcacctctattacctcctcacatctaccctttcccagttaggtttgctttttgaccaaaaagataacaaataccaggtatggcaagttgtgaagacagcacattaaaacatacctaatttcacagtattcctgtcaygacagaatgttagtattcatctctttgaatcatttgctcaaataataacattccaccttttcctgctgtatcacaggaagtgatttgcattttttttcagttcatctgacttatgttcacagaaccgtatcagcgaccaagaaaataggactgtcagaagctgccagttattactgaaccattaaatacttatatactaagaataaataaaatatacccatgtgaaataataattggattatggataacaagagagtgaaagccaaagcactttctgtctactgtactcttctaaatggaattttaaaagtcatagctggctttacgtgttgtcattattagcattataaatatgcatgatagtataatccagtaatggttgaagaatgtattttacttaaagagggatttttttttttaagtcctgaataagtctactggaagaattattcttctgggtgaaaaagcttttgtttgtgttcttattttaaataatcggagtcaatttattaaaatgttcttgaaagtactattcccagggattttaatgcacaaaccatattgtgacaagagatgagcctctgtactgtaaataagaaatgaagtagagaaatgttaaatattttatgagtttagaatatagtaaataaaaggtgatgtaaatgaatgctgcacaaacggtgttcatgatacttttagtagtactttaggaaaaactacacattctcagaagctcttgatgtctctaatgaagggggggaatgctgttaatgagaacagtcataaatttttagcatataattacaagaacagcctgtggatatgatcacttaaatgattttgtggtgattcgtgccattgcttttttatttaaaagaaaattttgtaattaaatgcctttttctaaattaaaaaanaaaaaaaaaaaactcgac

SEQ ID NO: 429 - DNA, 1484 bp, Homo sapiens
  SITE (6): n equals a,t,g, or c
  SITE (9): n equals a,t,g, or c
  SITE (10): n equals a,t,g, or c
  SITE (1410): n equals a,t,g, or c
  SITE (1418): n equals a,t,g, or c
caaagntgnncaggaaaagagggacaagtggctggtgctgtggacagagaagctttatttttagtatgagacaacctctattttctttcaggagagggaagttggattatcaattcttttgtaaatgtgtatggtgatatttgctccgctttttgcaatctttgcatttgcaacatgcggtggctattctggaggcctgcggctgagtgtggactgcgtcaacaagacagaaagtaacctcagcatcgacatagcgtttgcctacccattcaggttgcaccaggtgacgtttgaggtgcccacctgcgagggaaaggaacggcagaagctggcattgattggtgactcctcgtcttcagcagagttcttcgtcactgttgctgtcttcgccttcctctactctttggctgccactgtcgtttacattttcttccagaacaaataccgggaaaacaaccggggcccactcattgacttcattgtcactgtagtcttttcgttcttgtggttggtgggttcatcagcttgggcaaaaggactgtctgacgtcaaagttgcaacggatcccaaggaagtattgctactaatgtcagcttgsaaacaggccatccaacaaatgcatgggctatccacagccctgttatgtcaagcttaaacacttctgtggtctttggattcttgaactttattctctgggctggaaacatatggtttgttttcaaggagaccggctggcattcttcgggacagagatatctttcagatccaatggagaagcactccagcagctataatcaaggtggttacaaccaagacagctatggatcaagcagtgggtacagtcagcaggcgagtttggggccaacctcagatgagtttggccaacagcctactggccccacttcctttaccaatcagatttaacagagtagcatttgcattcttctgcagtsgcctcaccatcttccatttcagtggcagaagaattttttaagggtttcaatcaattattaatgcagagagtattgaatgtaaatcagagctctctagtcttcattaaggcagcaagtcctgggttgtgaaaaatgatacttagagatgaggcgacatgaggagatatattattcatcatagatggctaattggagagtaccttgttatatatacagatactttcatggtcattttgtatgtatgttaaagtagtagaagtattttgtagcttaaagtctctagtatgtaatatggcataaagtaaatcaaatagcgttgagttttcttatgcattttgatgtgaaagatgttataataatttctagaagacaatttggtgtatcacaacatgcatgtcttatttttttttagttttaagtcctataggactatgagtctctaagttaattgtttcanaaaattantccttttttatgtgataaatcatatgattaaagtgcatgaatagcaattcccaaaaaaatggacaa

SEQ ID NO: 430 - DNA, 540 bp, Homo sapiens
  SITE (423): n equals a,t,g, or c
  SITE (454): n equals a,t,g, or c
  SITE (465): n equals a,t,g, or c
  SITE (521): n equals a,t,g, or c
ccatcttcctgtgtacctatagagccttcaccaccacccaacaggtcctggacctgctgttcaaaaggtacggtagatgtgacgccctcacggcctcctctagatacggctgcatcctcccctattccgacgaggatggtggaccccaggaccaacttaaaaatgccatctcctccatcctgggcacctggctggaccagtactcggaggatttctgtcaacctccggactttccctgcctcaagcagctggtggcctacgtgcagctcaacatgccaggctcagacctggagcgccgtgcccaccttctcctggcccagctggagcactcggaacccattgaggcagarcctgaggctctgtcaccagtgccagctctaaaaccaactccagagctcgagctaactctaacaccagctcgancacccagccagtgccggctccagccccgganccagaaccagntccaacacaacttcaagttcaaaactaaaattactccacaccgttccggaatcccncagggtccaaaacaattgt

SEQ ID NO: 431 - DNA, 2254 bp, Homo sapiens
  SITE (563): n equals a,t,g, or c
  SITE (824): n equals a,t,g, or c
  SITE (889): n equals a,t,g, or c
  SITE (2254): n equals a,t,g, or c
ggtgagagagagaatttttaaaaagcagctggggcctgaggtttctcccccagtaccctgggtcacctcagcccagagctggcggcaggcccccagcccctcatgtcagagccccctgtgtactgtaacctggtggaccttcgccgctgtcctcggtccccacccccaggccctgcatgccccctgctgcagaggctggatgcctgggagcagcacctggaccccaactctggacgctgcttctacataaattcactgactggctgcaagtcctggaagcccccgcgccgcagtcgcagcgagacgaaccctggctccatggaggggacacagaccctgaagaggaacaatgatgtcctgcaacctcaggcaaagggcttcagatctgacacagggaccccagaaccgcttgacccacagggttcamtcagcctcagccaamgcacctcgcagcttgaccctccagccttgcaggcccctcgacctctgccgcagctcctggacgacccccatgtgaacctcccatttctttgtgaaggccaagatcctccctgccccccctnyccccttttyctgctccacataaacatcttcctctttctgaatatcctcctacccagccctcccccagcaactttaagggacttcactcctgggagaccccctagggaaagccgtggccactatggagggcgagggtgattacagatcccattccctccacttcccaggaggtggaaaagtcgggtctgctcaacatgaccaakattgcccaaggggggcgcaagtcaggaagaactggggcccgtcttgggtggtgttangggtaacagcctggtgttctaccgagagccaccgccgaacagcgccctcctcaggctggggaccnggtgttagccggcccgaaagtagcgtggacctgcgcggggcggccctggcgcacggccgccacctgtccagccgccgcaacgtcctgcacatccgcacgatccctggccacgagttcctgctgcagtcggaccacgagacagagctgcgagcctggcaccgcgcgctgcggactgtcatcgagcggctggatcgggagaaccccctggagctgcgtctgtcgggctctggacccgcggagctgagcgccggggaggacgaagaagaggagtcggagctggtgtccaagccgctgctgcgcctcagcagccgccggagctccattcgggggcccgaaggcaccgagcagaaccgcgtgcgcaacaaactaaagcggctcatcgcgaagagaccgcccttacaaagcctgcaggagcggggtctgctccgagaccaggtgttcggctgccagttggaatcactctgccagcgggaaggagacacggtgcccagctttttgcggctctgcattgctgctgtggataaaagaggtctagatgtggatggcatttatcgggtgagcgggaacttggcagtggtccagaagcttcgctttctggtggacagagagcgtgcggtcacctccgatgggaggtatgtgttcccagaacagccaggacaagaaggtcggttagatttggacagtactgagtgggatgacattcatgtggtcaccggagccctgaagctttttctccgggagctgccccagcctctggtgccaccactgctgctgccccatttccgtgctgcccttgcactctccgaatcaggagcagtgcctctctcagatacaagaattaataggctcaatgccaaagcccaaccatgacactctacggtacctcctggagcatttatgcagggtgatagcacactcagataagaatcgcatgacaccccacaacctgggaattgtgtttggaccaaccctgtttcggccagagcaggagacatctgacccagcagcccatgctctctacccagggcagctggtccagctgatgctcaccaacttcaccagcctcttcccctgatgcagggaaggaagaagagaaaacatatttccggtcatctctggtggtgagaggctggtgttctgttttgaggatatccctttaaatctcccaaatgactgtctctatcttcatgagtgtgacttgaggtgttgggatgggtgagggagcttctctaaagaggaaagtgagtggattaacccctgcttctcttcttgttccctgttatcattcctccccaacataataatacataaagtggcatggtatttttaaaaaaaaaaaaaaaaaaagatctttaattaaagcgn

SEQ ID NO: 432 - DNA, 604 bp, Homo sapiens
  SITE (530): n equals a,t,g, or c
  SITE (601): n equals a,t,g, or c
aaaaataaaagagacactatagaaagaagcctgcaggtaccggtccggaattcccgggtcgacccacgcgtccgagaatacatagacttccgttaaaaccagaatgaggaaaatacttttctctagcatcgtaggaggaagaaaacaaacacatcagatattttcagcactaaaagagatggttttccccacatatatgtaaaagaaatttgcaagactactggattttgatctcatggttgcagtgggtgaataggtggccttttgtgatctcctacatcaccctggaagtgagacttcttcggtttcttctagagtcagtttggtatcagaatggcaaagcaacttaaccttccagaaaatacagatgattggacaaaagaggatgtaaatcagtggttagaaagtcataagattgaccaaaaacacagggaaattttgactgaacaagacgtgaatggagcagtcttgaagtggttaaaaaaagaacatcttgttgatatgggcatcacacatggaccagctattcnaatagaagactattcaaagaattgcggaaacagccmttgaagatcgatcgactctaagatgggaaagcccntgt

SEQ ID NO: 433 - DNA, 1188 bp, Homo sapiens
  SITE (107): n equals a,t,g, or c
  SITE (124): n equals a,t,g, or c
  SITE (948): n equals a,t,g, or c
tcgacccacgcgtccgaggagctgtccagatgctgaaaagagaaggtcaaacagctgaagtgccaaatctttggagtgttgatggagaagttacagtagctgaacanaagccgggagaaattgntgaagaactcgcaagctcctacgaaagaaagctcatcgaggtggcagagatgcatggcgagctgattgagttcaacgagcgcctgcacagggccctggtagccaaggaagccctcgtgtcccagatgaggcaggagctcatcgatctccggggaccgtgcctggagatttgagtcaaacgtccgaagaccagagtttgtcggattttgaaatatcaaaccgggcgctgatcaacgtctggatcccctcagtgtttctccggggcaaagcagcaratgcattccacgtgtatcaggtctacatccggataaaagacgatgaatggaatatttatcgccggtatacagagttcaggagtttgcaccacaagttacaaaacaagtaccctcaagtgagggcctacaacttcccacccaaaaaggccattggaaacaaggatgccaagtttgtggaggaacggagaaagcagctccagaattacctgcgcacgtcatgaacaaagtcatccagatggtccccgagttcgctkccagccccaagaaggagaccctcatccagctgatgcccttcttcgtgtaagtactgctcccacgggacatgggccgccagccctgccagcatttttttctcggtcgttttggaaggtcagggagcacagsggstctccgtgatgccctgatcgccatgggacccaggcgaactccaggggytgttccaggtgccaaagtggaggttgggtctcagcgctttggagcttctaaagggatgggaagagagcaggcctgcaaatgagcattgttgacttgaggctcacaaagaaacttnggggctctgtgattttgtactttcacacatttcgatcaagggaagattaattttctgtacagcccacgggtgstccaaaactgaaacaaattgtgtcagtgtttctcaagcttgggtaatgaacccaaggaaagttctcccagactcctaccagtattgacttaaattatttttatatgagttttacttaaaaatgaacattaatattatttaaatgccttcttctctcttgaaaaaagt

SEQ ID NO: 434 - DNA, 1040 bp, Homo sapiens
  SITE (2): n equals a,t,g, or c
  SITE (1025): n equals a,t,g, or c
  SITE (1037): n equals a,t,g, or c
gnaaaccccagaagaaagctgggtagttttcagaagatacactgacttctctaggcttaatgacaaattaaaagagatgtttccaggttttcgactagcacttcctccaaaacgctggtttaaagataattacaatgctgactttttagaagacagacaattaggattacaagcgtttcttcaaaatttagtagctcacaaggacattgctaactgccttgcagtgagagaatttctttgtttggatgatccaccgggtccatttgatagcctagaagaaagcagggcattctgtgaaactttagaagagacaaactaccgcttacagaaagaactacttgaaaaacaaaaggagatggaatcactaaagaaactgctcagtgagaagcaacttcatatagacactttagagaacagaatcagaacattgtctttagaacctgaagaatcactggatgtgtcagaaacagaaggtgaacagatcctaaaggtggagtcctctgcacttgaggttgatcaagatgtcctggatgaagaatctagagctgataataaaccatgcttaagttttagtgaacctgaaaatgctgtatcagagatagaagtagcagaagtggcatatgatgctgaagaagactaatgtatcacaagcagttccctccatttagactattcaaaaatttagaagagtggcaaatactattttaaaagaagaaccaagaactgtaaaacatatagaaaagagcaagaatgcacatgtataaagtttacataaagaagtttttttaagttattgagataggaaatatattcactgctgcttttaattgtattttatccaattacatttaatacactaaaaaaaatcttgttggaattctgttatcaaggcccacattcttaaatactgtgcataaattattatggtgttttgcctatatattgctccaaactactgtgtatatatktatgtgtgttaaatcaccaatttatattaatcaaatggaaattgaattggcatggtnactatctggggngat

SEQ ID NO: 435 - DNA, 1401 bp, Homo sapiens
ggttaggtagcaccctaatgtgttcctgttgtatggcaagcagcactgatccacacgataatccagtgcctgatttaatgagcacgtgctcgttgttgggggtcttgtttttaaaggaagatgctggagacgtgtggagatgctgagaatcagctggctctcgagctctcccagcacgaagtctttgttgagaaggagatcgtggaccctctgtacggcatagctgaggtggagattcccaacatccagaagcagaggaagcagcttgcaagattggtgttagactgggattcagtcagagccaggtggaaccaagctcacaaatcctcaggawccaactttcaggggcttccatcaaaaatagatactctaaaggaagagatggatgaagctggaaataaagtagaacagtgcaaggwtcaacttgcagcagacatgtacaactttatggccaaagaaggggagtatggcaaattctttgttacgttattagaagcccaagcagattaccatagaaaagcattagcagtcttagaaaagaccctccccgaaatgcgagcccatcaagataagtgggcggaaaaaccagcctttgggactcccctagaagaacacctgaagaggagcgggcgcgagattgcgctgcccattgaagcctgtgtcatgctgcttctggagacaggcatgaaggaggagggccttttccgaattggggctggggcctccaagttaaagaagctgaaagctgctttggactgttctacttctcacctggatgagttctattcagacccccatgctgtagcaggtgctttaaaatcctatttacgggaattgcctgaacctttgatgacttttaatctgtatgaagaatggacacaagttgcaagtgtgcaggatcaagacaaaaaacttcaagacttgtggagaacatgtcagaagttgccaccacaaaatwttgttaactttaggtatgtatgattgagctacaatgactctggagtgaagataagtttaatgcccagcagagaagtcatttaattcaggcatacttggcacattaaaaaacaacaacaacaacaaaaaaaaccacatcactttggagagtaacttggggctactgggaatgggatttcatgtatattatgatgaatttgaagcatcagtatcatgcctgacattaatacgtaagttggcttatcattttcccactacagctattagcaataaatttcttgtgaaaagtttgagtgactgtatgttgggtttggagtccaaatcatccagtatgttaaaaggcaaaattaatcaataattgtacattctgtaatgtcttttatatatgctacttaatttaaagtataaatcatcttactaaataaaatttcaaagaatggagat

SEQ ID NO: 436 - DNA, 1101 bp, Homo sapiens
  SITE (69): n equals a,t,g, or c
ggacaacggagccacacgtgcccagccatcaatgcccggccaggcggtgccctgccaggaggacacggnccccgcggacgctggtgtggttggtggccaatcgtggaaccgcgcatgggagccagccaggggtgctgcgtcctgggacacctggcgcaacaaggcggtggtgcctcccaggcggtccggggagccaatggtgtccatgcaggctgcagaggagatccgcatcctcgcagtgatcactatccaggcgggcgtccgtggctacctggcgcgtcgcaggatccggctgtggcaccggggggccatggtcatccaagctacttggcgcggctaccgtgtgcggcggaacctggcacacctctgcagagccaccacgaccatccagtctgcctggcgcggctacagcacccgccgggaccaagcccggcactggcagatgctccaccccgtcacgtgggtggagytgggcagccgggccggggtcatgtctgaccgaagctggttccaggatggcagagccaggacagtatctgaccatcgctgcttccagtcctgccaggcacacgcttgcagcgtctgccactccctgagctccaggatcgggagcccgcccagcgtggtgatgctagtgggctccagccctcgcacctgtcatacctgtggacgcacacagcccacccgtgtggtgcarggcatgggccagggcactgagggccccggggcagtgtcttgggcctccgcctaccagctggctgccctgagtcccaggcagccgcatcgccaggacaaagcggccacagccatccagtccgcctggaggggctttaagatccgccagcagatgaggcagcagcaaatggcagcgaagatagttcaagccacctggcgaggccaccatacccggagctgtctgaagaacacagaggcgctcttgggaccagcagacccctcggccagctcacggcacatgcattggcctggcatctaggaccctggctccctgcagtggggacttcgtgggaggcactcatggctctctgggtctaatgaataaagtcctccacagcctaaaaaaaaaaaaaaaaaaaaaaaaaa

SEQ ID NO: 437 - DNA, 2456 bp, Homo sapiens
ggttttttttttttttttttttttttttttttkwttcatttttatattttattgctttgaatgctcaaactatgggaaatctttggtaaaaataaagacaataaaatcttcacaataactttacacaaagcattgcataacaatgttcttcaatatacatgaaataatataagaatgttcacagtcctcagtgaggaaattaactgtacaatattcatagttcattttaaaacaaaatattttcataaatatttaaaatacttcctaggttctcacatattaacatttgtatttcaatcggtatgttgatctttaaagtattcatattaaattaaaatcaatagaagtttttttctgttgcctaccacagcataagtcccgtcctccctgattctactaatttcacataaaactagagggaggtaactaaaataaaaatcaatacggttctcagttaagccctctgtggaaaagaggaaaatgtttcatgtctattattacacagacatttttctggtggttwattkgtgtagtctcaaacttggcccagctttaaagttgatctaaatgaactctcagctcaggacacagttcaattagcagcagttccatcagcgcatataacagatgcttgttggctcttgtttcttgcagtgcattgaatatttttattataccgtggcgggcattttgctgtccaacaaggctctgaagcatatctggaatgttttcaagcagcttttgctgtgctctctgttttgtttcctgactttgctctttgcttctgattgtggtcggtggtgccaacttcccatttggccaaaaagcatcccggaaaatattgatgtagtaaaccaacatttgctcactgaaaatccagctgactgtgtcccggatttgtttgttgatggttcttccaaaagtgacctgaacgagggcaattaatgttcttctcacccatttaaacattcctcgaagttcaaaaatctccccaatcaacatgaaacatggttcagccaaggcgtctttcctcccatccacatcatcaccataatctgacaggtcactgtcctcctctgtctcctcctcctggtgggagaagaagtcgcgaggaagtctttccaaaaacgaggataatgaaaaagawttttttttcccctgcacgtcgataaccttkaggtagtcaggagaagggctcaagaaggcataaagtgcttcaytctgacacagtctttcatctraaagcagattctgtaaaaacttatttaattgattcttcgacttttccataaacttttgatctatagatttgaaaggcagcttgctaagagaaggcaactggactttttttaaaraagggacgcactcactgartttccggtgtaaattctgaaactcgckgagmcttctggggaccgtccagttcttagtttcaactcctccaattcttgtaggcttaccatgacaaagtaacatggcaattgctcaccattctcttctgtaacctctccactggtgatggaggctttccacatgccaaggttttcacaccaccaatccgttcttgccatgtgcagctgaaggtctgtgcgttctttctctattaggattatttcatccttcaacttggaaacaatcttcttgtcaggttttggtgcattttgaatagaatttagagcttgccttttatattcaagtttctcatttagttctcgcagtttgtttacagcaaaactggcttgttcattgatctgattggtaccatcatccacggcttcctcaccagcctcatctcttgggcccatctcatccttgttggaaatcatctgtgaggcatgtttttcttcctcttttatcaacaatttctcatacaggtcactgacaataaatgaagggtaatacctatcctttagggtctcataaacatcttcctggattttgtagaatacttcaatacctttatttcctacaagacactgctgaatttctttgtaaagtgatttttccacagatatttctttgctctccacaaagaaattctgataaatttcaccaactaattgtggaatttcattcttgttagcattctttaaatgttccacagattcccaaaaactaatcagagctcttttgtccawcctttccatgtacawtccaaagtgctctcggtagaactawtggccaagatatcttcaaactgaagaatcttctggctttgaggcccttccccctcatccagggccccatcctcttgctggtcataggcagggcctcccaggattcggattctcttctcacactgcttctttgccacagtcagttggttgatgtacctcttcatgttcctggccctcaggagatcagctttcattgccgcagtttctttacctttgtgcctcttcagttcttgaagcaactaaggtatcaaattgtagtggaaataatcccctcgtgcc

SEQ ID NO: 438 - DNA, 1507 bp, Homo sapiens
  SITE (2): n equals a,t,g, or c
  SITE (17): n equals a,t,g, or c
anagaaaggtacgcctncaggtaccggtccggaattcccgggtcgacccrcgcgatggacccgctgcccgcggctgcagtcggggcggcagctgaggcggaggctgacgaggaggcggatcccccggcgtcagatctgccgacaccccaggccatcgagccccaggccatcgtgcagcaggtcccagcccccagtcgaatgcagatgccgcaggggaacccgctgctgctgtcccacaccctgcaggagctgctggccagggacaccgtgcaggtggagctcattccggagaagaagggcctcttcctgaagcatgtggagtatgaggtttccagccagcgcttcaagtcctcggtatacagacggtacaatgacttcgtggtcttccaggagatgctcctgcacaagttcccctaccgtatggtgcctgccctgccacccaagagaatgctgggagctgacagggagttcatcgaggccaggaggagagccctgaagcgcttcgtcaacctggtggcgcgacaccccctgttctccgaggatgtggtcctcaagctcttcctgtccttcagcggctcggatgtgcagaacaagttaaaggagtcagcacagtgcgtcggggacgaattcctgaactgtaagctggctaccagggccaaggacttcctcccagctgacatccaggctcagtttgccatcagccgggagctgatccggaacatctacaatagctttcacaagcttcgcracagggccgagcggatcgcgtgcgcgggccatcgacaatgcggcagatcttctcatattcgggaaggagctaagtgcaatagggtctgacacgaccccgctgccctcctgggccgctctgaatagcagcacgtgggggtccctgaagcaggctctgaaaggcctgtctgtggaattcgcgctgctcgccgacaaggctgcacaacagggtaagcaggaagagaacgacgtggtggagaagctgaacctcttcttggatctgctgcagtcctataaggacctgtgcgagcggcatgagaagggcgtgttgcacaagcaccagcgggccctgcacaagtacagcctgatgaagaggcagatgatgagcgccaccgcgcagaaccgcgagccggagtccgtggagcagctggagtcccgcatcgtggagcaggagaacgcgattcagacgatggagctgcggaactacttctccctgtactgcctgcaccaggagacgcagctcatccacgtctacctgcccctcacctcccacatcctccgcgccttcgtcaactctcagatccaagggcacaaggagatgagcaaggtgtggaacgacctgaggcccaagctcagctgcctctttgcgggaccacacagcaccctgaccccaccgtgctccccgccggaggacggcctgtgtcctcactagcgcctgaggctgaggtggtgctccctgcggccgcactaaaacctctttccaaaaaaaaaaaaaaaaaaa

SEQ ID NO: 439 - DNA, 659 bp, Homo sapiens
gcggccgcggccgtgagcctgcccccaactcgccctcagccggctggccggcgcggccatggaggtctacatcccgtcctttcgctatgaagagagcgacctggagcggggatacacggtgtttaagatagaagtgctaatgaatggaagaaaacattttgttgaaaagagatacagcgaatttcatgctttgcacaaaaagcttaagaaatgtataaaaactccagaaatcccttctaaacatgttaggaactgggtccccaaagtcttggaacagcgacgacaaggcttggaaacatacttacaggctgtcattttagaaaatgaagaacttcccaaactgtttcttgatttcctaaatgtgcgacacttgccctctctaccaaaggcagaaagttgtggatcttttgatgaaacagagtctgaagagtcaagcaaactgtcccaccagcctgtgctgctgttcctcagggatccatatgtcttgcctgcagccagcggtaatcaaacctgtcatctgctaacagctctttactgatctgaccctgcmccacataaaccacgtttttaatacaggtctaacagagtgacattggtcccgggcttaataatctgccaataaaccagtgctcttggtawaaaaaaaaaaaaaaaaaaaa

SEQ ID NO: 440 - DNA, 538 bp, Homo sapiens
gccctggagcccgcgctgcctgcgcaggccaaggaggagctggcggcagccatggtgcgcgtgctgcgggccaccggycgggcgcaggcgctggtgactgacctgggcactgcggagctggcgcgctgtggaggccgtgaggcgctgctgttccgggaaaacacattggccaccaaggctatcgatgagtacatgaagctcgtggcacaggattacctccaggagaccctggsmcaggttgtgcggcgtctctgtgcttctactgaggactgtgaagtggaccccagcaaatgtccagcctcggagctgccagagcaccaggccagacttcggaacagctgcsaggaggtcttcgaaaccattatccattcctacgagtgagaatcagggccccagcagcttagcccacccctgcttaccatgctagccccgacctccagtttagggtggccagataaaatacaggagacactcagttaaatttgatgcaataattgggaccatgcttatactaaaaaattactcatttgaaccaggg

SEQ ID NO: 441 - DNA, 2646 bp, Homo sapiens
  SITE (32): n equals a,t,g, or c
  SITE (1880): n equals a,t,g, or c
  SITE (2093): n equals a,t,g, or c
  SITE (2646): n equals a,t,g, or c
atccttcaagaggaagtccagcaagaaagggnctgaggagggccgctggagacccttcatcatcaggcccaccccctccccgctcatgaaagcccctgctggtgtttgtgaaaccccaagagtgggggcaaccagggtgcaaagatcatccagtctttcctctggtatctcaatccccgacaagtcttcgacctgagccagggagggcccaaggaggcgctggagatgtaccgcaaagtgcacaacctgcggatcctggygtgcgggggcgacggcacggtgggctggatcctctccaccctggaccagctacgcctgaagccgccaccccctgttgccatcctgcccctgggtactggcaacgacttggcccgaaccctcaactggggtgggggctacacagatgagcctgtgtccaagatcctctcccacgtggaggaggggaacgtggtacagctggaccgctgggacctccacgctgagcccaaccccgaggcagggcctgaggaccgagatgaaggcgccaccgaccggttgcccctggatgtcttcaacaactacttcagcctgggctttgacgcccacgtcaccctggagttccacgagtctcgagaggccaacccagagaaattcaacagccgctttcggaataagatgttctacgccgggacagctttctctgacttcctgatgggcagctccaaggacctggccaagcacatccgagtggtgtgtgatggaatggacttgactcccaagatccaggacctgaaaccccagtgtgttgttttcctgaacatccccaggtactgtgcgggcaccatgccctggggccaccctggggagcaccacgactttgagccccagcggcatgacgacggctacctcgaggtcattggcttcaccatgacgtcgttggccgcgctgcaggtgggcggacacggcgagcggctgacgcagtgtcgcgaggtggtgctcaccacatccaaggccatcccggtgcaggtggatggcgagccctgcaagcttgcagcctcacgcatccgcatcgccctgcgcaaccaggccaccatggtgcagaaggccaagcggcggagcgccgmccccctgcacagcgaccagcagccggtgccagagcagttgcgcatccaggtgagtcgcgtcagcatgcacgactatgaggccctgcactacgacaaggagcagctcaaggaggcctctgtgccgctgggcactgtggtggtcccaggagacagtgacctagagctctgccgtgcccacattgagagactccagcaggagcccgatggtgctggagccaagtccccgacatgccagaaactgtcccccaagtggtgcttcctggacgccaccactgccagccgcttctacaggatcgaccgagcccaggagcacctcaactatgtgactgagatcgcacaggatgagatttatatcctggaccctgagctgctgggggcatcggcccggcctgacctcccaacccccacttcccctctccccacctcaccctgctcacccacgccccggtcactgcaaggggatgctgcaccccctcaaggtgaagagctgattgaggctgccaagaggaacgacttctgtaagctccaggagctgcaccgagctgggggcgacctcatgcaccgagacgagcagagtcgcacgctcctgcaccacgcatcagcactggcagcaaggatgtggtccgctacctgctggaccasgcccccccagagatccttgatgcggtggaggaaaacggggagacctgtttgcaccaagcagcggccctgggccagcgcaccatctgccactacatcgtggaggccggggcctcgctcatgaagacagaccagcanggcgacactccccggcagcgggctgagaaggctcaggacaccgagctggccgcctacctggagaaccggcagcactaccagatgatccagcgggaggaccaggagacggctgtgtagcgggccgcccacgggcagcaggagggacaatgcggccaggggacgagcgccttccttgcccacctcactgccacattccagtgggacggccacggngggacctaggccccagggaaagagccccatgccgccccctaaggagccgcccagacctagggctggactcaggagctgggggggcctcacctgttcccctgaggaccccgccggacccggaggctcacagggaacaagacacggctgggttggatatgcctttgccggggttctggggcagggcgctccctggccgcagcagatgccctcccaggagtggaggggctggagagggggaggccttcgggaagaggcttcctgggccccctggtcttcggccgggtccccagcccccgctcctgccccaccccacctcctccgggcttcctcccggaaactcagcgcctgctgcacttgcctgccctgccttgcttggcacccgctccggcgaccctccccgctcccctgtcatttcatcgcggactgtgcggcctgggggtggggggcgggactctcacggtgacatgtttacagctgggtgtgactcagtaaagtggatttttttttcaaaaaaaaaaaaaaaaaactcgggggggggcccggtaccaatttn

SEQ ID NO: 442 - DNA, 729 bp, Homo sapiens
  SITE (10): n equals a,t,g, or c
  SITE (110): n equals a,t,g, or c
  SITE (503): n equals a,t,g, or c
  SITE (648): n equals a,t,g, or c
  SITE (653): n equals a,t,g, or c
  SITE (708): n equals a,t,g, or c
atcctttagntttgggggggcgtagtcccccccccccccccccccgagccgaaacgccgcccacccgattaagaatgatctgccacactcagataacacaaaagcacttntggatgagagatgttcagataaattatttctgactgggggaggcgaggagctggagttattttcgcgctggcgccagggcttttgccgcagccggcgccgaaatatgggcaccggtttgctgggctatgcggatmtttgatgtaatttatggtttgatgtggatttacgatggcgccggggatagggctacgcagtttctagcgaccgcattattttactattggattatgctattacttctttaagctatgatgttgggacggacccgggccttccgcttttctccactggatgaaaggggcggctgggcgcgcttcgcagatgcaattgggctctgatatttattttacctttgagtttgacccttttttcttgatttcctgggcttttantcccttctttagatatgctgatttttgctttggggatgacgatgcgcttttctttgatattagataaactgctggtccttgacgatattctgggggatgatatcacagacctcgaatgacgaggtcttttgcgaactgatacgcnctctnttaattactaattatcgatggccctttctttttaccgattatgcccaagcccaanccaataccctttcgaaatggc

SEQ ID NO: 443 - DNA, 857 bp, Homo sapiens
  SITE (4): n equals a,t,g, or c
  SITE (5): n equals a,t,g, or c
  SITE (25): n equals a,t,g, or c
  SITE (30): n equals a,t,g, or c
  SITE (49): n equals a,t,g, or c
  SITE (737): n equals a,t,g, or c
  SITE (774): n equals a,t,g, or c
tatnntcggattgattggcccaatnttctngtgttcattgtcaagactncttcccgtacattctacctggtggccaaaactgagcaagaaatgcaggtgtgggtgcacagcatcagtcaggtctgcaaccttggccacctggaggatggtgcagattccatggagagcctctcttacacgccctcctccctgcagccatcctctgccagctcccttcttacsgcccatgctgccagmwcctctttgccaagagatsacccaaacactaatgccgtagccactgaggaaaccagaagtgagtcagagcttctcttccttccagattatctggttttgtccaactgcgagactggaagactgcaccataccagtctacccaccagatgtgatagctggtcaaactcagaccgttcattggaacaggcttcatttgatgatgtttttgttgactgcctgcagccgctcccctccagtcatttggtccacccctcatgccatggcagtggagctcaggaggtgccatcctcgaggcctcaggctgccctgatctggagtagagaaatcaatgggccacccaggggaccacttgtcttcttcaccattgctggaaagttccttaagttccaccattcaggtagataaaaatcaaggttccttaccctgtgggagcaaaagaactagacattatgttccaacactccacctccccgcccccctaagccaagccatctgtctgnaacggcgccaagaggagtggagtacacacagtggtancaagaagccagaatgcactctggttccaagaagaatctccctctctggtttagacaacatgagaacctggaaagctgatgtag

SEQ ID NO: 444 - DNA, 2465 bp, Homo sapiens
  SITE (2035): n equals a,t,g, or c
  SITE (2267): n equals a,t,g, or c
  SITE (2421): n equals a,t,g, or c
  SITE (2455): n equals a,t,g, or c
  SITE (2462): n equals a,t,g, or c
tcgacccacgcgtccgcccagctggaggaagcggcggcggcggccacgatgagkgsgggcgacgcagtgtgcaccggctggctcgttaagtcgccccccgagaggaagctacagcgctacgcctggcgcaagcgctggtttgtcctccggcgaggccgcatgagcggcaaccccgatgtcttggagtactacaggaacaagcactccagcaagcccatccgggtgatagacctcagcgagtgtgcagtgtggaagcatgtgggccccagctttgttcggaaggaatttcagaataatttcgtgttcattgtcaagactacttcccgtacattctacctggtggccaaaactgagcaagaaatgcaggtgtgggtgcacagcatcagtcaggtctgcaaccttggccacctggaggatggtgcagattccatggagagcctctcttacacgccctcctccctgcagccatcctctgccagctcccttcttaccgcccatgctgccagctcctctttgccaagagatgacccaaacactaatgccgtagccactgaggaaaccagaagtgagtcagagcttctcttccttccagattatctggttttgtccaactgcgaractggaagactgcaccataccagccgctcccctccagtcatttggtccacccctcatgccatggcagtggagctcaggaggtgccatcctcgaggcctcaggctgccctgatctggagtagagaaatcaatgggccacccagggaccacttgtcttyttcaccattgctggaaagttccttaagttccaccattcaggtagataraaatcaaggttccttaccctgtggagcaaaagaactagacattatgtccaacactccacctccccgcccccctaagccaagccatctgtctgaacggcgccaagaggagtggagtacacacagtggtagcaagaagccagaatgcactctggttccaagaagaatctccctctctggtttagacaacatgagaacctggaaagctgatgtagaaggccaatccttaagacaccgagacaagcggcttagtttgaatttgccatgcaggttctccccgatgtaccccacagcttcagccagtatcgaagacagctatgtgcccatgagcccccaggctggtgcctctggtcttggaccccactgcagccctgatgactacattccaatgaactcaggaagcatctcaagcccgttgcctgagctgcctgcaaacctggaacctcccccagtgaatagagatctcaagcctcagaggaaatcacggccacctcctctggacctgagaaacctctcgatcatccgggaacatgcatctcttaccaggacccgcactgtgccttgcagtcgaaccagctttctctctccagaaagaaatggtattaattctgcaagattttttgctaatcctgtttccagagaagacgaagaaagctacatcgaaatggaggagcaccgaacagccagttccctgagcagtggtgcccttacgtggacaaagaaattcagcctagattatttggccctggacttcaattcagcatcaccagcccccatgcagcagaaacttctcctttcagaagaacaaagagtagactatgtccaagtggatgagcagaagacacaggctytccagagcacaaaacaggagtggacggatgaaaggcaatccaaagtatgagaggtgcgggcttgtgccatgtgtgaaacagggaagcttggggctcagtttgagttttttcttttttttttttttttgtccactaaaaacacactgatggtcaacacaggtcaaaaccaagagagaatgtgtagttttcaaggtcttggccagaacctttaggaaagaagacctgtttatacattgaaggaagaaaagaaggaagcagttgccttccggagggggctctgagagaatctagcctcccctctgtcctattggagcaaarattggagtgagtgttgccaccaacaggattttatcgtttgactccnatacctgaaattctgacttctctcctgtgcttcaatgaraatgataaattatcctagcaaaggggcctctggagaccatcttgttccagcctctgaagacagttgaggagatcaagcccascaatggtggcagaatcttactccacagacttcagcagactagtcatttcaatacccaaagaaagacaagtgacaggggcaatggatctcaggctctgagataagtatatcngatgacactggtggctctaaggatattgcaattaagcagctacctgtagccaggtattctgctgctcttggccttttcccacgcatcgtctcgtgtcttctccgaaagaccttggaagataggcctggaagaagactgttgatgccactttganggaaaagaacactgagaactataggaggggaacnctttgcncca

SEQ ID NO: 445 - DNA, 2302 bp, Homo sapiens
  SITE (2300): n equals a,t,g, or c
agggtgtcctacagccatggcctgcgcaaggaactgctcaagtccatctggtacgcctttaccgcgctggacgtggagaagagtggcaaagtctccaagtcccagctcaaggtgctgtcccacaacctgtacacggtcctgcacatcccccatgaccccgtggccctggaggaacacttccgagatgatgatgacggccctgtgtccagccagggatacatgccctacctcaacaagtacatcctggacaaggtggaggagggggcttttgttaaagagcactttgatgagctgtgctggacgctgacggccaagaagaactatcgggcagatagcaacgggaacagtatgctctccaatcaggatgccttccgcctctggtgcctcttcaacttcctgtctgaggacaagtaccctctgatcatggttcctgatgaggtggaatacctgctgaaaaaggtactcagcagcatgagcttggaggtgagcttgggtgagctggaggagcttctggcccaggaggcccaggtggcccagaccaccggggggctcagcgtctggcagttcctggarctcttcaattcgggccgctgcctgcggggcgtgggccgggacaccctcagcatggccatccacgaggtctaccaggagctcatccaagatgtcctgaagcagggctacctgtggaagcgagggcacctgagaaggaactgggccgaacgctggttccagctgcagcccagctgcctctgctactttgggagtgaagagtgcaaagagaaaaggggcattatcccgctggatgcacactgctgcgtggaggtgctgccagaccgcgacggaaagcgctgcatgttctgtgtgaagacagccamccgcacgtatgagatgagcgcctcagacacgcgccagcgccaggagtggacagctgccatccagatggcgatccggctgcaggccgaggggaagacgtccctacacaaggacctgaagcagaaacggcgcgagcagcgggagcagcgggagcggcgccgggcggcaaggaagaggagctgytgcggctgcagcagctgcaggaggagaaggagcggaagctgcaggagctggagctgctgcaggaggcgcacggcaggccgagcggctgctgcaggaggaggaggaacggcgccgcagccagcaccgcgagctgcagcaggcgctcgagggccaactgcgcgaggcggagcaggcccgggcctccatgcaggctgagatggagctgaaggaggaggaggctgcccggcagcggcacgcatcaaggagctggaggagatgcagcagcggttgcaggaggccctgcaactagaggtgaaagctcggcgagatgaagaatctgtgcgaatcgctcagaccagactgctggaagaggaggaagagaagctgaagcagttgatgcagctgaaggaggagcaggagcgctacatcgaacgggcgcacaggagaaggaagagctgcagcaggagatggcacagcagagccgctccctgcagcaggcccagcagcagctggaggaggtgcggcagaaccggcagagggctgacgaggatgtggaggctgcccagagaaaactgcgccaggccagcaccaacgtgaaacactggaatgtccagatgaaccggctgatgcatccaattgagcctggagataagcgtccggtcaccagcagctccttctcaggcttccagccccctctgcttgcccaccgtgactcctccctaaagcgcctgacccgctggggatcccagggcaacaggaccccctcgcccaacagcaatgagcagcagaagtccctcaatggtggggatgaggctcctgccccggcttccacccctcaggaagataaactggatccagcaccagaaaattagcctctcttagccccttgttcttcccaatgtcatatccaccaggacctggccacagctggcctgtgggtgatcccagctcttactaggagagggagctgaggtcctggtgccaggggcccaggccctccaaccataaacagtccaggatggaacctggttcacccttcataccagctccaagccccagaccatgggagctgtctgggatgttgatccttgagaacttggccctgtgctttagacccaaggacccgattcctgggctaggaaagagagaacaagcaagccggggctacctgcccccaggtggccaccaagttgtggaagcacatttctaaataaaaactgctcttagaatgaaaaaaaaaaaaaaaaaaaaaaaaaaaaaaaaancc

SEQ ID NO: 446 - DNA, 501 bp, Homo sapiens
  SITE (425): n equals a,t,g, or c
  SITE (487): n equals a,t,g, or c
  SITE (489): n equals a,t,g, or c
cgatgagcagctcttatgagtcgtatgatgaagaggaggaggatgggaaggggaagaaaacccggcaccagtggccctccgaggaggcctccatggacctggtcaaggacgccaaaatctgcgccttcctgctgcggaagaagcggttcggccagtggaccaagttgctctgcgtcatcaaagacaccaaactgctgtgctataaaagttccaaggaccagcagcctcagatggaactgccactccaaggctgtaacattacgtacatcccgaaagacagcaaaaagaagaagcacgagctgaagattactcagcagggcacggacccgcttgttctcgccgtccagagcaaggaacaggccgagcagtggctgaaggtgatcaaagaagcctacagtggttgtagtggccccgtggattcagantgtcctcctccaccaagctccccggtgcacaaggcagaactggagaaaaactgtcttcgaananaccagctcaaat

SEQ ID NO: 447 - DNA, 1987 bp, Homo sapiens
  SITE (1987): n equals a,t,g, or c
tggattccagtgcaagctacatcatgtacatggatgagtcatttgctaaccctcagtttgtccatctgtaaaacaggagtaaagattcccttcctaacagggttagagtgkrgacaaggtcccgcctgactccgctctggaaagtccttttgaagaaatggccctggtgaggggcggctggctgtggagacagagctccatcctccgccgctggaagcggaactggtttgccctgtggctggacgggaccctgggatactaccacgatgagacagcgcaggacgaggaggaccgtgtgctcatccacttcaatgtccgtgacataaagatcggcccagagtgccatgatgtgcagcccccagagggccggagccgagatggcctgctgactgtgaacctacgggaaggcggccgcctgcacctctgtgcggagaccaaggatgatgccctagcatggaagacagcactgctggaggcaaactccaccccggtgcgcgtctacagcccgtaccaagactactacgaggtggtgccccccaatgcacacgaggccacgtatgtccgcagctactacggaccgccctacgcaggccctggcgtgacgcacgtgatagtgcgggaggatccctgctacagcgccggcgcccctctggccatgggcatgcttgcgggascgccactgggcggcrywgggctcgctcatgtggtcgccctgctggttctgagccctgggactcggagcactgacccctgcgcttggattgctagactcctcttcctcctggaccccatcctctaccatccaagccctgtcccactttggccctatcctctccattagctccttccgggtttggaccattccccccactccctacccttaatccccacatgggaagaagctatcatcacaggtacaaacatcgcttgaagtcttcacatctaccactagacacccccaaaatctgttatagacatttatggatacatttcctctaaacacaacagggcacagcaaatacgacttcatttggcttcgagttccccaggcgctgtagacacaacatgaatcgggctctctgctctctccttagggagctcgagtcctggtggggagaacaggagtaaacaaggacttgacaaagctgaagagttatcagtcctttgacaaggacaggtggggcagggagcaagacaggtaggctggaagaacagttattggcaagtatgcagagccgtgaacgtcatggcatgtccaaggaattaaatgggagttcatttgggctggggtggaggctgggatcagaccgtggtgggccttcaagctaaggagcttcctaggtgaaaggggagatgtgagccttctctggagggaagtttcatgattgcatctataatgaatatattgcctgttttgtgaatactgacacatgtccatacctaaaacactcctgagttaagtcccatccttcccacaaacagcttcctggctggtacccatgataacaattgagctgaacctggggacccctggttggggaacaggtgagttctatttgagacttccagccctagaaagctgcctccgtccagaaatgcctctcacaccaggagctcggccctctctttgtagctgtgactgtcaccctctcaggctttgtctcatccttcattctgaataagatggcagtgttctcctctggggcctgatccacctctacaccagcccaggaagccccatctgtgcctgccctcaggtggtccaccagtctccccctttggttcccttccagtctcttccccctttctatcccaatcaccaatagaaatgctaacatccctgcctggtagccagactagcccactaaagctcccctgtaaatgggggctccattagttctgctgccgagactaataaagatttggttggctctaaaaaaaaaaaaaaaaaaaaaaaaaaaaaaaaaaaaaaaaaaaaaaaaaaaan

SEQ ID NO: 448 - DNA, 719 bp, Homo sapiens
  SITE (61): n equals a,t,g, or c
  SITE (719): n equals a,t,g, or c
ggcacgagccgcctggccgggcgtagacgcggtggcagagccgcgcggcgctggaaggagntggcggacggcgggacctcggcggactcgcatggaggaggagggtgtgaaggaarccggtgagaagcctcggggagcacagatggtggacaaggctggctggatcaagaagagcagtgggggcctcctgggtttctggaaagaccgatatctgctcctctgccaggcccagctgctggtctatgagaatgaggatgatcagaagtgtgtggagactgtggagctgggcagctatgagaagtgccaggaccttcgtgccctcctcaagcgaaaacaccgctttatcctgctgcgatccccagggaacaaggtcagcgacatcaaattccaggcacccaccggggaggagaaggaatcctggatcaaagccctcaatgaagggattaaccgaggcaaaaacaaggctttcgatgaggtaaaggtggacaagagctgcgccctggagcatgtgacacgggaccgggtgcgagggggccagcgacgccggccaccaacgagagtccacctgaaggargtggccagtgcagcttctgacggtcttctgcgcctgggatcttgatgttccggaacagtgggccaccagtgtttgcccccagcaatcatgtcagtgtaagcccaacctcggggagaacaccccgggcccctcatggcctcctaan

SEQ ID NO: 449 - DNA, 356 bp, Homo sapiens
tgggagccttttccttcggagcagcagccctgtccggcatctgtcttgagctcccagcaaggaaagtccatcagcttgataatggaggagaacaatgactccacggagaacccccaacaaggccaagggcggcagaatgccatcaagtgtgggtggctgaggaagcaaggaggctttgtcaagacttggcatactcgctggtttgtgctcaagggggatcagctctattatttcaaagatgaagatgaaaccaagcccttggaatatttgacaacgtctggagacagtgtctggcttgtcmacagttggggaagataccacagatatctcgtgggtagaagccggggtgcatttaa

SEQ ID NO: 450 - DNA, 2901 bp, Homo sapiens
cgactggaggggcgggggagtcacctgcgagcggctgcgctggcggccagcccgcccaccgcgtctggatcgcgccggctgcgcggggctgcggacagcacacaccctggaaggccccggcggggaacgggcagagtccgcgccctgcgtccgcgaccaggaggatcggaccttcgccttcgctgtcgccgccgccgmcgcccgcggccgtcggggctattagtgaaagatggtggatcgcttggcaaacagtgaagcaaatactagacgtataagtatagtggaaaactgttttggagcagctggtcaacctttaactatacctggacgagttcttattggagaaggagtattgactaagttgtgcaggaaaaagcccaaagcaaggcagtttttcttgtttaatgatattcttgtatatggcaatattgtcatccagaagaaaaaatataacaaacaacatattattcccctggaaaatgtcactattgattccatcaaagatgagggagacttaaggaatggatggctaatcaagacaccaactaaatcttttgcagtttatgctgccactgctacggagaaatcagaatggatgaatcatataaataaatgtgttactgatttactctccaaaagtgggaagacacccagtaatgaacatgctgctgtctgggttcctgactctgaggcaactgtatgtatgcgttgtcagaaagcaaaattcacacctgttaatcgtcgccaccattgccgcaaatgtggttttgttgtctgtgggccctgctctgaaaagagatttcttcttcccagccagtcctctaagcctgtgcggatttgtgacttctgctatgacctgctttctgctggggacatggccacatgccagcctgctagatcagactcttacagccagtcattgaagtctccyttaaatgatatgtctgatgatgatgacgatgatgatagcagtgactaaggacacatttgggagtatttaatcaggtgtggctatctgagaaatcaactttgggggaaatgtaagattctgagctctctctctgttttgttctagccatgaatttgcctgagaaacttgtaacctatgtgcctcaatatattccatagaaagtargtccccctgccttctcccactcctcacactcttctacagggataggcttttgcaaatatatcagataaattttttgtttcttgtttatttttaggttattttcttggaaggttgggaaaagakgtttgttttaacaggtcatgtactacgktgttgttttcatttctgttataagtaaaactaaaagcacagaatggtgggaaaggggctataatgtggttcattaataatgttagcagcttttttctaaccatcctgtctaatggttaagacaccagtaacaaaaacacatgatttggaaatactttggctttttcatatacctagtggtgccttatcataatagcactgttacatgaaataagcccctaccttcttactttctggtttgttgaaaaaatacactggtgctctttgaagtgataaaatgagtgtttatgaatgggtgtaattaggaaatacttctcatctgacagctacaaataactaagtttggaggtattttcactctatatgaataaatatttttccataaaatagttgtgattatatttttgttttatataggtcccaaattataattgtcaaatatatattttaaattaataaaagttgtcattcttaggaatttggtttgaaatttatcagttatacagaattgtcatactgcattagcttctacctttagtaagacatattttttaggtataaattcttatgctttaacattatttctggattggaaaatcttataaaacccttgaaaataaacagtctcttttttacaaagyctgtgttagagcacagatttacctaggcttgaagatttggaagaaataatatgtaagaatggcctcaaggcagaccactttaagtttggctagacttcatatcgtggaagtattgtctatttcagtgtgaaactatcttgaatttgcaaatatagtgttatattttataaagttttgtaaaatcccaaacaatatttctatttttgtaaaacaattgtatgtataatctgtatttgaaatcattttgcaatctatggaaatagagtagcaattgctatttctaaattgtgaactttaagtcaatctagatttattttgagaagtaattgttcactctttacttttgaggcagccattaggttgaaagtatatatttatcatataaaacttgatgcgttttgcactactctttccatttatatgctgcaaacaactacagtctttgaaatatggaaaatcagcagtctaaagtttgttttaaattctaaatttaaaaaatcttcaaatctgaatataccgcaaatgtcatgagaagtttgattcagtaacttgtgatggaggattctttggtatcttactgtttggttaaggcactaattttacttacctattagattttgaaagtatctgagatatacaaatctccctgtaggaaatgtgaaagaaaagcacaacaaaactagggttttttgttcatttgcttgcttttatgattttttttggtttgttttaatatcaggtggatttttgtttctaagcaatatatacataaaatcaaccaacatatctgaaaaggatcatgaaacctgagaaatgctaatggagatttgctggtacataggaatctagcaaattcaggaaccaaggggaaatgttgtgagataacatttacattgtcaacctttattgactttgtttttacaataaaaaatattttacaacttaaaaaaaaaaaaaaaaaaaaaaaaaaaaaaa

SEQ ID NO: 451 - DNA, 1569 bp, Homo sapiens
  SITE (1): n equals a,t,g, or c
  SITE (4): n equals a,t,g, or c
  SITE (17): n equals a,t,g, or c
  SITE (1240): n equals a,t,g, or c
  SITE (1258): n equals a,t,g, or c
  SITE (1529): n equals a,t,g, or c
  SITE (1565): n equals a,t,g, or c
natnctcttacactatngaaggtacgcctgcaggtaccggtccggaattcccgggtcgacccacgcgtccggcggagcctggakaaggcccaggagggcagcagaccgaagaggccctatgcagagctcccgcctcaggccgagatgaggagcccttcagaatagctgctgtctctgggaggacccgggcgtccttggcagcccagctgctctggacaaagccctgccagtcaggcctccgctggcaggaaccatggcagaggctggggatgctgcgctatcggtggccgagtggctgcgggcattgcacctggagcagtacacggggctctttgagcagcatggcctggtgtgggccactgagtgccaaggcctcagcgacacccgcctgatggacatgggcatgctactccctggtcaccgctgccgcatcctggctgcctgctccgtgcccatacctcaccggcccctgcaccccgscccaccccacggcctgtgcccatgaagcgccacatcttccgytaccacctgtgcctgcactccacccgagccgstgcccaccactacagaggatgaggggctycccgctgcccmacccatcccgscccggaggagctgscttycgsccacctgcttcacmaccccatccacagctgccccagaccctgtgctgcccccgctgcctgctaagcggcatttggcagagctgagcgttccacccgtgccgccccgcaccggacccccccgcctgctggtgagcctgcccactaaggaggaggagtcattgctgccatcattatcatcccctccccagccacagtctgaggagcccctgtccaccctcccccaggggcctccccagcctccctctccacctccctgccccccggagatacctccaaagccggtacgcctgttcccagagttcgatgactctractacgatgaggtcccaraggaggggccgggggccccagccagagtgatgaccaagaaggwggrgcccccaccgagccgagtcccacgggccgtgcgcgtggccagtctgctgagcgagggagaggaactgtctggggacgaccaaggggatgaggaagaggatgaccacgcctatragggcgtccccaatggcggatggcataccakcagcctgagcttgtccttgcccagcacaatagctgcgccacaccccatggacgggccgcctgggggctccacccccgtcacaccagtcatcaangctggctggctggacaanaacccaccgcagggatcttacatctatcagaaacgatgggtgagactggatactgatcacctgcgatactttgacagtaacaaggacgcttactctaagcgctttatctctgtggcctgcatctcccacgtggctgccatcggggaccagaagtttgaagtgatcacaaacaaccgaacctttgccttccgggcagagagtgatgtggagcggaaggagtggatgcaggccctgcagcaggccatggctgagcagcgtgcccgggcccggntctctagcgcttatctgctgggagttccaggctcanaaca

SEQ ID NO: 452 - DNA, 1070 bp, Homo sapiens
  SITE (968): n equals a,t,g, or c
gaggagctcaccctggagatcctggatcgccggaacgtgggcatcagggagaaggactattggacctgctttgaggtcaacgagagggaggaggcagagcgccccctgcactttgcggagaaggtgctgcccatcctgcacgggctgggcacggacagccacctggtggtgaagaagcaccaggccatggaggccatgctgctgtacctggccagccgtgtcggtgacaccaagcatggcatgatgaagttccgtgaggaccgcagcctcctgggcctgggcctgccctcaggtggcttccacgatcgctacttcatcctcaacagcagctgcttgcggctctacaaggaggtccggagtcaccggcctgagaaggagtggcctattaagagtctcaaagtctacctgggagtgaagaagaaactcaggccacccacctgctggggcttcacagtggtgcatgagacagagaaacatgagaagcagcagtggtacctctgctgtgacacacagatggagctccgggagtggttcgctacctttctgtttgtgcagcatgacggcctggtgtggccctcagagccctcacgcgtgtcccgggcagtgcctgaggtccggctgggtagtgtgtcactgatcccccttcgaggtagtgaaaatgaaatgcgccggagtgtggctgccttcaccgcggaccctctgtctcttctgcgcaacgtctgagcacaggagcccatccttggctctaggattccgccgctggaagccttctgttcagacaccccttatgctccaaggcctgatgtgagccagcggggggtgcatgggaaactgcaccccacaacccacatcctccatcctgactgcagcatggggttccccggcagggtgggaggcagcaggggtcagcctgggcaggaacctctyccaactctgtccaggtgttcagacctcttggsccaacctgntyamcccaacgggttcactgtccttgtggggctkgaragatgggcataagtcaggaacttgggaggaccaccacctttmaragcgtgaggccctggggcctg

SEQ ID NO: 453 - DNA, 402 bp, Homo sapiens; identical to SEQ ID NO: 26
  SITE (94): n equals a,t,g, or c

SEQ ID NO: 454 - DNA, 206 bp, Homo sapiens
  SITE (164): n equals a,t,g, or c
  SITE (203): n equals a,t,g, or c
ggaagttcgagatctggtacaacgcgcgcgaggaggtctacatcgtccaggcgccaactcctgagattaaagccgcgtgggtgaatgaaattcggaaagtgctgaccagccagctgcaggcttgtagagaagccagccagcaccgggcgctggagcagtcacanagcctgcccctgccggccccgaccagcaccagtccctcnaga

SEQ ID NO: 455 - DNA, 494 bp, Homo sapiens
  SITE (230): n equals a,t,g, or c
  SITE (295): n equals a,t,g, or c
ggagccacagtgaccgccatgggttagggaggtgtgatgtcaggctgttggggtttagaagtgaagccaaggggcctggacaggggaataatgagggaagagaggagactctcctgaccctccctcttgctcccaggcacgatccctgacccgctacctgccaatccggaaggaggactttracctgaagacacatattgagtcatcgggccatggtgttgatacctgcntgcacgtggtgctcagcagcaaggtctgccgtggctacttggtcaagatgggcggcaagattaantcatggaagaagcgctggtttgttttcgaccggctcaagcgcaccctttcctattatgtggacaagcatgagacgaagctgaagggagtcatctatttccaggccattgaggaagtgtactacgaccacctgcgcagtgcagccaagagcccgaacccagccctcaccttctgcgtaaagacccatgaccggctgtact

SEQ ID NO: 456 - DNA, 974 bp, Homo sapiens
aattcggcagaggttgacagcatccccaaatccctgagcgactcgttatcccccagcctcagcagtgggaccctcagcacctccaccagtatctcctctcagatctcaaccactacctttgaaagcgccatcacacctagcgagagcagtggctatgattcaggagacatcgaaagcctggtggaccgagagaaagagctggctaccaagtgcctgcaacttctcacccacactttcaacagagaattcagccaggtgcacggcagcgtcagtgactgtaagttgtctgatatctctccaattggacgggatccctctgagtccagtttcagcagtgccaccctcactccctcctccacctgtccctctctggtagactctaggagcaactctctggatcagaagaccccagaagccaattcccgggcctctagtccctgcccagaatttgaacagtttcagattgtcccagctgtggaaacaccatatttggcccgagcaggaaaaaacgaatttctcaatcttgttccagatattgaagaaattagaccaagctcagtggtctctaagaaaggataccttcatttcaaggagcctctttacagtaactgggctaaacattttgttgtcgtccgtcggccttatgtcttcatctataacagtgacaaagaccctgtggagcgtggaatcattaacctgtccacagcacaggtggagtacagtgaggaccagcaggccatggtgaagacaccaaacacmtttgctgtctgsacaaagcaccgtggggkccttttgcaggccctcaatgrcaaagacatgaacgactggktgkatgccttyaacccacttctagctggcacaatacggtcaaagctttcccgcagatgcccgagccagtcgaaatactaagtgatctgccgagtgccctcactcgccttcgagagataaagaaagcgttacctctcaaaaaaaaa

SEQ ID NO: 457 - DNA, 883 bp, Homo sapiens
gcccacgcgtccgcccacgcgtccgcccacgcgtccgagcaggcgaggaatcgccgtggcgtcttggtgttctccacgctggttcgcaggtgaagagatggcgtttgtgaagagtggctggttgctgcgacagagtactattttgaagcgctggaagaagaactggtttgatctgtggtcggatggtcacctgatctattatgatgaccagactcggcagaatatcgaggataaggtccacatgccaatggactgcatcaacatccgcacggggcaggaatgtcgggatactcagcccccggatggaaagtcaaaagactgcatgctccagattgtttgtcgagatgggaaaacaattagtctttgtgcagaaagcacagatgattgcttggcctggaaatttacactccaagattctaggacaaacacagcgtatgtgggctctgcagtcatgaccgatgagacatccgtggtttcctcacctccaccatacacggcctatgctgcaccggcccctgagcaggcttatggctatgggccatacggtggtgcgtacccgccaggaactcaagttgtctacgctgcgaatgggcaggcgtatgccgtgccctaccagtacccatatgcaggactttatggacagcagcctgctaaccaagtcatcattcgagagcgctatcgagacaacgacagcgacctggcactgggcatgctggcaggagcagccacgkgcatggccttarggtctctattttgggtcttctaggggcctcaaggtcttgatgtgcatagcttctgataaccctgtgtgcaataatatgatttgcagggcatttctgtttgtgacaaaagtttttaataatagttttaatcattcctttga

SEQ ID NO: 458 - DNA, 2909 bp, Homo sapiens
  SITE (2902): n equals a,t,g, or c
  SITE (2909): n equals a,t,g, or c
atgacctcttcagtgatgtcctagaggaaggtgaactagatatggagaagagccaagaggagatggatcaagcattagcagaaagcagcgaagaacaggaagatgcactgaatatctcctcaatgtctttacttgcaccattggcacaaacagttggtgtggtaagtccagagagtttagtgtccacacctagactggaattgaaagacaccagcagaagtgatgaaagtccaaaaccaggaaaattccaaagaactcgtgtccctcgagctgaatctggtgatagccttggttctgaagatcgtgatcttctttacagcattgatgcatatagatctcaaagattcaaagaaacagaacgtccatcaataaagyaggtgattgttcggaaggaagatgttacttcaaaactggatgaaaaaaataatgcctttccttgtcaagttaatatcaaacagaaaatgcaggaactcaataacgaaataaatatgcaacagacagtgatctatcaagctagccaggctcttaactgctgtgttgatgaagaacatggaaaagggtccctagaagaagctgaagcagaaagacttcttctaattgcaactgggaagagaacacttttgattgatgaattgaataaattgaagaacgaaggacctcagaggaagaataaggctagtccccaaagtgaatttatgccatccaaaggatcagttactttgtcagaaatccgcttgcctctaaaagcagattttgtctgcagtacggttcagaaaccagatgcagcaaattactattacttaattatactaaaagcaggagctgaaaatatggtagccacaccattagcaagtacttcaaactctcttaacggtgatgctctgacattcactactacatttactctgcaagatgtatccaatgactttgaaataaatattgaagtttacagcttggtgcaaaagaaagatccctcaggccttgataagaagaaaaaaacatccaagtccaaggctattactccaaagcgactcctcacatctataaccacaaaaagcaacattcattcttcagtcatggccagtccaggaggtcttagtgctgtgcgaaccagcaacttcgcccttgttggatcttacacattatcattgtcttcagtaggaaatactaagtttgttctggacaaggtcccctttttatcttctttggaaggtcatatttatttaaaaataaaatgtcaagtgaattccagtgttgaagaaagaggttttctaaccatatttgaagatgttagtggttttggtgcctggcatcgaagatggtgtgttctttctggaaactgtatatcttattggacttatccagatgatgagaaacgcaagaatcccataggaaggataaatctggctaattgtaccagtcgtcagatagaaccagccaacagagaattttgtgcaagacgcaacacttttgaattaattactgtccgaccacaaagagaagatgaccgagagactcttgtcagccaatgcagggacacactctgtgttaccaagaactggctgtctgcagatactaaagaagagcgggatctctggatgcaaaaactcaatcaagttcttgttgatattcgcctctggcaacctgatgcttgctacaaacctattggaaagccttaaaccgggaaatttccatgctatctagaggtttttgatgtcatcttaagaaacacacttaagagcatcagatttactgattgcattttatgctttaagtacgaaagggtttgtgccaatattcactacgtattatgcagtatttatatcttttgtatgtaaaactttaactgatttctgtcattcatcaatgagtagaagtaaatacattatagttgattttgctaaatcttaatttaaaagcctcattttcctagaaatctaattattcagttattcatgacaatatttttttaaaagtaagaaattctgagttgtcttcttggagctgtaggtcttgaagcagcaacgtctttcaggggttggagacagaaacccattctccaatctcagtagttttttcgaaaggctgtgatcatttattgatcgtgatatgacttgttactagggtactgaaaaaaatgtctaaggcctttacagaaacatttttagtaatgaggatgagaactttttcaaatagcaaatatatattggcttaaagcatgaggctgtcttcagaaaagtgatgtggacataggaggcaatgtgtgagacttgggggttcaatattttatatagaagagttaataagcacatggtttacatttactcagctactatatatgcagtgtggtgcacattttcacagaattctggcttcattaagatcattatttttgctgcgtagcttacagacttagcatattagttttttctactcctacaagtgtaaattgaaaaatctttatattaaaaaagtaaactgttatgaagctgctatgtactaataatactttgcttgccaaagtgtttgggttttgttgttgtttgtttgtttgtttgtttttggttcatgaacaacagtgtctagaaacccattttgaaagtggaaaattattaagtcacctatcacctttaaacgcctttttttaaaattataaaatattgtaaagcagggtctcaacttttaaatacactttgaacttcttctctgaattattaaagttctttatgacctcatttataaacactaaattctgtcacctcctgtcattttattttttattcattcaaatgtattttttcttgtgcatattataaaaatatattttatgagctcttactcaaataaatacctgtaaatgtctaaaggaaaaaaaaaaaaaaaaaaaaaaaaaaaaaaaaanggggggn

SEQ ID NO: 459 - DNA, 477 bp, Homo sapiens
gccgcggcggcgcgggtgctccgggccgaggccgcgtctggctcttgctgattgaattcctttggtgcagtttagcatgttcctctgtgttctgcatctcctgtagtgtaatgttcaagctcagaaatgccttatgtggatcgtcagaatcgcatttgtggttttctagacattgaagaaaatgaaaacagtgggaaatttcttcgraggtacttcatactggataccagagaagatagtttcgtgtggtacatggrtaatccacagaacctaccttctggatcatcacgtgttggagccattaagsttacctacatttcaaaggttagcgatgctactaagctaaggccaaaggsggagttctgttttgttatgaatgcaggratgaggaagtacttcctacaagccaatgatccagcaggacctagtggaatgggtaaatgtgttaaacaaagctataaaaatttcagtaccaaa

SEQ ID NO: 460 - DNA, 1768 bp, Homo sapiens
gcggacgcgtgggcggacgcgtgggtgaacgacacggtggtgcccaccagccccagtgcggacagcacggtgctgctcgccccatcagtgcaggactccgggagcctacacaactcctccagcggcgagtccacctactgcatgccccagaacgctggggacttgccctccccagacggcgactacgactacgaccaggatgactatgaggacggtgccatcacttccggcagcagcgtgaccttctccaactcctacggcagccagtggtcccccgactaccgctgctctgtggggacctacaacagctcgggtgcctaccggttcagctctgagggggcgcagtcctcgtttgaagatagtgaagaggactttgattccaggtttgatacagatgatgagctttcataccggcgtgactctgtgtacagctgtgtcactctgccgtatttccacagctttctgtacatgaaaggtggcctgatgaactcttggaaacgccgctggtgcgtcctcaaggatgaaaccttcttgtggttccgctccaagcaggaggccctcaagcaaggctggctccacaaaaaaggggggggctcctccacgctgtccaggagaaattggaagaagcgctggtttgtcctccgccagtccaagctgatgtactttgaaaacgacagcgaggagaagctcaagggcaccgtagaagtgcgaacggcaaaagagatcatagataacaccaccaaggagaatgggatcgacatcattatggccgataggactttccacctgattgcagagtccccagaagatgccagccagtggttcagcgtgctgagtcaggtccacgcgtccacggaccaggagatccaggagatgcatgatgagcaggcaaacccacagaatgctgtaggcaccttggatgtggggctgattgattctgtgtgtgcctctgacagccctgatagacccaactcgtttgtgatcatcacggccaaccgggtgctgcactgcaacgccgacacgccggagagatgcaccactggataaccctgctgcagaggtccaaaggggacaccagagtggagggccaggaattcatcgtgagaggatggttgcacaaagaggtgaagaacagtccaaagatgtcttcactgaaactgaagaaacggtggtttgtactcacccacaattccctggattactacaagagttcagagaagaacgcgctcaaactggggaccctggtcctcaacagcctctsctctgtcgtccccccagatgagaagatattcaaagagacaggctactggaacgtcaccgtgtacggscgcaagcctgttaccggctctacaccaagctgctcaacgaggccacccggtggtccagtgccattcaaaacgtgactgacaccaaggccccgatcgacacccccacccagcagctgattcaagatatcaaggagaactgcctgaactcggatgtggtggaacagatttacaagcggaacccgatccttcgatacacccatcaccccttgcactccccgctcctgccccttccgtatggggacataaatctcaacttgctcaaagacaaaggctataccacccttcaggatgaggccatcaagatattcaattccctgcagcaactggagtccatgtctgacccaattccaataatccagggcatsctacagacagggcatgacgctgacttgggacagtgactgcagcttatcaaacagaccaacaaagtgcccaccccg

SEQ ID NO: 461 - DNA, 833 bp, Homo sapiens
  SITE (420): n equals a,t,g, or c
  SITE (827): n equals a,t,g, or c
  SITE (828): n equals a,t,g, or c
  SITE (833): n equals a,t,g, or c
tcgacccacgcgtccgctggtcctgggagccttttccttcggagcagcagccctgtccggcatctgtcttgagctcccagcaaggaaagtccatcagcttgataatggaggagaacaatgactccacggagaacccccaacaaggccaagggcggcagaatgccatcaagtgtgggtggctgaggaagcaaggaggctttgtcaagacttggcatactcgctggtttgtgctcaarggggatcagctctattattcaaagatgaagatgaaaccaagcccttgggtactatttttctgcctggaaataaagttttctgagcatccctgcaatgaagagaacccagggaagttcctttttgaagtagttccaggtaagatattttcctagtcygattaaattmttgkcatcctgtgttggnaaaggtgaagatgggtcagacaggtttcattcttttttgaatcatgactgagaaccttaatttgaggcttggttagtgttgacgcagataatgactgcaggtttatatactagtacaaatgaatgcactsacacacacatactctgaccacataactactagattttcatttgtccatgagactccatagttgaccacaagtcatgatacagtatttgttcaggactattggagatgaatttgattttacagcgctcttgtgatgtgaaatttgacaaggggttataggttgaatgctttgcccagtggaatcactgacatatttcctcacaaaattgtatcttcaaggaggttttgcaaaaaacaaaaaaaaaaaaaaaaaaaaaaaaaaaaaaaaaaaggggggnnccccn

SEQ ID NO: 462 - DNA, 597 bp, Homo sapiens
ccacgcgtccgaccacctttttttctttgcgttttcttactgctggtcctgggagccttttccttcggagcagcagccctgtccggcatctgtcttgagctcccagcaaggaaagtccatcagcttgataatggaggagaacaatgactccacggagaacccccaacaaggccaagggcggcagaatgccatcaagtgtgggtggctgaggaagcaaggaggctttgtcaagacttggcatactcgctggtttgtgctcaagggggatcagctctattatttcaaagatgaagatgaaaccaagcccttgggtactatttttctgcctggaaataaagtttctgagcatccctgcaatgaagagaacccagggaagttcctttttgaagtagttccagggaggcgatcgagatcggatgacagcaaatcatgagagctacctcctcatgggcaagcacccagaatgatatggaagactgggtgaagtcaatccgccgagtcatatggggacttttcggaagaggcatttttggacagaaactggaggatactgttcgttatgagaagagatatgggaaccgtctggcttccgatgtg

SEQ ID NO: 463 - DNA, 395 bp, Homo sapiens
cccgggtcccacaccatccttcgaaggtctcagagttacatccccacgtcaggctgccgtgcttccactgggcctcccctcattaagagtggttactgcgtgaagcaagggaatgtgcggaagagctggaaacgtcgcttctttgcacttgatgactttaccatctgctacttcaagtgtgagcaggaccgagaaccactgcgcaccatatttcttaaggatgttctgaagacccatgaatgtctggtcaagtctggtgatctcttaatgagggacaacctgtttgaaataataacaagctccaggaccttctacgtacaggcagacagtccagaagacatgcacagctggattaaggagattggcgcagctgtccaggccctcaagtgccaccc

SEQ ID NO: 464 - DNA, 467 bp, Homo sapiens
agatgggccgccgtgccctgccgccgggctcttctgctttgcaacgggatgaggtacaaactgctgcaggagggcgacattcaggtctgtgtcatccggcacccgcggacctttctcagcaagatcctcacctcgaaattcctgaggcgctgggagccgcaccacctaacgctggccgacaacagcctggcgtccgccacgccaactgggtacatggaaaactcagtctcctacagcgcaattgaagacgttcagctgctgtcctgggagaatgccccgaagtactgtttacagctcacgattcctgggggaactgtcttactgcaggctgccaatagytacctgcgagaccagtggttccattctctgcaatggaagaaaaagatttacaaatataagaaagtgytgagtaacccaarccgytgggaarttgtcttgaaagagatccggaccctggtggacattgg

SEQ ID NO: 465 - DNA, 626 bp, Homo sapiens; identical to SEQ ID NO: 39

SEQ ID NO: 466 - DNA, 939 bp, Homo sapiens
  SITE (1): n equals a,t,g, or c
  SITE (6): n equals a,t,g, or c
ntatangccagctcgaaattaaccctcactaaagggaacaaaagctggagctccaccgcggtggcggccgctctagaactagtggatcccccgggctgcaggaattcggcacgaggagaggtggcattggcgccagtactcaggccagaagccccttgtgccctgctctcagaacacaggccccagaccaggaaggcattctgctaaagaaggggacccgaaacctcagctaccagcgccgatggttcatcctccgaggaaacctcctcttctacctagaacactagaccgaccatgcacccctgggcctcatcctgttagagaactgccaggtggaaccacaccttaaggctgcagaaccctatgcctttaccatcctgacccctggggtggagggcacaggtgggcgggcctacaagctggctgcagaaacccaggaagagctggagacttggctgtkggcactggctggcgcgagcwggargcggctggctgggctgctgtyccccctycccccccaccaaaacccaatactgggagctgtgccaggcaactggcaagaacccatctcatccccagaggacagtggctttctagccactgtgagtaccccctccagcttccaggagttgcatgagcactttgggaaggagatccgggtgctgcacgtggtacatagagagctccaggcagccagtgacaatggagacagcagatcccaggcaaagatggagcaggagctcaaccagtgtctgatgagtgactgagagatggacccaaagctaagaggtacctacttgccaagacagcagactgcttcaacagagacccaggtcctggctctgtccctccctccctcgtccttaccccatccccccctcatcaaataacaaggcagaaaacaggcccaggtamaamaaaaaaaaaaaaaaaaaaaaa

SEQ ID NO: 467 - DNA, 1997 bp, Homo sapiens; identical to SEQ ID NO: 41
  SITE (1708): n equals a,t,g, or c
  SITE (1834): n equals a,t,g, or c

SEQ ID NO: 468 - DNA, 955 bp, Homo sapiens
tctacccgtcgtcacccgggagagccggagggggctaagttcgggtggcagcgcgggccgaacgcagggagtcacggcgacggcggcggcggcatgacggtctggaagggtaggcttccttcaccgctcgtcctccttccccacaccggagcgggcactcttcgcttcgccatcccccgacccttcaccccgaggactgggcgcctcctccggcgcagctgagggagcgggggccggtctcctgctcggttgtcgagcstccatgtcggataatcagagctggaactcgtcgggctcggaggaggatccagagacggagtctgggccgcctgtggagcgctgcggggtcctcagtaagtggacaaactacattcatgggtggcaggatcgttgggtagttttgaaaaataatgctctgagttactacaaatctgaagatgaaacagagtatggctgcagaggatccatctgtcttagcaaggctgtcatcacacctcacgattttgatgaatgtcgatttgatattagtgtaaatgatagtgtttggtatcttcgtgctcaggatccagatcatagacagcaatggatagatgccattgaacagcacaagactgaatctggatatggatctgaatccagcttgcgtcgacatggctcaatggtgtccctggtgtctggagcaagtggytactctgmaacatccacctcttcattcaagaaaggccacagtttacgtgagaagttggctgaaatggaaacatttagagacatcttatgtagacaagttgacacgctacagaagtactttgatgcctgtgctgatgctgtctctaaggatgaacttcaaagggataaagtggtagaagatgatgaagatgactttcctacaacgcgttctgatggtgacttcttgcatagcaccaacgggaataaagaaaagttatttccacatgtg

SEQ ID NO: 469 - DNA, 660 bp, Homo sapiens
  SITE (193): n equals a,t,g, or c
  SITE (238): n equals a,t,g, or c
  SITE (246): n equals a,t,g, or c
  SITE (558): n equals a,t,g, or c
  SITE (622): n equals a,t,g, or c
ggaccactgaagtgtatgtttgtgcaaggtgagagctgggtgctttgttcttaatttggagacaaattgccaggaggcgatcgagatcggatgacagcaaatcatgaaagctacctcctcatggcaagcacccagaatgatatggaagactgggtgaagtcaatccgccgagtcatatggggacctttcggangagcaacacagatgtacacacggtggcatcacttcttaagctgtncctccganaacttccagaaaccagttattccttatgcgaagtatgaagattttttgtcatgtgccaaactgctcagcaaggaagaagaagcaggtgttaaggaattagcaaagcaggtgaagagtttgccagtggtaaattacaacctcctcaagtatatttgcagattcttggatgaagtacagtcctactcgggarttaacaaaatgartgtgcagaacttggcaacggtctttggtcctaatatcctgcgccccaaagtggaaratcctttgactatcatggagggcactgtggtggtccagcagttgatgtcagtnatgattagcaaacatgattgcctctttcccaaagatgcagaactacaaaagcaagccccaagantggagtgagcaaccaccattgaattcccgaagaaaacc

SEQ ID NO: 470 - DNA, 780 bp, Homo sapiens
  SITE (561): n equals a,t,g, or c
  SITE (633): n equals a,t,g, or c
  SITE (654): n equals a,t,g, or c
  SITE (685): n equals a,t,g, or c
  SITE (751): n equals a,t,g, or c
gaattggagcacaaattgaaccaagcccctgagaagtggcagcagctgtgggaaagggtaaccgtggaccttaaagaagaaccaagaacagatcgctcccaaagacacctgtcgagatccccaggaattgtgtctaccaacctaccttcctatcagaagaggtctctgctacatctcccagacagcagcatgggggaggaacagaattccagcatctccccatccaatggagtggagcgaagagcagccacgctctatagccagtatacatccaagaatgatgaaaacaggtcctttgagggaacactttataaaagaggggctttgctgaaaggttggaagccccgttggtttgttttggatgtaacaaaacatcagctgcgctactatgactcaggtgaggacacaagctgtaaaggccacattgatctggctgaagtagaaatggtcatccctgctggccccagcatgggagccccaaagcacacaagtgacaaggctttctttgatctcaagaccagcaaacgtgtgttataacttctgcgcccaggatggacagantgcccagcaatggatggacaagatccagagttgtttctctgatgcctgatgcccatggttcaaccccacgcngaaagaaacagaaagaactcntgcttgcccagattagattagaaaaaagaanccttggatcctttgaaggagcttgacaacaatttatccccagggccttgaggttctccttgcccantcccctccttgcaggggtttgcttatatc

SEQ ID NO: 471 - DNA, 1445 bp, Homo sapiens
gcggccgccgccgccgaggcttacccgggaatgtctgggcccgcgcctcgcggcccccaagctccacgctgcgcccgctgtcccggcctctaaaggccgccacgtccctgcggcgcgcgcaggcagaaagcggcttcgtgccggcggagggggcccgggcgggccgggaggggctgccccaggccctgcgcctaccccatcaccgcggccggcgccgggccgggaggatgcgcggtgtggggctctgaagcatggagggggtgttgtacaagtggaccaactatctcacaggctggcagcctcgttggtttgttttagataatggaatcttatcctactatgattcacaagatgatgtttgcaaagggagcaaaggaagcataaagatggcagtttgtgaaattaaagttcattcagcagacaacacaagaatggaattaatcattcctggagagcagcatttctacatgaaggcagtgaatgcagctgaaagacagaggtggctggtcgctctggggagctccaaagcatgtttgactgatacaaggactaaaaaagaaaaagaaataagtgaaaccagtgaatcgctgaaaaccaaaatgtctgaacttcgcctctactgtgacctcttaatgcagcaagttcatacaatacaggaatttgttcaccatgatgagaatcattcatctcctagtgcagagaacatgaatgaagcctcttctctgcttagtgccacgtgtaacacattcatcacaacgcttgaggaatgtgtgaagatagccaatgccaagtttaaacctgagatgtttcaactgcaccatccggatcccttagtttctcctgtgtcaccttctcctgttcaaatgatgaagcgttctgtcagccaccctggttcttgcagttcagagaggagtagccactctataaaagaaccagtatctacacttcaccgactctcccagcgacgccgaagaacctactcagatacagattcttgtagtgatattcctcttgaagacccagatagacctgttcactgttcaaaaaatacacttaatggagatttggcatcagcaaccattcctgaagaaagcagacttatggccaaaaaacaatctgaatcagaagatactcttccatccttctcttcctgaagaaactgaagtgtccaacttcctctaagtattgctatgcaaaagctgctgtaattaaactattgttatagggagtagttttttcccttaggactctgcactttatagaatgttgtaaaacagacaaacaagaaaacaaaccacatacttttgaagygtrttttatctttatatagtttggtttgcaagagtattttcctaataacttcacagtatgaatgtgcatcytttttttttkracaaakgakggggaacattttgacaccataagggcaatgtagatattttcct

SEQ ID NO: 472 - DNA, 487 bp, Homo sapiens
  SITE (4): n equals a,t,g, or c
  SITE (31): n equals a,t,g, or c
actnacgggcagctctcgttcctcacctgtnccatccctcttgcakttcaacagcatgatcctttactgtgtgcccaagctgcggctcatgggccagaagttcagcgtccgggagaagatggacatctcaggcctccaggtgcaggatatcgtcaagccaaacacagcacatacattcatcataacgggaagaaaaaggtccctggagctgcagacgcggacagaggaagagaagaaagaatggattcaratcatccaggccaccatcgagaagcacaaacagaacagcgaaaccttcaaggcttttggtggcgcctttagccaggtatgaggaccccagcctctttccagacatgcctattcacgagcaccagccctgtgggagcctgtggtgaccaccgaaggcagttcgggtgcagcagggttcgagcccagaaaattatgcctcttaagaccagacgtggacaagggaggaagtcagagctgt

SEQ ID NO: 473 - DNA, 614 bp, Homo sapiens
gagagacaaaagggcacaggctcgtcctttgacacgctacctgcctgtccgggagaagactttgatttgcggaccatgtagagactgctggccacaatattgacacctgttaccatgtatcaatcacagagaagacctgccgaggattcctcatcaaaatgggtgggaaaattaaaacgtggaaaaaacgttggtttgtttttgatcggaacaagcgaacattctcttattatgcagacaagcatgaaactaaattgaaaggagtaatatactttcaagccattgaagaagtctattatgatcacctcaagaatgctaataagagtcctaatccgttactcacctttagcgtcaagactcatgwcagaatctattatatggtagccccatcgccagaagccatgcgkatctggatggatgttatagttacgggggcagaaggttacactcacttcttgttgtagtgaactgaggcaacagtccacttcagggcagacggcaatgaatctcttacaagaatgaagccatattcaaccccagatgaggaaaacccaacagatccatcccttgagctgtaaacaytcagaactccttttcatgttcaagacaagttc

SEQ ID NO: 474 - DNA, 1212 bp, Homo sapiens
  SITE (548): n equals a,t,g, or c
  SITE (635): n equals a,t,g, or c
gcagctgggaagtggtggaaggactgaggggggagatgaattacacccaggagccaccagttcagaaaggatttttsctgaaaaagaggaagtggcccttaaaaggctggcataagagattcttctatctggacaaaggaatcttgaaatatgccaagagccaaaccgatatagagagagagaagctgcatggctgcattgatgtcgggctctcagtgatgtctgtaaagaagtcatcaaaatgsatagaccttgacaccgaggagcacatctaccatctgaaggtcaagtcagaagaagtctttgatgagtgggtatcgaaacttcgccaccacagaatgtatcgtcagaatgaaattgccatgtttccacatgaagttaaccactttttctcagggtccaccatcacagactcttcatctggggtgtttgactccatttcaagtaggaagcgtacagttatatcaaagcagaatttatttcaaactggaagcaatgtatcattttcttgtggtggtgagacacgagttccattatggttacagtcnttcagaggacatggaaaaatgctccaaagacctggcgcactgtcatgcctacctggtagaaatgagccagctcctgcaaagcatggnacgtcctgcatcggacatactcgggcaccagctatcaacgccatccaggtcccgaaacctttttctggcccagtaagactacactcctccaatcctaatttgtcaacactagattttggagaagagaaaaattattctgatggctctgaaacctcatcagagttttctaaaatgcaagaagatctgtgtcatattgcccataaagtttacttcactttaaggtcagcttttaatatcatgtcagcggagagagagaaactgaagcagctgatggagcaggatgcctcctcctccccgtctgctcaggtcattggtctgaagaacgccctgtcatccgccctagcacaaaacacagatcttaaagaacgcttacgcagaatccatgccgagtctctgctcctcgactcccccgctgtcgccaagtcgggtgacaatctgggcagaggaaaactccagagatgaaaaccgagctctagttcatcagctttctaatgaaagtaggactctccatcactgactccctttctgagttttttgatgctcaggaagttctgttatctccaagstyttcaggaaa

SEQ ID NO: 475 - DNA, 716 bp, Homo sapiens
  SITE (715): n equals a,t,g, or c
ggcagaagctwacggagctgcwkcgggacctggtgggcatagagaacctcattgctcctggcagggagttcatccgtgagggctgccttcacaagctcaccaagaagggcctgcagcagaggatgttttttctgttctcagatatgttgctgtacacaagcaaaggagttgcagggaccagccacttccggatccggggcctccttcccctccaaggcatgctggtggaagaaagtgataacgagtggtctgttccacactgtttcaccatctacgcggctcagaaaacaatcgtggtggcagccagcactcggctggagaaagagaagtggatgctggacctgaactccgcgatccaagcagccaagagtggcggtgacacggcccctgcactgccaggccgcactgtgkcactcgtccccccagatcccccaacgaggkatctctggagcaggagtcagaagatgatgctcggggtgtccgcagctccctggaggggcatggcagcaccgggccaacaccacaatgcacgtgtgctgggtaccggaacaccagcgtgtccagggcaagaccacagtgcagctgtcgagaaccaagctttcaggatatctgctaagaaagttcaaaaacaagtcatgggctggcagaagctctgggtcgtctttaccaacttctgttttgttcttcttacaaaactcatcagggatgactaccnc

SEQ ID NO: 476 - DNA, 1730 bp, Homo sapiens
ggcggggacccgggctactgcggtgtggactcgagggctgggcgcggggccggcgcagaagccgccagctggagacgatggtggaccacttggccaacacggagatcaacagccagcgcatcgcggcagtggagagctgcttcggggcctcggggcagccgctggcgctgccaggccgagtgctgctgggcgagggcgtgctgaccaaagagtgccgcaagaaggccaagccgcgcatcttcttcctctttaacgacatcctggtgtatggcagcatcgtgctcaacaagcgcaagtaccgcagccagcacatcatccccctggaggaggtcacactggagctgttgccggagacgctgcaggccaagaaccgctggatgatcaagacggccaagaagtcctttgtggtgtcggccgcctccgctacggagcgccaggaatggattagccacatcgaggagtgcgtgcggcggcaactgagggccacgggccgcccgcccagcacggagcacgcggcaccctggatccccgacaaggccacggacatctgcatgcgctgcacgcagacgcgcttctctgccctcacgaggcgccaccactgccgcaagtgcggcttcgtggtctgcgctgagtgctcgcgccagcgcttcctgctcccgcgcctgtcccccaagcccgtgcgcgtctgcagcctctgctaccgcgaactggccgcccagcagcggcaggaggaggcggaggagcagggcgcggggtccccagggcagccagcccacctggcccggcccatctgcggasgtccagtggagatgacgatgactccgacgaggacaaggagggcagcagggacggcgactggcccagcagcgtggagttctacgcctcgggggtggcctggtctgccttccacagctgacccccggcctgcagaacatctgtccccaagccagctccactgcccaggcccccaagagggcagctccagaagctgcccagggctccgggaccccatcccatggtggcaggtgcagcggtggggagtggctctttctggactcccagtgcctttttgctggacactgtgtccttatggcttcactgcaggtaatgcctttcccttcaggaagccccagaacacccacaggtcttggtaacaaacgccaccttacactctgcaggctgcagcggcagytccagatggcctcctgagctggacgaccccaggtctccagacatctagggaccagagcagktttgggaacacagagggaagacaggatgggagtgtagccacagaacccacctgcaccctgacaggcacaccccactgaagagcctgagtcccaggaggcctcctggaagcccaggactgcccacccaccacgctggtgcccaccgcctggccagccaagccctgccgatcagacatgtgggctccccgaagcccagccagagactgccgtgctgtgggtgccaccaggcccagggactgcagcctgagctccccgaggcccagggcagccgggtgaggactctgtcctgtgtcacctctctccaggtgtccagctgtctcatgcctttttgtcctgtcctcagctctccgtgtggtcagcgaaaccattgttttctgttaggactcagttgcaagaacagaaaccctgcccccacttaataataaaaaagaaagtttattgatgggtggttgcaaaacaaaaaaaaaaaaaaaaaaa

SEQ ID NO: 477 - DNA, 417 bp, Homo sapiens
gatggcgtccatcatggaagggccgctgagcaaatggactaacgtgatgaagggctggcagtaccgttggttcgtgctggactacaatgcaggactgctctcctactacacgtccaaggacaaaatgatgagaggctctcgcagaggatgtgttagactcagaggagctgtgattggtatagacgatgaggacgacagcaccttcacaataactgttgatcagaaaaccttycatttcaggcccgtgatgctgatgagcgagagaagtggatccatgccttagaagaaacaattcttcgacatactctccagcttcaaggtttggattcaggatttgttcctagtgtccaagattttgataagaaacttacagaagctgatgcttacctacaaatcttgattgaacaattaaagctg

SEQ ID NO: 478 - DNA, 461 bp, Homo sapiens; identical to SEQ ID NO: 55

SEQ ID NO: 479 - DNA, 601 bp, Homo sapiens
  SITE (574): n equals a,t,g, or c
  SITE (597): n equals a,t,g, or c
cttttttttttttttttgatctttttgctgattttattatactatatagatttgtatttcttgtgatctgagaaacatcaaaattctattttaaatttgttcttaaaaatatacaatattgcactttaatttttggcagcttaacaggaatgaatgagtacaaaaaatcatacaagaaactagaatttttattttgcttcataataagagctttgtgaaaaacaaaacttacagtagtgccaaataaaccaaatatttacagtatagatattaaagtcttacctctaaaggaagattcagtgtattggatgtaaatattattaatataagaaaagtcacccccactgcccaattctgctgaacattttaagccaaagagtattggtgagaaatgcttctgtgatttctttctcaagacatacatggaagggatgcttgttcttggagcatctaaagtgggtcattaaacttttacaaaaatgtttcctccataacttaaaaaaaacctctactctaagccaagaatccaaggtaagcttattttttaatttttaaaggtcctccggtagttacncccccctttttttaaaataaatngaat

SEQ ID NO: 480 - DNA, 1192 bp, Homo sapiens
ggcacgagcggcacgagttagcagatgttttttctcccattactccaatttctacttaagtaggagcttttctgaggtttctgttggagtgaacctataatacttagtcatggattactatgtgggtggtgatttactgaccctgctcagcaaatttgaagacaagcttccggaagatatggcgaggttctacattggtgaaatggtgctggccattgactccatccatcagcttcattacgtgcacagagacattaaacctgacaatgtccttttggacgtgaatggtcatatccgcctggctgactttggatcatgtttgaagatgaatgatgatggcactgtgcagtcctccgtggccgtgggcacacctgactacatctcgccggagatcctgcaggcgatggaggacggcatgggcaaatacgggcctgagtgtgactggtggtctctgggtgtctgcatgtatgagatgctctatggagaaacgccgttttatgcggagtcactcgtggagacctatgggaagatcatgaaccatgaagagcgattccagttcccatcccatgtcacggatgtatctgaagaagcgaggacctcatccagagactgatctgcagtagagaacgccggctggggcagaatggaatagaggatttcaaaaagcatgcgttttttgaaggtctaaattgggaaaatatacgaaacctagaagcaccttatattcctgatgtgagcagtccctctgacacatccaacttcgacgtggatgacgacgtgctgagaaacacggaaatattacctcctggttctcacacaggcttttctggattacatttgccattcattggttttacattcacaacggaaagctgtttttctgatcgaggctctctgaagagcataatgcagtccaacacattaaccaaagatgaggatgtgcagcgggacctggagcacagcctgcagatggaagcttacgagaggaggattcggaggctggaacaggagaagctggagctgagcaggaagctgcaagagtccacccagaccgtgcagtccctccacggctcatctcgggccctcagcaattcaaaccgagataaagaaatcaaaaagctaaatgaagaaatcgaacgcttgaagaataaaatagcagattcaaacagggcttcgagggggggggcccggg

SEQ ID NO: 481 - DNA, 572 bp, Homo sapiens
tcctgatgtgagcagtccctctgacacatccaacttcgacgtggatgacgacgtgctgagaaacacggaaatattacctcctggttctcacacaggcttttctggattacatttgscattcattggttttacattcacaacggaaagctgtttttctgatcgaggctctctgaagagcataatgcagtccaacacattaaccaaagatgaggatgtgcagcgggacctggagcacagcctgcagatggaagcttacgagaggaggattcggaggctggaacaggagaagctggagctgagcaggaagctgcaagagtccacccagacccgtgcagtccctccacgggtcatctcgggccctccagcaattcaaacccgagataaagaaatcaaaaagcttaaatgaagaaagtctttatttttatgaagaggaattggtcagacgtgaggsctcccatgtgctagaagtgaaaaatgtgwagaaggaggtgcatgattccagaaagccaccagctggccctgcagaaagaaatcttgatgttaaaagataagttagaaaagtcaaagcgaga

SEQ ID NO: 482 - DNA, 1201 bp, Homo sapiens
  SITE (51): n equals a,t,g, or c
  SITE (1020): n equals a,t,g, or c
  SITE (1098): n equals a,t,g, or c
  SITE (1110): n equals a,t,g, or c
  SITE (1117): n equals a,t,g, or c
  SITE (1132): n equals a,t,g, or c
  SITE (1176): n equals a,t,g, or c
caccccagctgatggggtctgccagctgggttcggaagcctgcactctganatgctgggtgccctgtcaccaggtgtgcttctgccccgttcccagcctgcccctcccctgaatgcctgtcctargctgtgtgcactggtcgggctgggcarcctgggacccagctgggcacctgttctcccattaacacagggtgccctggtcctggtccccgttcctgccttgaggcctgccaccctcctgccctgccctccaagggtatggggggcctgggcagtgctcaacctctgcccagccttgaccarakaccttgctaattgacaatggacaatsstggtgcccagcccagactctggggtggggcagtgcttgagggggtccttgactgtgggacctgaggggctctctggcagctcctcacgtgtgcacatcaccttatagtcacccttcatcctgggtcattgagagtcctgtctgcagccagatgccagcaggctgtggtcctgtagtccctgagccatggaggcagggtgggctcatcctgtgcaccttgttccacagtctccctctttcccaatttacaagaagaccaataagaaaaataagaaaacaagaaagaaaaaggaaaaataaagttatcacctcctggtagcagggagggtctctcagagctgggctgcactacctcctgtcgcctgctggggctgctgtgagggcagctttgcgtctcagctgttgagggttgtctccgtgctcctgcacccctcatgtccctccctcccagagctgcctctgtggggggctggtggcttgctgctctctgacatcagtcctgcctggagaccccttggagatccaggtgctttgaaggtcttgagcacacttgagggtgtgctgggagtggggagcgaagctcatgactgtcccgtctgcccacctctgcagctcagcccacccttcaagccccaggtcacgtcggagactgacaccaggtattttgatgaggagttcacggcccanatgatcaccatcacaccacctgaccaaggtgaggggccactgcctgcccccgccactcccttttctctccacactcanagaggcctgcantgttcancttttttggcttcanatgttttaaaaatctaaatatttaaaaaggttccttttggaaantgccaatgatcaagggtgggaagca

SEQ ID NO: 483 - DNA, 793 bp, Homo sapiens
  SITE (332): n equals a,t,g, or c
ccgactcactatagggaaagctggtacgcctgcaggtaccggtccggaattcccgggtcgacccacgcgtccgcttcctggcgtgcttcagcgtggtgcagcccagctcctttcaaaacatcacagagaaatggctgcccgagatccgcacgcacaacccccaggcgcctgtgctgctggtgggcacccaggccgacctgagggacgatgtcaacgtactaattcagctggaccaggggggccgggagggccccgtgccccaaccccaggctcagggtctggccgagaagatccgagcctgctgctaccttgagtgctcagccttgacgcanaagaacttgaaggaagtatttgactcggctattctcagtgccattgagcacaaagcccggctggagaagaaactgaatgccaaaggtgtgcgcaccctctcccgctgccgctggaagaagttcttctgcttcgtttgagcagctatggctgcatagcaagtagtaggcaggaggccaaagacttctgagacctggggcacccgggcctttgcggcagctactggcagggcctggccacctcataggactcagttcccttctgaacactcgggggacatgggcctytwactgcccactctgatatgcctgggtgagcctaggagggaaggctctgatttggatttctccagtcaaagctcacagaaaaaaacctggcactttgatcatccctttcctcaaggtcacacagcctagaagctagagcagtgcaggtctgcaaataaaaccttaagtctgtgaaa

SEQ ID NO: 484 - DNA, 1999 bp, Homo sapiens
  SITE (1968): n equals a,t,g, or c
  SITE (1980): n equals a,t,g, or c
ggaaagggctgcaasgttgtggtttgtggattgttatctgtggggaaaactgcaattttggagcagctcctttatggaaatcatactattggaatggaagattgcgaaacaatggaagatgtatacatggcttcagtagaaacagaccgaggagtaaaagaacagttacatctttatgacaccagaggtctacaggaaggcgtggagctgccaaagcattatttttcatttgctgatggcttcgttcttgtgtacagtgtgaataaccttgaatcctttcaaagagtggagcttctgaagaaagaaatcgataagttcaaagacaaaaaagaggtagcaattgtggtattaggaaacaaaatcgacctttctgagcagagacaagtggacgctgaagtggcacagcagtgggcaaaaagtgagaaagtaagactgtgggaggtgactgttacagatcggaaaactctgattgaaccattcactttattagccagtaaactttctcaaccccagagcaaatcaagctttcctttgcctgggaggaaaaacaaagggaactctaattctgagaactaaaaatcagtaatttccacaattgtatgttgaatagtgattgcctttaagtgtctgtgaacatggagtaatattactatttaaaataggccatttgtrtctacctttggtccttaggaaaattcctaaggaagtcaattaatgcactttagatgttaaaagtatttgggctaaggttattattgcctgatatgaaataatatattcttattctcattgtttgaaacctgtctttgaaattagcacctttgttatttatgttgtacttgtgaaaacagtaaaatagtttggatagttatgcaaatgcacctatgtgtaacttccccccaaccccaagctgtttcggaagatatcataatcattctgtgtaacattatgcaaacttctaagcccaaacatgactttgtttttaaaaagttcattaatctaatgtctaggattataaaacatttttttgtgtctaaattggacccaaaacattgaacagtttggggtagtaagctaaatttcatcttgtggagattttgctaaacagactaagacccatgatttagctttgctcaaattagaatgtttagcatgagttgaggtaccaggtagtgttaagtaggttcatcacgctctaaggccgttttttccttagccagacccctgttgatagaccagatacttgagggcaaactgtttgctcctcctcttgaaaatgattaggcacttaaggacagtaaagctgtattttctggaaggaagactgtatcttctggaatagttttctagaaaactagtcatatacaataaaagtatcaaaaatattgggctctaatttgatctgacttagatgtctgagtttgtgttgtttctctaaagattttggcaagactcaagcaatgtggctgactgtaactttattaatttaaaaggtaggaagtaagctacttagtggtttcacctgtgaaataactattttgactgaaatgtaaaataagctattcaacaaagaacatattaaaacatcaagtaatttgtaacatcttaaatggaatacttttttcatgagctctagtgaagaactactacatataaaagacgatacttacaaatcagctattgctgctacagtataattcttcaaaatttctcatcataaattcattttttggtaaaaaaaaattaccagacactaactcacccccttacccttttcccccggttattgaatattaatctagcttcccacccatggcatgttacataggtgggacaaatggctttcataatgatttttaaataagtaccttccagtttgctttgtttcctactaatggcaacttaggtctatattagtacaaacaggtacccattctttttaaattctgtaatggatgtatgtgtatnccggtaaggttnctctggaaggggacggtac

SEQ ID NO: 485 - DNA, 584 bp, Homo sapiens
  SITE (425): n equals a,t,g, or c
  SITE (475): n equals a,t,g, or c
  SITE (532): n equals a,t,g, or c
  SITE (533): n equals a,t,g, or c
ggaggccgagggctgccgctaccaatttcgggtcgcgctgctgggggacgcggcggtgggcaagacgtcgctgctgcggactacgtggcaggcgcgcctggcgccccggagccggagcccgagcccgagcccacggtgggcgccgagtgctaccgccgcgcgctgcagctgcgggccgggccgcgggtcaagctgcaactctgggacaccgcgggccacgagcgcttcaggtgcatcaccaggtccttttaccggaatgtggtgggtgtcctgctggtctttgatgtgacaaacaggaagtcctttgaacacatccaagactggcaccaggaggtcatggccactcagggcccggacaaggtcatcttcctgctggttggccacaagagtgacctgcagagcacccgctgtgtctcagcccaggnaggccgaggagctagctgccttccctgggcatggcctttcgtgggagacntcggtttaaaaacaactgcaatgtgggactgggcctttkgacacccttcgctgatgnntattccagcaggccctggcagcagggggggacattcaagcttagaagaggg

SEQ ID NO: 486 - DNA, 1385 bp, Homo sapiens
  SITE (1363): n equals a,t,g, or c
ggcggcgggggcggggcctggaggagcctacaccgactctggaggaagactggagcctttgcggcggcgctgcccctcccctggtccccgcgagctcggagggcccggctggtgctgcgggggccccgggaggttgaaaactaagcatggggaagagctgcaaggtggtcgtgtgtggccaggcgtctgtgggcaaaacttcaatcctggagcagcttctgtatgggaaccatgtagtgggttcggagatgatcgagacgcaggaggacatctacgtgggctccattgagacagaccggggggtgcgagagcaggtgcgtttctatgacacccgggggctccgagatggggccgaactgccccgacactgcttctcttgcactgatggctacgtcctggtctatagcacagatagcagagagtcttttcagcgtgtggagctgctcaagaaggagattgacaaatccaaggacaagaaggaggtcaccatcgtggtccttggcaacaagtgtgacttacaggagcagcggcgtgtagacccagatgtggctcarcactgggccaagtcagagaaggtgaagctgtgggaggtgtcagtggcggaccggcgctccctcctggagccctttgtctacttggccagcaagatgacgcaaccccagagcaagtctgccttccccctcagccggaagaacaagggcagcggctccttggatggctgaagagctgccgttcctctttcacgatcccagccccatttcagtgtctggggctctggtagatgtgttgagggcaaagtagaggacaagctgtctttcccagtcagccagggagctccccgccaggccacgccccagccactttgctccctctcacctctgggaagtgcaaatactcttggttgacatccccttcctcagccctcccagcctactccccatcccagcttttagaggatctgctccactgtctcctggggcagttgtgggtcactgtcccttccagctgccccagacaggaagcagagtcaccacgcagcagtgtcccttcttgggtctgagttcctattataggtaggggccccaccctctgggcttcccatcagcgacacacacacacttatggcaccagcctggactccagaaaaagggtgtccaggtattgtgtgtatgcatttagttgtgcacacacaaatatgctcctatactggcattaggcgtctcctcatccctcaccctgacctttctcctgtccttttcttggctggaagaagttggcctcctgggagtgtagttttctgttttaaatccccaccctggctgggtcatggtcacctgtatcccagactttgggaggccaggcnggtcgattacttgagggcagga

SEQ ID NO: 487 - DNA, 1127 bp, Homo sapiens
  SITE (8): n equals a,t,g, or c
  SITE (48): n equals a,t,g, or c
  SITE (55): n equals a,t,g, or c
  SITE (64): n equals a,t,g, or c
  SITE (80): n equals a,t,g, or c
tcacgacnttttaaaaccacggccagtgaattgtaataccactcactntagggcnaattgggtnccgggccccccctcgngttttttttttttttttttaattaaacccagtaagatgtacagaagacaatgaggcagtaaaaagtactgcttccaacagacagaggtgaaaggtcaaatgaggggccacagcaaagaggtcactagcagccacagccttctctctggggttggggttcactggttagccggcctccctgcggggctgaaggtttgtgttgtacaccagactcagcagcattcagatccaagcttccatcctgaatgttctgatagattttcttggcagcctcaaggaaggcatcttctacattctctcccgtttttgcactcgcttcgaggaacaataagccattttcttcagcaaactgtttggcttcttcatatgtaacatctctctgtgcctccaaatctgctttatttcctatgagaattattacagtatttggattggtgagattccttgcatctgtcaaccagctgcttaagtggttatatgtacttcttctagtgatatcatagaccataagagctcccgcagctcctctgtagtagctccgtgtaacagccctaaatcgctcctgtcctgccgtatcccaaatctgcagttttattttttggccactaacttcgattattcttgtaccaaattcaacaccaattgtgtgaggacaatcagccataaattttttttctgtaaattgatgaagcaagcaagattttcctactcccatgtccccaataataatatatttaaagatgtaagagtagttgtatggtgcagttgccatggtggcactggggggttgctggtggctgggcagctttccgggcgggaggggggcgtcaggaccaggaacaggagtgcggacgcagcgggagagggggcgggggcggtcgaccgaggcgccggcaggtacactggcaggccgagaggtgcagacgcgccggcagcagtagcggcagtagcagtggcagcggtgactgctcctgtgctccctcagtatcttcctcgggctggtccaagatggcggcgctccctgcacagggtttcccggacgcgtggg

SEQ ID NO: 488 - DNA, 1000 bp, Homo sapiens
ggaagatcggtagattgagtggctagagaggtcggaggtaagtggctatagaagtcgggcggacccggaacccagaggacgcgacaccatgacttatgcttatctcttcaagtatatcatcatcggagacacaggtgtggggaagtcatgtctcctcctgcagtttacagataagcggttccagcctgtccacgacctcacaataggtgtggagtttggagctcgtatggtcaacattgatggaaaacaaatcaaactgcaaatctgggatacggctgggcaagaatccttccgttctatcacccgttcctactacaggggagcagctggagcactgctggtgtacgacattacaaggcgtgaaaccttcaaccacctgacctcatggttagagggatgcccggcagcactstagttccaacatggttatcatgctcattgggaataagagtgacctagagtcccgcagggatgtgaagagagaagaaggagaggcctttgctagggagcatggacttatattcatggaaacttcagccaaaacagcctgcaatgttgaagaggccttcattaacacagccaaagaaatatataggaagatccagcagggtttatttgatgtccacaatgaggcaaatggcatcaagattgggccccaacagtcaatttcaacatcagtgggacccagtgcctcccagcggaactctcgtgacatagggtccaactctggctgctgctgaacatctggcttgaactttttttgtccttcctggaatagcttcagatcaataggcttaatgaaagaggtctttcttgctttggctgagagcagcctctttttaaagtgtgatgttttgcctttccacctaaagaccaggagagaatttgggcccttactgacctgtcctccttcagggacatgagcattccctatagattagggttcttcttatcctcctatacaaatttcttaaattgttaggatcaaagttgattatca

SEQ ID NO: 489 - DNA, 2734 bp, Homo sapiens
cggcaactgwgaggaagcaaagggaaaaaaactccattaaaaagcccagctttcctccatgttagatgtgacttggaaaatgagaaagatttagcaaaattccaccgtatcttttgccaggctagagacagggagagcagagtaaaaccctcaggctgctgaaatttctaggctgttaggaagcccctcgaattctgtgaaaatgagggtttcttaactcacactgagagcggaaaggggcagacccttttcataactccctcaagtgtgtgttacctttctttaccagcatggtaagcaacaggacatatcccagcctcggacatgtctgtatgatccaaggtacccaaagtcagacagagtaaactcaagcctggcactggctttctgccgcttcatgtgctttggaaaaagcaggagaagcaatagcagcaggagtccccagcagctggagccgcaagaatgaactgcaaagagggaactgacagcagctgcggctgcaggggcaacgacgagaagaagatgttgaagtgtgtggtggtgggggacggtgccgtggggaaaacctgcctgctgatgagctacgccaacgacgccttcccagaggaatacgtgcccactgtgtttgaccactatgcagttactgtgactgtgggaggcaagcaacacttgctcggactgtatgacaccgcgggacaggaggactacaaccagctgaggccactctcctaccccaacacggatgtgtttttgatctgcttctctgtcgtaaaccctgcctcttaccacaatgtccaggaggaatgggtccccgagctcaaggactgcatgcctcacgtgccttatgtcctcatagggacccagattgatctccgtgatgacccaaaaaccttggcccgtttgctgtatatgaaagagaaacctctcacttacgagcatggtgtgaagctcgcaaaagcgatcggagcacagtgctacttggaatgttcagctctgactcagaaaggtctcaaagcggtttttgatgaagcaatcctcaccattttccaccccaagaaaaagaagaaacgctgttctgagggtcacagctgctgttcaattatctgaggttgtctgggacctgcctccaccccatccagggatgagaatggcagccaatctctgtggccaagctccagccaaaaaggagggcacgaccagaaaggaactccctttgcacgkaggcttgccccatcaccctctgagccctcccaacacagcacactagtcagcccactgccacgacctccctgccagccagaagcatccgtactgcacgctgtctgagaatgctgggcctggattgcagacagtgccgctgctgatcgcatcaaaaacaaagtcaaaggccatctcacattttacaaatccccagctcatgaacgtgaagctgataggaaatcaccccagggaacccgaaaaagaaacttgattcctctattgctggccttacttgatgtcttttataaaacttgggactacaatactaacctttttttctgaatctgctgttctacccatgtgtctcacattcatttgtattatttcaagaaatgtactaatttccagttcactcaggccttactaatccataccaaattagcctaaagacaaggcattttatattcatttctattttcagcatgtttctaccaaagctattagaaccaacacgtacctctgaatgcccgattataagaagacatgagaagactttaaaagttttggaaatttacagagccatgatttttgaacctaattgaaagaaaaccatctgaattgttgcaggtccacatttttgccaaagatacactctatagatgcttagtagtggcctgatttttttccatgtattgccacgacaaactaaaaatgaactgtgtttaagaatgtagtatttctgtttttcatccaagttgattgggggaagaatatggcaggatccatcttttacagtattttgtattcagtaaagtggacattcctgctcctcccttcccccattgcatgccctcttcctcccttgatttcactttctctcatgcccggatccttttattctccccagttataacccagttataaaagaaagatctgagcataaagatacgtgtttaaaaataactaaaagtaaaggaaagtgccttaatttttctatttgcttcaactgaaagtgcttctcagctcgccccatgtaagttctcattccatgtaaatgacattttccagttacaactggtactgagattttgcctctctctttccttactcatcctcccaaatgtctttgtgggagccatatcagtggataccaagctctgtatccatttgtcccctgccctccacaatgtgtgacatagaacagggactttggccctgggaaagcaaaagctcccagtaaggaatcctgtgcccaatgatgtaaaacaattccaaacatccaggaatttttgtatcatagagcgaattacttcctatcttttcattagaggctatgaggacttctaattagtctyagttgcttataagtgccctggaatcacccaggtaggcacttaatttttttttcagttgcatgagcaaagtgcttcttagtagtgtgaaattacaacaactttaagactttccagattcaagctcccactgttggaaaaagccagcctttctaatctcttctgctactggaataagcact

SEQ ID NO: 490 - DNA, 688 bp, Homo sapiens
  SITE (579): n equals a,t,g, or c
  SITE (610): n equals a,t,g, or c
  SITE (669): n equals a,t,g, or c
gctctacgctctttcccctccccctcctgtaacttcctcttcttccccggttgggccctctgctcctctgcactctcctccccagttcgcagatttccgcccaccttccgcctcgtctagccgcgccacagctagcggggtgatctttccccccctctggtaggagttggtgaaggtgagactcatgagggaatacaaggtagtggtgttagggagtggaggggttggcaaatctgcccttactgtgcagtttgtcactgggactttcattgagaaatatgaccccaccattgaagatttctaccgcaaagagatcgaagtggactcttccccctccgtgctggaaattctggacaccgcaggaactgagcagtttgcctccatgagagatctctacatcaaaaacggccaaggtttcatcctggtttatagcctggttaatcaacagtcttttcaggatatcaagccaatgagagatcaaattgtcagagtgaagagatatgaaaaagtcccactaatcckagtaggaaataaagtggatctggaaccagaaagagaggttatgtcttcagaaggcanagctctggctcaagaatggggctgtcctttnatggagacatcggcaaaaagtaaatcaatggtggatgaactttttgctgagatcgtcangcaaatgaactattcatcc

SEQ ID NO: 491 - DNA, 1361 bp, Homo sapiens
  SITE (591): n equals a,t,g, or c
ggcacgagccgcgggagtcgcggcgctgcgggtaggagccgggttgcgggagaccccaggttcggttgggattcccagccagaacggagcttaagccgggcaggcgagcgaatgacggagtagcgagctgcacggcggcgtgctgcgctgttgaggacgctgtcccgcgcgctcccaggccgccccgaggcttggggtcttcgaaggataatcggcgcccggggccgaacagcgggggcacacggggcgctgccgaagtgcaaggccacggccagagctcgagcccgacgcgctgtctggagtcgtaggttggcgccgtttggggtcggggtctgaggcttgggcgctgcctgggccgagcggagatcggggtttgcctcccgtccccgctcaggaccctgacgtggctgaagcggccccgggagcatgagcgggcagcgcgtggacgtcaaggtggtgatgctgggcaaggagtacgtgggcaagactagcctggtggagcgctacgtgcacgaccgctttctggtggggccttatcagaacaccatcggggccgccttcgtggccaaggtgatgtcggtcggagaccgnactgtgacattaggtatttgggacacagcaggctctgagcgctatgaggccatgagtagaatctactatcggggtgccaaggctgccatcgtctgctatgacctcacagacagcagcagctttgagcgagcaaagttctgggtgaaggaactgcgcagcctagaggagggctgccaaatctacttatgtggcaccaagagtgacctgctggaagaagaccggaggcgtcgacgtgtggacttccacgacgtccaggactatgcagacaatatcaaagctcagctctttgaaacatccagcaagacaggccagagtgtggacgagctcttccagaaagtggcagaggattacgtcagtgtggctgccttccaggtgatgacagaggacaagggcgtggatctgggccagaagccaaacccctacttctacagctgttgtcatcactgagtcagcactcacctggcctgggggaattaaaggaattccccgtaagggctggacccagctcctttctgggcttgggtagtcaaatgtctgagctaccccaggtcctcatgtcagcagagtggcgcctgcctgtgctggcccatggaacggagacagcattgggctgactgtgggcatgaggagggataaggctgatttggaccccaggcttctgccctggacagcacttgtgtctgcagattatttaagtggcttttgatctgtaaataaaatcagtgcactgtgaatcacaaaaaaaaaaaaaaaaaaaaaaaaagtcgacc

SEQ ID NO: 492 - DNA, 690 bp, Homo sapiens
  SITE (668): n equals a,t,g, or c
  SITE (676): n equals a,t,g, or c
cgcgtcctgccgcagtccctccgccgctagtcggagcgagcgcgagtgaggagacccccgccgggccactggcacttgcttctgcggcgagtcccacccacgaccgcagcccagcaactcgcaaacgcaacctgaagcctgggctgcgcagtgtgggagggcttcgcgatcttgggggacccattccgaacttgcagaggaccgtagctctcctggcctggagagtgtgaacaggattgtggactcttccaagattcacaatgatatggtgaatccaaagactggaaccaaaaagatttactcagtgctttagttttaacaacagtaaattgtctaccaacacccatcatggctaaaagtgcggargtcaaactggcaatatttgggagagcaggcgtgggcaagtcagctcttgtagtgagatttctgaccaaacggttcatctgggaatatgatcccaccctcgaatcaacctaccgacaccaagcaaccatcgatgatgaagttgtttccatggagatactagacactgctggtcaggaagataccattcagrgggaggggcacatgcgrtggggggaaggctttgtgcttggtctacgacattacttgaccgaggaagtttttgaaggaagtgcttgcacttaaggaacatcctagatgggatncaaaaagncccaagaatggtga

SEQ ID NO: 493 - DNA, 1316 bp, Homo sapiens
  SITE (1281): n equals a,t,g, or c
  SITE (1299): n equals a,t,g, or c
acgggcacgccaggcgccgttgccacccgggatggcgaggcccccgagcgctccccgccctgcagtccgagctacgacctcacgggcaaggtgatgcttctgggagacacaggcgtcggcaaaacatgtttcctgatccaattcaaagacggggccttcctgtccggaaccttcatagccaccgtcggcatagacttcagsaacaaggtggtgactgtggatggcgtgagagtgaagctgcagatctgggacaccgctgggcaggaacggttccgaagcgtcacccatgcttattacagagatgctcaggccttgcttctgctgtatgacatcaccaacaaatcttctttcgacaacatcagggcctggctcactgagattcatgagtatgcccagagggacgtggtgatcatgctgctaggcaacaaggcggatatgagcagcgaaagagtgatccgttccgaagacggagagaccttggccagggagtacggkgttcccttyctggagaccagcgccaagactggcatgaatgtggagttagcctttctggccatcgccaaggaactgaaataccgggccgggcatcaggcggatgagcccagcttccagatccgagactatgtakagtcccagaagaagcgctccagctgctgctccttcatgtgaatcccagggggcakagaggaggctctggaggcacacaggatgcagccttccccctcccaggcctggcttattccaagaggctgagccaatggggagaaagatggaggactcactgcacagccgcttcctagcagggagctatactccaactcctacttgagttcctgcggtctccccgcatccacagggagggtaaaacacttagcttttattttaatagtacataatttaataccaaaaaaggcgcctggatccccaaaaaaccgaggctgggagctagtggcccttttgctttctaggacttgggsggccggccctccctcctaagcataacaaaggtggtgttgctccagctcagccccaggggacacagatgcactttgggggtgagggcaggtaatgactccatcgcaccctcagttcagctggacagaggctcaggtgaccccagccttcactgtctcccgctctccaggagcttatcttcgccccatctcccaaataagtgggcccttgtgctgtgaggaagaccaaagcctcagggaagataagagatatggagatgggagggggaggacaaggggcagagagtagggtytagctggytatctntgggcttwattaacaccnccctgggaggcatgccc

SEQ ID NO: 494 - DNA, 1057 bp, Homo sapiens
gccgctttgcacgggcacaaagacttccacccccgcgtcacctgcgcctgccaggagcaccggacaggcaccgtgggatttaagatctccaaggtcattgtggtgggggacctgtcggtggggaagacttgcctcattaataggttctgcaaagacacctttgataagaattacaaggccaccattggagtggacttcgagatggaacgatttgaggtgctgggcattcccttcagtttgcagctttgggataccgctgggcaggagaggttcaaatgcattgcatcaacctactatagaggagctcaagccatcatcattgtcttcaacctgaatgatgtggcatctctggaacataccaagcagtggctggccgatgccctgaaggagaatgacccttccagtgtgcttctcttccttacccctgctcagtatgcgctgatggagaaagacgccctccaggtggcccaggagatgaaggctgagtactgggcagtctcatctctcactggtgagaatgtccgagaattcttcttccgtgtggcagcactgacctttgaggccaatgtgctggctgagctggagaaatcgggggctcgacgcattggggatgttgtccgcatcaacagtgatgacagcaacctytamctaactgccagcaagaagaagcccacatgttgcccatgagggctgaggagactgttcagagactgcccagccctagggcactgtgccaccctcattcctccagagcttgacccctggacatttgcactgactttatccagaccaaagagctgcctcttggtggcagtattcccacagaggggtagctgggatcatgctagtcacttcctgcccccaggcaccgtgccaaagactggatgccccctactcctcaggggactgtccagggcgcccagtggtagtgagggagagtgtctctgttcttttgctcagcctgctgggccctttgtgtttgaggatgcttaatgattccagcctctcactgtgccttatgcattaaaatttctttgttacgagcaaaaaaaaaaaa

SEQ ID NO: 495 - DNA, 752 bp, Homo sapiens
  SITE (563): n equals a,t,g, or c
  SITE (606): n equals a,t,g, or c
  SITE (721): n equals a,t,g, or c
  SITE (746): n equals a,t,g, or c
aaactggctcaaagaattacggaaaatgttgggaaatgaaatctgyttatgtatagttggtaataaaatagacttggwaaaggagagacatgtttccattcaagaakcagagtcgtatgcagaatctgtgggagcaaaacattatcatacttcagccaaacagaacaaaggaattgaggaactctttcttgacctttgtaaaaggatgatagaaacagcacaagtggatgagagagcaaaaggcaatggctctagtcagccgggaactgcaaggcgaggtgtacagattattgatgatgaacctcaagcccagaccagtggtggagggtgctgttcttctggataactgttcacgcctaagaaattaaaagacagaacaaaactgtggatcattgccctcaacatgaagactgccatattccaagtcacattattttaccaatggaattatagaattaacagtattttaaattacgtttataacactgcagagaccttaagtgctaaacttagtggagtttgtgaccagagaattggcattttctacaaatgtttttttttgntttttttttgktttttttttgtttttttttgagacggagccgnctctgtcacccaggctggagtgcactggcttgatctcggctcactgcaagctccacctcccaggttcacgccattctcctgcctcagcctcccgagtagctgggactataggcgnccaccacgacgccgggtaatttttngaattt

SEQ ID NO: 496 - DNA, 626 bp, Homo sapiens
  SITE (454): n equals a,t,g, or c
  SITE (587): n equals a,t,g, or c
  SITE (610): n equals a,t,g, or c
  SITE (623): n equals a,t,g, or c
atccgggtggctgcaggctgctggcttctgcggctgcggggtcggggtcgcggccagggccaagccgcagcgagttcacaggcggaacccctgcaggcggcgccccctacgcgaggtcacccctgggaaggagcgcagcccacccggcccctccgcatccgagcaggacgcccgtctcctctccctgaggatttcaggtctccctgtcccaggaggcttgtgccaagatggcatcagctggagacacccaggcaggcccacgggatgcagcagatcagaacttcgactatatgttcaaactgctactgataggcaacagcagtgtgggcaagacttccttcctgttccgatacgcggacgactccttcactcccgccttcgtcagtactgtgggcatcgatttcaaggtcaagaccgtctaccgccatgacaagaggatcaagctgcagatctngggacacagcgggccaggagcgctaccgcaccatcaccacggcctactaccggggagccagggcttcctgctcatgtatgacatcgccaatcaggaatcctttgccgctgtgcaggatggggccacgcaaatnaagaccttactcctggggacaangcccagttcatcnggt

SEQ ID NO: 497 - DNA, 1077 bp, Homo sapiens
ggcacagcgctagtgcccagcgcgccgccgccagtgctgcgggctccgggcaatggatgcccccggggccctggcccagaccgccgcccccggtccgggcaggaaggagctgaagatcgtgatcgtgggcgacggcggctgcggcaagacctcgctgctcatggtgtacagccagggctccttccccgagcactacgccccatcggtgttcgagaagtacacggccagcgtgaccgttggcagcaaggaggtgaccctgaacctctacgacacggccgggcaagaagactatgaccggctgcggcccctgtcctaccagaacacccacctcgtgctcatctgctatgacgtcatgaatcccaccagctacgacaacgtcctcatcaagtggttccctgaggtcacgcatttctgccgcgggatccccatggtgctcatcggctgcaagacagacctgaggaaggacaaggagcagctgcggaagctccgggccgcccagctggagcccatcacctacatgcagggcctgagcgcctgcgaacagatccgagctgctctctacctggaatgttccgccaagtttcgggagaatgtggaggacgtcttccgggaggccgccaaggtggctctcagcgctctgaagaaggcgcaacggcagaagaagcgccggctctgcctgctgctctgacccagggcagacagacctcacgacagcactgacagggcccgggggcccaggtgccgattgcaccagggaggctgccccatcccgaccctccagctcatggtgtctggggcctgcggctagactcttggaacattctggaactctctcctttcctggctggggctctgaccacaaactcccctccaggctgcccctgggacatggtggtgatgtgggtgcaggagccagtgtctgttgtcgggactcgcaagtgccctcatcacagccacccccaccacgagtgtctccccagtgcagactcaagttatgcttgaaatgaaaaagtctatctggtagtgggtaaaaaaaaaaaaaaaaaaaaaaaaaaaaaaaaaaaaaaaaaaaaaaaa

SEQ ID NO: 498 - DNA, 783 bp, Homo sapiens
  SITE (24): n equals a,t,g, or c
  SITE (25): n equals a,t,g, or c
  SITE (675): n equals a,t,g, or c
  SITE (767): n equals a,t,g, or c
  SITE (769): n equals a,t,g, or c
  SITE (770): n equals a,t,g, or c
gtctcaccactgcatttttcgagnnacccatgggcttcttattaatgtttgacctcaccagtcaacagagcttcttaaatgtcagaaactggatgagccaactgcaagcaaatgcttattgtgaaaatccagatatagtattaattggcaacaaggcagacctaccagatcagagggaagtcaatgaacggcaagctcgggaactggctgacaaatatggcataccatattttgaaacaagtgcagcaactggacagaatgtggagaaagctgtagaaacccttttggacttaatcatgaagcgaatggaacagtgtgtggagaagacacaaatccctgatactgtcaatggtggaaattctggaaacttggatggggaaaagccaccagagaagaaatgtatctgctagactctacatagaaactgaacatcaagaaccccaccaaaatattacttttaaaaacaatgacaaaccacacaattgttgttgagtaaaccacgcacaatggcatgtctttctttttctgccagaaaatctattttaagaaaccagaatagtcaacagtgttcaaaagaattgactagttatccytgaggccctttcaaacatgatcaaagatttcccaatgkgatctcatcatcakggatactcaatttgttttttcttatagagnaaatgagtatataagaccatataccaggaggaatatcagtgagttttaaatccggaccagttacctggtcaccattggaggaaaaggggtangnncttaaggggggac

SEQ ID NO: 499 - DNA, 1102 bp, Homo sapiens
  SITE (1068): n equals a,t,g, or c
tctctccctgtgggtatccctgattttggctccatctggtcagacttcctcttcaaattcctggtgattggcagtgcaggaactggcaaatcatgtctccttcatcagttcattgagaataagttcaaacaggactccaaccacacaatcggcgtggagtttggatcccgggtggtcaacgtgggtgggaagactgtgaagctacagatttgggacacggctggccaggagcggtttcggtcagtgacgcggagttattaccgaggggcggctggagccctgctggtgtacgacatcaccagccgggagacatacaactcactggctgcctggctgacggatgcccgcaccctggccagccccaacatcgtggtcatcctctgtggcaacaagaaggacctggaccctgagcgggaggtcactttcctggaggcctcccgctttgcccaggagaatgagctgatgttcctggagaccagcgctctcacaggcgagaacgtggaggaggcgttcctcaagtgtgcccgcactatcctcaacaagattgactcaggcgagctagacccggagaggatgggctctggcattcagtacggggatgcgtccctccgccagcttcggcagcctcggagtgcccaggccgtggcccctcagccgtgtggctgctgagctctgtggagccagctcacctgttctccaggaccagccctgctggggcccaggcccaggctctgagaggccgtgtcctaacctgccctggccccggagaagctacgttgccacctgtcccccttccctggcctggtggggcctggctttggggcaagactgagccacgggggaagggggaatcccgtacctgctgctgcttcctctgtcttggctaacgtctgtccccctgaacccctaaccatatcccaagagctcccaaagcctgagaccagggtcatttgtccccaactccccatctggccctgctgttgctagtacctgttatttattacctggaggcctgtccagcacccaccctacccccataaagcattgtttacacctgwaaaaaaaaangggcggccgtctagaggatcaagcttacgtacgc

SEQ ID NO: 500 - DNA, 1260 bp, Homo sapiens
  SITE (1144): n equals a,t,g, or c
  SITE (1223): n equals a,t,g, or c
  SITE (1251): n equals a,t,g, or c
cgagcgccggctctcccctccctgagcaccgakcccaagttccagctagagaaggtgggcggcasgcagcccggcgscccctcccagctcccagcgatttgagagggaagatctgatctcctagaattagagttggtacagaaaccatttcagctccaaaaatgttggaggaagatatggaagtcgccataaagatggtggttgtagggaatggagcagttggaaaatcaagtatgattcagcgatattgcaaaggcatttttacaaaagactacaagaaaaccattggagttgattttttggagcgacaaattcaagttaatgatgaagatgtcagactaatgttatgggacactgcaggtcaggaggaatttgatgcaattacaaaggcctactatcgaggagcccaggcttgtgtgctcgtgttctctaccacagatagggaatcttttgaagcagtttccagttggagagagaaagtagtagccgaagtgggagatataccaactgtacttgtgcaaaacaagattgatcttctggatgattcttgkataaagaatgaggaagctgaggcactggcaaaaaggttaaagttaagattctacagaacatcagtgaaagaagatctaaatgtgaatgaagtttttaagtatttggctgaaaaataccttcagaaactcaaacaacaaatagctgaggatccagaactaacgcattcaagtagtaacaagattggtgtctttaatacatctggtggaagtcactccggtcagaattcaggtaccctcaatggtggagatgtcatcaatcttagacccaacaaacaaaggaccaagaaaaacagaaatccttttagcagctgtagcataccctaagatgttttgggaggaaaacaattgaattacattgtgcaatgcattaagaaacccatccagctgtcatggtatgttacaaggttttcagcagactttgctcctaatggctctctgaaagtgacagacttaaatattgctctgcagtgctttcagaatgtagagtgagacctctggtggaaaaattattgscctgtgggacctcctttaattttttttacatttagaccgaagcttctcctgkttgtaaagggaatgcttttaaggaaaantttcaaaccccagggtttttggcgggaattttttaaatgctgggaaaaacctttaaatggaaatggccttaaaataatnattggggttcaagattttaattaactgngggattcaa

SEQ ID NO: 501 - DNA, 752 bp, Homo sapiens
  SITE (493): n equals a,t,g, or c
  SITE (752): n equals a,t,g, or c
gcgcgggggaggagtgccgggcacgcgcctcctcgccaccctcgccgggcttttcccaggctcgccctcctccccacgccccctgctcgggctgcagttcctataggaagggcattaccatcccttccccaccctccccractctacgstctttcccctccccctcctgtaacttcctcttcttccccggttgggccctctgctcctctgcactctcctccccagttcgcagatttccgcccaccttccgcctcgtctagccgcgccacagctagcggggtgatctttccccccctctggtaggagttggtgaagatttctaccgcaaagagatcgaagtggactcttccccytccgtgstggaaattctggacamcgcaggaactgagcagtttgcctccatgagagatytctacatcaaaaacggccaaggtttcatcctggtttatagcctggttaatcaacagtcttttcaggatatcaagccaatganagatcaaattgtcagagtgaagagatatgaaaaagtcccactaatcctagtaggaaataaagtggatctggaaccagaaagagaggttatgtcttcagaaggcagagctctggctcaagaatggggctgtcctttcatggagacatcggcaaaaagtaaatcaatggtggatgaactttttgctgagatcgtcaggcaaatgaactattcatccctgccggagaagcaagatcagtgttgtacaacttgtgtcggccan

SEQ ID NO: 502 - DNA, 1719 bp, Homo sapiens
gctcgtgccgctggatttggctttctgtcgctctctctacagggtacaggtgaaagggggcagacccctcatcatgctttccaggcatctgccacttcccaggaattgtctccctggataaacaaggcgaagtccctggctgtgcagaagcagtagctgtgtggtggcacagtcaggaaaactcgggggccctgttggtattttctacccctgacccgtgtgcatacttctgtcgtagctctcaccacagtagactctgctatcattgtgtcttccatcctctgaaccctgtgcaaggtctgctcatggtgaatgcccagtaaggctcacctattgctgctatctcatcatcatatcatttctatgtgcccccctagctaagagtctggactgtggttacattctcaggaatgtytgcaaagtcatatttaggtgtgaggagagtaaaacagagctagacataatgktgcacacagcctttggcactggatgcctggtgaatgtcttgtgcaaatgggtaacgtgaggarcagcatttggggtgcgcaggacttaactatttgkgtataacatattactgatgcctgtgkgtcatmctctgctactccaagtctagtagmcaattgcataccatatctcagtctggcactgagggaagcagtctggatggaggtacagctggagattggttgaggggacttatctctgacaacagcctcttgktgatcttyccagacagkgacaataccctcccctcccttgggctggacccctctctacagctaggagccaatggcagaagacaaaaccaaaccgagtgagttggaccaagggaagtatgatgctgatgacaacgtgaagatcatctgcctgggagacagcgcagtgggcaaatccaaactcatggagagatttctcatggatggctttcagccacagcagctgtccacgtacgccctgaccctgtacaagcacacagccacggtagatggaagaccatccttgtggacttttgggacacggcaggccaggagcggttccagagcatgcatgcctcctactaccacaaggcccaygcctgcatcatggtgtttgatgtacagaggaaagtcacctataggaacctgagcacctggtatacagagcttcgggagttcaggccagagatcccatgcatcgtggtggccaataaaattgatgcagacataaacgtgacccaaaaaagcttcaattttgccaagaagttctccctgcccctgtatttcgtctcggctgctgatggtaccaatgttgtgaagctcttcaatgatgcaattcgattagctgtgtcttacaaacagaactcccaggacttcatggatgagatttttcaggagctcgagaacttcagcttggagcaggaagaggaggacgtgccagaccaggaacagagcagcagcatcgagaccccatcagaggaggtggcctctccccacagctgaggggctggggctaggggaatagtttggaccttgttcctcctgtgggaggctgaggactgcaagaggagagctagcagatatgcctgttcacccctctctggtacttgtggcttgctagtatgtttttatgataatctcgggcattgtttgcattgtgtttattaatagggttttgtttttattgtttccttttttacagtaaaggctgaatgacataaacattgaaaaaaaaaaaaaa

SEQ ID NO: 503 - DNA, 1668 bp, Homo sapiens
aggaagtgctgccacttaagaacatcctagatgagatcaaaaagcccaagaatgtgactctcatcttggttggaaacaaagctgacttggaccactccaggcaggttagcacagaagaaggagagaagctggccacagaattggcttgtgctttttacgagtgctctgcctgcactggagaagggaacatcacagagatattctatgaattgtgtcgagaggtgcgtcgccggaggatggtgcagggcaagacgaggcgacgcagctccaccacgcatgtcaagcaagccattaacaagatgctcaccaaaatcagtagttaggcagcccagctgaggtggaccaactaattggaaacactcttccccttctgttcccctttcaaaaataaaacaaaatattgcttctttgtttggatyctgagaaatgtctgggcttcccattgtttctggcctctaataggttgggaagttttagcgtgttttatgcaatttcagtgctaacaatttcttcctttcctgcttgaataagatacactctaatggcatttgaacatgtaatcaccagagattctgaaatgactggtttatgttaagctatttttaggcatcttcaccttgctttaagtaggttgaagtttttgcaaaggcatttaaaaattcaatttcttgtcagatactacaaataattttcttaaaagtctaagatagcagaaaatacagtaaaaacacaggagaagaagctgagctattggaacaggaaatagaaggaactctagtttctgtttgaagtgaggattttctgaattatctaatatcatctaggttttctttaaaattttattttgttcttcagttcaagcatcttctcactaatgtttttcactataacagagaattcatttcaatttgagttggttctctcaatgatctattgatcattacaccctaactctccttccttggctcaaacaatattttccctataacaaaggcaataggacacaaaattcacatcctgctgggccttttttcatcaagtcagggtgatataaaaacattggaagtcttttcaccaaaccctgactttattgaatgctagtagaagatgtagaattagagacatctgatttgtttatcaccttagcagaaaaaccacagtccaaaagacaagcaaattaagaatggagcttaaccatgcctccattgggaagtctagactttgagccaggtacagtaagaaaaattagcctctgattcattaagtttgccacatgacttattttgatattttggatacattaactcacttaggagaattcagaaaagaatgggtgattaaagttcattacagctgaataaatgtgtctaaaacagactcttgtattctgaaagtacagtctacaactgataaaaccttatgattcttttctcccccattatgcccctatatatatcaagatttgggtactttattttagtagaaaatatatatcttttacatatgtatgtatttataaatgcatagatatatgtataaaaatttgtaagcgttagcggcattaattcaccaatgcatttggacaacttgatgtaactgactttattttatgtgactataataaaaagcataattttctcataaaaaaaaaaaaaaaaaaaaaaaaaa

SEQ ID NO: 504 - DNA, 457 bp, Homo sapiens
gggaggcggagcagagtcgactgggagcgaccgagcgggccgccgccgccgccatgaaccccgaatatgactacctgtttaagctgcttttgattggcgactcaggcgtgggcaagtcatgcctgctcctgcggtttgctgatgacacgtacacagagagctacatcagcaccatcggggtggacttcaagatccgaaccatcgagctggatggcaaaactatcaaacttcagatctgggacacagcgggccaggaacggttccggaccatcactccccatctccttctggcccatctgcctgctgccctgagccccggttctgtcagggtccctaaaggaggacactcagggcctgtggccaggcagggcggaggcctgctgtgctgttgcctctaggtgactttccaagatgcccccctacacacctttctttggaacgagggctcttctgtcgg

SEQ ID NO: 505 - DNA, 574 bp, Homo sapiens
gcttgcgctccccaagtctctctcgtgcgcagagcccaggctgcgcttccctggtcaggcacggcacgtctggccggccgccaggatgcaggccccgcacaaggagcacctgtacaagttgctggtgattggcgacctgggcgtggggaagaccagtatcatcaagcgctacgtgcaccagaacttctcytcgcactaccgggccacaatcggcgtggacttcgcgctcaaggtgctccactgggacccggagactgtggtgcgcctgcagctctgggatatcgcaggtcaagaaagatttggaaacatgacgagggtctattaccgagaagctatgggtgcatttattgtcttcgatgtcaccaggccagccacatttgaagcagtggcaaagtggaaaaatgatttggactccaagttaagtctccctaatggcaaaccggtttcagtggttttgttggccaacaaatgtgaccaggggaaggatgtgctccatgaacaatggsctcaagatggaccagttytgcaaggagcacggtttcgtaggatggtttgaaacatcagccaaaggaaa

SEQ ID NO: 506 - DNA, 791 bp, Homo sapiens
  SITE (710): n equals a,t,g, or c
gcccctccctgctggttcctggcatcgccagatgctgcgcagcagtctccgattccccatcaccaattcggctggcgtctccgagaccgcggactcccgtagggtccccgtggccccgagttgtagtcgggacaccccggccgcgggtgatcgtcgggtctccacgcgcccgggtcgctgacgcggatccggcctcggcgccttctcagggcgccctgcaaggccgcaggcaggatgaacattctggcacccgtgcggagggatcgcgtcctggcggagctgccccagtgcctgaggaaggaggccgctttgcacgggcacaaagacttccacccccgcgtcacctgcgcctgccaggagcaccggacaggcaccgtgggatttaagatctccaaggtcattgtggtgggggacctgtcggtggggaagacttgcctcattaataggttctgcaaagacacctttgataagaattacaaggccaccattggagtggacttcgagatggaacgatttgaggtgctgggcattcccttcagtttgcagctttgggataccgctgggcaggagaggttcaaatgcattgcatcaacctactatagaggagctcaagccatcatcattgtcttcaacctgaatgatgtggcatctctggaacataccaagcagtggctggccgatgccctgaaggagaatgaccctttcagtgngcttctcttcyttgaggttccaagaaggatctgagtacccctgstyartatgcctgatggagaagaccccttcagtgggcc

SEQ ID NO: 507 - DNA, 566 bp, Homo sapiens
  SITE (484): n equals a,t,g, or c
  SITE (493): n equals a,t,g, or c
  SITE (538): n equals a,t,g, or c
  SITE (563): n equals a,t,g, or c
gcgatggcagcggcggagcagggctgagcccgctgcccgcccgcagttcccggccccgctggccccagtcatggcgaagcagtacgatgtgctgttccggctgctgctgatcggggactccggggtgggcaagacctgcctgctgtgccgcttcaccgacaacgagttccactcctcgcacatctccaccatcggtgttgactttaagatgaagaccatagaggtagacggcatcaaagtgcggatacagatctgggacactgcagggcaggagagataccagaccatcacaaagcagtactatcggcgggcccaggggatatttttggtctatgacattagcagcgagcgctcttaccagcacatcatgaagtgggtcagtgacgtggatgagtacgcaccagaaggcgtccagaasatccttattgggaataaggctgatgaggagcagawacggcaggtgggaagagagcaagggcagcanctggcgaangagtatggcatggacttctatgaaacaagtgcctgcaccaacctnaacattaaagagtcattcacgcgtntga

SEQ ID NO: 508 - DNA, 1114 bp, Homo sapiens
gcgagcggcacgtgtcaggccaccgaggtccaagccgcacttgctgccccattgaggacgaggaggcagcaggagcagtgacggtgactctaaggagccggattcccggcacgcagagctgacctgcctggcacccgcggccctctcctgtttccttcccattgtgttggcaccctaaaaagaaagaataaaacaacaacaggaaaaaaaggaaaatatttaaattgtgacaaaaacccactgggttctcttggttacaaactccttcccttctggtgctgcaaaaatgagtgggaaatccctgctcttaaaggtcattctcttgggtgatggtggagttgggaaaagttcgcttatgaaccgttacgtaaccaacaaatttgactcccaggcttttcacaccataggggtagagttcttaaatcgagatctggaggtagatggacgctttgtaaccctccagatctgggacactgcagggcaggaacgtttcaagagccttaggacaccyttctacaggggagcagactgctgcctcttgaccttcagcgtggatgatcggcagagcttcgagaatcttggtaactggcagaaagaatttatttactatgcggatgtgaaggaccctgagcatttcccctttgtagttctgggtaacaaggtagacaaagaggataggcaagtgactactgaggaggcacaaacctggtgcatggagaatggggattacccttatttagaaactagtgccaaagatgatactaatgtgacagtggcctttgaagaagctgtcaggcaggtgctggctgtagaggaacagctggagcattgcatgttgggtcacaccattgacttgaacagtggctccaaagcagggtcttcgtgctgttaaagatagggagccttttaaaaatgtgccccaaattgatcagtcagtagtgtaagaataactgtgcccctctaagagtgcacacacacgcacacaagagggtaagagacaaggttctgattgtgaacagagcctttcaaattgaagtgtagattgatttaaaaaaattaaaattaaaaaaaatgaagctctatcaggccagtgtattttgcgtgatttctgcta

SEQ ID NO: 509 - DNA, 776 bp, Homo sapiens
  SITE (6): n equals a,t,g, or c
  SITE (11): n equals a,t,g, or c
  SITE (30): n equals a,t,g, or c
  SITE (592): n equals a,t,g, or c
  SITE (617): n equals a,t,g, or c
  SITE (631): n equals a,t,g, or c
  SITE (652): n equals a,t,g, or c
  SITE (661): n equals a,t,g, or c
  SITE (708): n equals a,t,g, or c
  SITE (747): n equals a,t,g, or c
taaaanggctnctccaattaacctcctaanggaacaaagctggagctccccgcggtggcggccgctctagaactagtggatcccccgggctgcaggattcggcacgaggtttttgacttgttgtctgatatgcatggtactttgacttttgtcctgattcccagtcaacagatcaagccgcctcctgccaagaaacagtaatccatgtaaaagctcattttgactatgacccctcagatgacccttatgttccatgtcgagagttaggtctgtcttttcaaaaaggtgatatacttcatgtgatcagtcaagaagatccaaactggtggcaggcctacagggaaggggacgaagataatcaacctctagccgggcttgttccaggtaagacacaatatggtagaaagtacataatattaaaagaacattgaaaakgcaagccttcacaaagaaaaactcactctttcatgcctctatttaataaagtattccagttactttttcgtgtagttgggtttttatgttgtacctgcagcgtaagtatattaaatagaatgtggccaattctttggcctttagaatggaattatgnataacttcagccaatcccatattgnagtacatttcctgnatacatattaaagatgacccnattatcgangcaatacaacttggattatactatatactatatactatgacattaantggagcattaacatgaattttgagaaaggaagatgcatnactttataagagtcaggaaagtacatctt

SEQ ID NO: 510 - DNA, 686 bp, Homo sapiens
  SITE (19): n equals a,t,g, or c
  SITE (28): n equals a,t,g, or c
aaggcccaaaagctgttcnccaccgcgncggcggccgctctagaactagtggatcccccgggctgcaggaataaamcaatgaacmagaagattcattccctggccttgttggtcaatctggggatttatggggtagcgcaggcacaagagccgaccgatactcctgtttcacatgacgatactattgtcgttaccgccgccgagcagaacttacaggcgcctggcgtttcgaccatcaccgcagatgaaatccgcaaaaacccggttgcccgcgatgtgtcgaagatcatccgtaccatgccaggcgttaacctgaccggtaactccaccagtggtcagcgtgggaataaccgacagattgatattcgcggtatgggtccggaaaacacgctgattttgattgacggcaagccggtaagcagccgtaactcggtgcgtcagggctggcgtggcgagcgcgatacccgtggtgatacttcctgggtgccacctgaaatgattgaacgtattgaagttctgcgtggtccggcagctgcgcgttatggcaacggcgcggcgggcggcgtggttaacatcattaccaaaaaaggcagcggcgagtggcacggctcctgggacgcatatttcaatgcgccagaacataaagaggaaggtgccaccaaacgcactaactttagcctgaccgg

SEQ ID NO: 511 - DNA, 381 bp, Homo sapiens
gtcaccttcaggatctgaccctctcggaagggaagctcttcttctccagcatcaggattgggcgacattgacacggggtcatagtcaaacasagccacaaagatcctgacgggtaagtgctggtaagccartgtttctgaggggctcctcgcagggactakctctgcagtgcttggsctgaggactcggacacctctcttctgggggcccctccgcccagagccgtcctgccctctggcctctccggtctctgttgcccgggagagtggctccttggctctgcccgtcgcactgcggcctctccgctctggttcccctttctcccaggctgggaggcgtgggtagggcttggggcctgaattggcttcggagccccctggg

SEQ ID NO: 512 - DNA, 1661 bp, Homo sapiens
gcggacgcgtgggcggacgcgtgggcggacgcgtgggtgagtccagtgagccgacagtccataagaaactcccagaagcacagccccacttcagagcccacccccccgggggatgccctaccaccagtcagctccccacatactcacaggggctaccagccaacaccagccatggccaagtacgtcaagatcctgtatgacttcacagcccgaaatgccaacgagctatcggtgctcaaggatgaggtcctagaggtgctggaggacggccggcagtggtggaagctgcgcagccgcagcggccaggcggggtacgtgccctgcaacatcctaggcgaggcgcgaccggaggacgccggcgccccgttcgagcaggccggtcagaagtactggggccccgccagcccgacccacaagctacccccaagcttcccggggaacaaagacgagctcatgcagcacatggacgaggtcaacgacgagctcatccggaaaatcagcaacatcagggcgcagccacagaggcacttccgcgtggagcgcagccagcccgtgagccagccgctcacctacgagtcgggtccggacgaggtccgcgcctggctggaagccaaggccttcagcccgcggatcgtggagaacctgggcatcctgaccgggccgcagctcttctccctcaacaaggaggagctgaagaaagtgtgcggcgaggagggcgtccgcgtgtacagccagctcaccatgcagaaggccttcctggagaagcagcaaagtgggtcggagctggaagaactcatgaacaagtttcattccatgaatcagaggaggggggaggacagctaggcccagctgccttgggctggggcctgcggaggggaagcccacccacaatgcatggagtattatttttatatgtgtatgtattttgtatcaaggacacggagggggtgtggtgctggctagaggtccctgcccctgtctggaggcacaacgcccatccttaggccaaacagtacccaaggcctcagcccacaccaagactaatctcagccaaacctgctgcttggtggtgccagccccttgtccaccttctcttgaggccacagaactccctggggctggggcctctttctctggcctcccctgtgcacctggggggtcctggcccctgtgatgctcccccatccccacccacttctacatccatccacaccccagggtgagctggagctccaggctggccaggctgaacctcgcacacacgcagagttctgctccctgaggggggcccgggaggggctccagcaggaggccgtgggtgccattcgggggaaagtgggggaacgacacacacttcacctgcaagggccgacagmaggggacaccgtgccggcttcagacactcccagcgcccactcttacaggcccaggactggagctttctctggccaagtttcaggccaatgatccccgcatggtgttgggggtgctggtgtgtcttggtgcctggacttgagtctcaccctacagatgagaggtggctgaggcaccagggctaagcaattaaaccagttaagtctcccaaaaaaaaaaaaaaaaaaaaaaaaaaaaaaaaaaaaaaaaaaaaaaaaaaaaaaaaaaaaaaaaaaaaaaaaaaaaaa

SEQ ID NO: 513 - DNA, 430 bp, Homo sapiens
  SITE (396): n equals a,t,g, or c
gcgactccccaagtcccgaagaggataaggaggaacacatttcacttgcgcacagaggagtggacgcgtcaaagaaaacttccaagactgttaccatatcccaagtgtctgacaactttgtaagagaaataaagaaagagatgaagaaagaccctctcaccaacaaagctccagaaaagcccctgcacgaagtgcccagtggaaactctttgctgtcttctgaaacgattttaagaaccaataagagaggcgagcgacggaggcgccggtgccaggtggcattcagctacctgccccagaatgacgatgaacttgagctgaaagttggcgacatcatagaggtggtaggagaggtakaggaaggatggtgggaaggtgttctcaacgggaagactngaatgtttccttccacttcatcaaggacttgtca

SEQ ID NO: 514 - DNA, 276 bp, Homo sapiens
ggcacaggggagcagtatgtggtggtagccaactaccagaagcaggagagttcggagatcagcctcagcgtggggcaggtggtggacatcatcgagaagaatgagtcaggttggtggttcgtcagcactgccgaggagcaaggctgggtccctgcaacgtgcctcgaagccaggwtggggtgcaggatgagttttctctgcagcctgaagaagaggagaagtacacagtcatctacccgtacacagctcgggaccaggatgaaatgaacctggaga

SEQ ID NO: 515 - DNA, 1239 bp, Homo sapiens
  SITE (1196): n equals a,t,g, or c
  SITE (1214): n equals a,t,g, or c
  SITE (1228): n equals a,t,g, or c
gggctcaggatgagtgtggatggcatgaactcacactagcactggctccacctgtgctccttcggaaggagccctcagccctgagccccaaggctccagtgccctccccttgcggggcgggggcctcacaccctctgccgccctgtgctgagggccctgtggcctcccctttcttgcagtgtgagcagctacgagaagacccagagctatcccaccgactggtcagacgatgagtctaacaaccccttctcctccacggatgccaatggggactcgaatccattcgacgacgacgccacctcggggacggaagtgcgagtccgggccctgtatgactatgaggggcaggagcatgatgagctgagcttcaaggctggggatgagctgaccaagatggaggacgaggatgagcagggctggtgcaagggacgcttggacaacgggcaagttggcctatacccggcaaattatgtggaggcgatccagtgatgagtcggggacaggccagcggggggacggaggcggcgggcccaggagcctcagccagccacgtgggcatccactccttttcctgcaagagatgatggttccattgctcttggcttcatggtgttcctggaaggcagatgagctggtcatttcgcctgggactcggcacctttccgagtgcagctggagggatctgagcgcaggaagacgcagaacaacagaaatagccgcccctccccgcccactgtgcctgttggcctatcatagatctctatgttcttgactttgtctctcctttccgagtcaatggtgggttacactgatcttgttccactgattactctctctgacgagtccatcacctgcaacttaaatgaacaagcttacatcccattttgagtgaagattttgaggtttttaatttaaaggctgtgtacagttatacttttttatacacctgttcatttctacttaaattatggcacagattgatgcgcaccagtcttgaggaaacgatctccctattcccttaccctgttactcagccacgccgtgtgtaggcttagcctcaggtggcagatgtttgagraaaggaattatgccaggaaggtgggaccgggttatggtcgggtttctattggggaatgctctttgtgcttttgggcatctgaatggaactttacataggaaccttagggtaggaactnccccccaaattcgccatnattttaaaaaattnattttttcact

SEQ ID NO: 516 - DNA, 454 bp, Homo sapiens
ccacccaagaaacctactcccctaccaaagccagtaatttattgagatcttctggaacagtgtacccaaagcgacctgaaaaaccagttcctccaccacctcctatagccaagattaatggggaagtttctagcatttcatcaaaatttgaaactgagccagtatcaaaactaaagctagattctgaacagctgccccttagaccaaaatcagtagactttgattcacttacagtaaggacctccaaagaaacagatgttgtaaattttgatgacatagcttcctcagaaaacttgcttcatctcactgcaaatagaccaaagatgcctggaagaaggttgccgggccgtttcaatggtggacattctccaactcwcagccccgaaaaaatcttgaagttaccaaaagaagaagrcagtgccaacctgaagccatctgaaaaaaaaaaaaaaag

SEQ ID NO: 517 - DNA, 418 bp, Homo sapiens
gaagaggaacggaaagctgaggagaaacaacgtgagacagctagtgttttggtgaattatagagcattatacccctttgaagcaaggaaccatgatgagatgagttttaattctggagatataattcaggtaggaaatgaattttttttttaatcatgaataacctaaatacattgtaatatattagtttctgtagtaatgttgaccattaatttcatatatttacctttgtaaaatgtttcttaaacattacctcatttggactttacaacatacttcagagctgcataggacagttattattactaactaagttctagccaaggaagcttaaactcacacaagttgtaactgtcagcattgcagtgccagaatgggatgcagttatgtgtttttttatttccaaatccagcgttgt

SEQ ID NO: 518 - DNA, 575 bp, Homo sapiens
ctctgcggattggggctccagctgactgacccgacagtgcgggtggcctagggggaggcgctcagagtaggaacccgggggtgcagacgggatctgccggatccccaggctcgtatttttatccaaaagaaggacctggaggaggatgagagcgttactgctgcacacctaaagtcaagggggagaagcccgaggaagattgaccarttttgtaattctagmaacatggtccatggatcagtgacattcagggatgtggccattgacttctctcaggaggagtgggagtgcctgcagcctgatcagaggaccttgtacagggatgtgatgttggagaactacagccacctgatctcactgggaagttccatttctaaaccagatgtaattacgttactagagcaagagaaagagccctggatggttgtaaggaaagaaacaagcagacggtatccagatttggagttaaaatatggacctgagaaagtatctccagaaaatgatacctctgaagtaaatttacccaaacaggttataaagcaaataagtacaaaaaaaaaaaaaaaaaaactcga

SEQ ID NO: 519 - DNA, 333 bp, Homo sapiens
  SITE (291): n equals a,t,g, or c
  SITE (309): n equals a,t,g, or c
  SITE (331): n equals a,t,g, or c
gaggggagaccttgattataagggcttggctaaggagtttggattttcttctttatagaagtttgaaaagagtcttcgctagttttaacaatgttcatgactgctgattgacagctcttatctgcagtctgcaattctcagaatgaagacattttgagacaaataacagccgcttgctcgtctcactgtttactcctcttgtaagagcactgtatgatgcacatcacacattgagttggatgtgtgatgatgcatcagactgctgccaaaaaaaaaaaaaaaaaaaaaaanccccggggggggcccggnacccaattccccccaaaggggngc

SEQ ID NO: 520 - DNA, 413 bp, Homo sapiens
  SITE (253): n equals a,t,g, or c
  SITE (387): n equals a,t,g, or c
tagaggctaaataagtatttgttgaatgaatccatttgtgtgagccacattatttacattctttatttcagctaaagaatattgtagaacattatttgcctatgaaggtactaatgaagatgaacttacttttaaagagggggagataatccatttgataagtaaggtaaggtgtttctgtttttcagtgaattgcttaatttatttatagaaatatttttcaaaagttatacattcaccctagagtgttctnatattcaccctggaatctagaagagctgggactttgtcttgttctaagtcctgaaaactttgcacgtaataagtgctcagaccgtctctttttgagctaacttttattgctatattgttgtaatttccatattngggattattgttaaccatcatattgg

SEQ ID NO: 521 - DNA, 359 bp, Homo sapiens
  SITE (337): n equals a,t,g, or c
  SITE (348): n equals a,t,g, or c
ggacaaccgcggcgcggctcggcgctcccggcctggcgttgtggcgccgcagcccttgccaccttccctgcacctgccctgcccggcctcatgtaccgcgcgctgtacgcgttccgctcggcggagccawacgcgctggcgttcgccgcgggcgagaccttcctggtgctagagcgamgagcgcgcactggtggctggccgcgcgggcgcagtggtgagacgggctacgtgccgccagcctacctgcgccgcctgcargtctaactgctgtccctgcccccccaagggctggagcaggatgtcttcaagccattgaccgggcaatcgaggtgtaaanaaaaaaccatncgggatgttgg

SEQ ID NO: 522 - DNA, 572 bp, Homo sapiens
  SITE (3): n equals a,t,g, or c
  SITE (27): n equals a,t,g, or c
  SITE (516): n equals a,t,g, or c
  SITE (546): n equals a,t,g, or c
  SITE (552): n equals a,t,g, or c
  SITE (558): n equals a,t,g, or c
ggncccctcctgcctgcagaaagcccnacctaacactgacctgtcagcaaactctaaagaaacccaaaagtcaccatcagactgcaggccggagatacctgaggggaatctcagggctgggacataggcttaatttctgaggccccattctccagccatcctgactctgtttcttaggcggggaagtcataggttagggagcacctcacactttcctcaggagaagacacacaaccatgaccctcagcctggggaccccaactccaggccctccagccccaaacctgcccagccagccctgaaaatgcaagtcttgtacgagtttgaagctaggaacccacgggaactgactgtggtccagggagagaagctggaggttctggrccacagcaagcggtggtggctggtgaagaatgaggcgggacggagcggctacattccaagcaacatcctggagcccctacagccggggacccctgggacccagggccagtcaccctctcgggtactacccancctggactatccagagccctaagtcttganttggangtcggngtggggaggattca

SEQ ID NO: 523 - DNA, 576 bp, Homo sapiens
  SITE (283): n equals a,t,g, or c
tgcacagttggtgctgactggcggcactggctcccacggtgtcttcctggtgcgccagagtgagacaaggcggggtgaatacgtcctcaccttcaacttccagggcaaggccaagcacctgcgtttgtcgctgaacgaggagggtcagtgccgggtccagcacctgtggttccagtccattttcgatatgctcgagcacttccgggtgcaccccatccctttggagtcgggaggctccagtgatgttgtccttgtcagctatgtcccatcctcccagcgacanagggtgagcagagcaggtytgcaggggaggaggtgcccgtgcacccaagaagtgagaaccgaccacytcccatgamccaccccagccccctgaacccccttcatggacagatcccccacagcctggggcagaagaggcgtcgagggcgccagaagtggcggcagcagcagccgcagcagccaaagagaggcaagagaaagagaaagcgggcggtggaggggtcccggaagagctggtccccgtggttgagctggtccccgtggttgatttggaagaggccatagccccagggt

SEQ ID NO: 524 - DNA, 645 bp, Homo sapiens
  SITE (503): n equals a,t,g, or c
  SITE (543): n equals a,t,g, or c
  SITE (629): n equals a,t,g, or c
ggcacgagtgggtttaggaggtccccgggttgccggcggcgacagcgggggaagcatgactgctgtgggccgaagtgccccgcgctggggtcccgaggggctgctggagagccagaggctggcagcgactatgtgaagttctccaaggagaagtacatcctggactcatcgccagagaaactccacaaggaattggaggaggagctcaaactcagcagcacggatctccgcagccatgcctggtaccatggccgcatcccccgagaggtctcgragaccttggtacaacgcaacggcgacttcctcatccgggactcactcaccagcctgggcgactatgtgctcacgtgccgctggcgcaaccaggccttgcacttcaagatcaacaaggtggtggtgaaggcaggcgagagytacacacacatccagtacctgtttgagcaggagagctttgaccacgtgcccgccctcgtgcgctatcatgtggggcagccgcaagygtngtcagagcagagtggtgccatcatctactgcccggtgaancgcaccttcccatgcgctaacttcgaagccagctatggcctggggacaggggagtagcaagcctgctaagccccgtcagcccctcnaggccccaagggcagc

SEQ ID NO: 525 - DNA, 2361 bp, Homo sapiens
gagcacactgcctcggtctccccgagatgccccatgcagtgcttcgtcagagttgtctggtccctccacgcccctgcacaccagcagtccagtccagggcaaggaaagcacccggcgacaggacaccaggtcccccacctcagcgcccactcagagactgagtcctggcgaggccttgccccctgtttcccaggcaggcaccggaaaggcccctgagctgccgtcgggaagtgggcctgagcctctggcccctagcccagtctctccgaccttccctcccagctcgcccagtgactggcctcaggaaaggagtccagggggccactcagatggcgccagtcctcggagccctgtgcccaccacacttcctggcctccgccacgccccctggcaaggccctcgaggcccccccgacagcccagatgggtctcccctcactcctgtgccttcccagatgccctggcttgtggccarcccagagccgcctcagagctcacctacacctgctttccccctggctgcctcctatgacaccaatggccttagccagcccccacttcctgagaaacgccacctgcccgggccggggcaacagccaggaccctggggcccagagcaggcatcatcgccagccagaggcatcagtcaccatgtcaccttcgcacctctgctctcagataatgtcccccaaaccccagagcctcctacacaagagagccaaagcaatgtcaagtttgtccaggatacatccaagttctggtacaagccacacctgtcccgtgaccaagccattgccctgctgaaggacaaggaccctggggccttcctgatcagggacagtcattcattccaaggagcttatgggctggccctcaaggtggccacaccgccacccagtgcccagccctggaaaggggaccccgtggaacagctggtccgccatttcctcatcgagactgggcccaaaggggtgaagatcaagggctgccccagtgagccctactttggcagcctgtccgccttggtctcccagcactccatctcccccatctccctgccctgctgcctgcgcattcccagcaaagatcctctggaagagaccccagaggctccagtgcccaccaacatgagcacagcggcagacctcctgcgtcagggtgctgcctgcagcgtgctctacttgacctcagtggagacagagtcactgacgggcccccaagctgtggcccgggccagctctgcagctctgagctgtagcccccgcccgacaccagctgttgtccacttcaaggtgtcagcccagggcattacactgacggacaaccaaaggaagctcttctttcgccgccattatccagtgaacagcatcaccttctccagcactgaccctcaagaccggagatggaccaacccagacgggaccacctccaagatctttggtttcgtggccaagaagccgggaagcccctgggagaatgtgtgtcacctctttgcagagcttgacccagatcagcctgctggcgccattgtcaccttcatcaccaaagttctactgggccagagaaaatgaaggaaggccacaagctcagagcccacatcaacactgcccccctcccagcaccccacagccctcacatcccctggcctggacccaggagacccaggagaaagcaccctcccttaggaatgaggagtgggcatcaggcctgggacactgctctccttccccgcccccagcctgctaagttaagtggacaggcccacaagatgaccttgcatgtgagcagatggcagagatgggtgtgtgaggggtgaggaggcatcagcagttgagccccgaaggagatcaggcagccccacctgcaggagaacgtcagccctccaggggatcagcccctgccagttccacccagctgcaggtgccagcacggcagggatgggagaggggtggggagcgagtcactgcctcctctgagcagagattcagagtaggatcacatgaataggggaaaaaagagagtctatttttgtctaataataaagaatttctataaactttagccgaaattggagtcaacacttattcacaggaaggtcaaagcctcrtctcccaggggacgtatctgtgctcaggcctgtagccaggcccatggaacatatgattcccatccctggcccaacattggtccacatctccccatgagcaagctccttcggctgcccccatccagcagtcctgttcctagcccagtggactagaaaggctcctggttccggccatactgataaatacggaaactccatctttatcggatgtatgaaatgtatgtacagaccagagatgtttatacatcgtagggt

SEQ ID NO: 526 - DNA, 433 bp, Homo sapiens
  SITE (422): n equals a,t,g, or c
  SITE (423): n equals a,t,g, or c
gcacggtggcgcctggacacagcagccaccacagtccaggcctgcaggccagggtgtgaccctgcccgggcagccacccctccctgagaagaagcgggcctcggagggggatcgttctttgggctcagtctctccctcctccagtggcttctccagcccgcacagcggagcaccatcagtatccccttcccaaatgtccttcccgacttttccaaggcttcagaagcggcctcacctctgccagatagtccaggtgataaacttgtgatcgtgaaatttgttcaagacacttccaagttctggtacaaggcggatatttcaagagaacaagccatcgccatgttgaargacaaggagccgggctcattcattgttcgagacagccattccttccgaggggsctatggctggccatgaaggtnnggcacgcccc

SEQ ID NO: 527 - DNA, 350 bp, Homo sapiens
ggcacgagcttggtcccatttcttttcgcctgggaggtatctttccactattagcaatgcgattattgcaaatcatcatatgcagtctatttcatttgcctctggaggggatcctgatactacagactatgttgcctacgtagctaaagatccagttaatcaacgagcctgtcacatattggaatgccacaatggaatggcccaagacgtcataagtaccatagggcaggcttttgaactccggtttaaacagtacttgaaaaatccttctttgaatacttcttgtgaaagtgaggaggtgcatattgatagccatgccgaggagggggggcccggtacccaattcgccc

SEQ ID NO: 528 - DNA, 857 bp, Homo sapiens
  SITE (93): n equals a,t,g, or c
  SITE (657): n equals a,t,g, or c
  SITE (692): n equals a,t,g, or c
  SITE (718): n equals a,t,g, or c
  SITE (796): n equals a,t,g, or c
  SITE (832): n equals a,t,g, or c
  SITE (833): n equals a,t,g, or c
tacgccagttcgaaattaaccctcactaaagggaacaaaagctggagctccaccgcggtggcggccgctctagaactagtggatcccccggtntgcaggaattcggcacgaggagaagccaagcacgctgacgaggttctgtgagagcatgtggagattttcattttacctttatgtatttacctacggagtcagattcctgaaaaagaccccctggttgtggaatacgaggcattgctggtacaactacccctatcagccactcacaactgaccttcactactattacatcctggagctgtcgttttattggtctttgatgttttctcagttcactgatatcaaaagaaaggactttggcattatgttcctgcaccaccttgtatctattttcttgattaccttttcatatgtcaacaatatggcccgagtaggaacgctggtcctttgtcttcatgattcagctgatgctcttctggaggctgycaaaatggcaaattatgccaagtttcagaaaatgtgtgatctcctgtttgttatgtttgccgtggttttyatcaccacacgactgggtatatttcctytctggcctttgctctgktgcccagatggaagtgcagtgtaggcttatagctcactgcagccttgaactcctgngctcaaagtgatccttctgcgctcaaggggatctnctggcttccggcttcttcaagtaacntggggacctaccagggcattgtgcctgggcaacaaccccgggtttaaattttttaacttttttgggaagaagaccaangggtcccccaacttattggtttggcccccaaggggnngggttcctttgggaaaccttccct

SEQ ID NO: 529 - DNA, 539 bp, Homo sapiens
  SITE (484): n equals a,t,g, or c
  SITE (517): n equals a,t,g, or c
gttttatggccagtgttgaggtcagacgcgttcagtggactgacggccttacctcggagcatccttttatttggacctcgggggacaggcaaaacattattgggcagatgcatcgctagtcagctgggggccacatttttcaaaattgccggttctggactagtcgccaagtggttaggagaagcagagaaaattatccatgcctcttttcttgtggccaggtgtcgccagccctcggtgatttttgttagtgacattgacatgcttctctcctctcaagtgaatgaggaacatagtccagtcagtcggatgagaaccgaatttctgatgcaactggacactgtactaacttcggctgaggaccaaatcgtagtaatttgtgccaccagtaaaccagaagaaatagatgaatcccttcggaggtacttcatgaaacgacttttaatcccattcctgacagcacagcgaggcaccagataatagnacaactgcttctcacagcacaatttactgtctnaatggacaaaggagtttgcact

SEQ ID NO: 530 - DNA, 401 bp, Homo sapiens
  SITE (305): n equals a,t,g, or c
  SITE (384): n equals a,t,g, or c
  SITE (391): n equals a,t,g, or c
tggtgtcggtaaaaccgcgattgcggaaggtcttgcctggcgaattgttcagggcgatgtgccggaagtratggctgactgtacgatttactctctcgatatcggttctctgttagcgggcacaaaatatcgcggcgactttgaaaaacgttttaaagcgttgctcaagcagctggagcaggacactaacagcatcctgtttattgatgagatccacaccattatcggtgcgggtgcagcgtctggtggtcaggtcgatgcggctaacctaatcaaaccgttgcttcgacggccttaatccgcgnttttccttcgttgtaatatttcaaggtgtgatcatcataatcgatcaagtcaatgacatcgtaaggtatcccggaatangccattnaacccagcgg

SEQ ID NO: 531 - DNA, 546 bp, Homo sapiens
  SITE (546): n equals a,t,g, or c
ctggtgaccttcgctgtgattgctatacgggcgcagatctctctgctttggtacgagaagcttctatctgtgccctgagacaggaaatggcaagacagaagagtggaaatgaaaaaggtgaactcaaggttagtcataagcattttgaagaagctttcaagaaagtaagatcatctatatcaaaaaaggatcaaatcatgtatgaacgtttgcaggagtccctcagccggtgatgtctccagcagccggcttagaggagctagcccatcaagccggcagagaatcccccacacgctctgaaggacccactttcagctggacacagcgcggcctcatgtaaacattttattttcaaatgaatgaggccaagctgaagctgaagctgaagattcttcccatctggccagccttgtgtgaaaatgccttcttcctctttaagaaaaaggacaatttttaaactgctgaaataaaatgactgttacatttttcaaataaaaaaaaaaaaaaaaaaaaaaaaaaaaaaaaaaaaccctgggggggggcccn

SEQ ID NO: 532 - DNA, 425 bp, Homo sapiens
  SITE (16): n equals a,t,g, or c
  SITE (18): n equals a,t,g, or c
  SITE (148): n equals a,t,g, or c
  SITE (406): n equals a,t,g, or c
attcggcacagcccgntntgccatcctcaaggctaacctgcgcaagtccccagttgccaaggatgtggacttggagttcctggctaaaatgactaatggcttctctggagctgacctgacagagatttgccagcgtgcttgcaagctnscawtccgtgaatccatcctgtgagccaccatgcccagcccaggtcatcttttgagggcatggagagaagactttgagcatcccacttttgagattgtgtaccagtcgcaagcccctatgacacactttttccccaaagtagagggctctgactatgttgatcccaagagagatgggaaagagcattgaatgaggattccaaagtgattggggccttagttcgtttcctcatgttggtgttgtgaagaattctgggtnaggataacagcatgtgtgc

SEQ ID NO: 533 - DNA, 751 bp, Homo sapiens
  SITE (107): n equals a,t,g, or c
aaggtcttgcctggcgaattgttcagggcgatgtgccggaagtgatggctgactgtacgatttactctctcgatatcggttctctgttagcgggcacaaaatatcgnggcgactttgaaaaacgttttaaagcgttgctcaagcagctggagcaggacactaacagcatcctgtttattgatgagatccacaccattatcggtgcgggtgcagcgtctggtggtcaggtcgatgcggctaacctaatcaaaccgttgctctccagcggtaaaattcgtgtaattggttcgacaacctatcaggagttcagcaacattttcgagaaagaccgtgctctggcgcgtcgcttccagaaaattgatattactgaaccgtcgatcgaagaaactgttcaaatcatcaatggcctgaaaccgaaktatgaagcgcaccacgacgtgcgttataccgcaaaacggtgcgtgcggcggtaraagctggcggtgaaatacattaacgatcgtcatctgccggataaagccattgatgttatcgacgaagcgggcgctcgcgcacgyctgatgccggtaagcaaacgcaagaaaaccgttaatgtggcggatattgagtccgtggtggcccgtattgcacgcattccagagaagagtgtttctcagagtgatcgtgataccctgaaaaacctcggcgatcgcttgaaaatgctggtcttcggtcaggataaagccattgaggcgctgactgaagccattaa

SEQ ID NO: 534 - DNA, 555 bp, Homo sapiens
  SITE (116): n equals a,t,g, or c
  SITE (494): n equals a,t,g, or c
  SITE (499): n equals a,t,g, or c
  SITE (530): n equals a,t,g, or c
attttatttcttcaacaacaagagtcattttacagagattgataaaaattcaaargagcaagacaaccattcaaagtaacttatgacatgataggaggattaagtagccagctganagcaattagagaaataattgaattgcccctcaamcagcctgagcttttcaagagttatggaattcctgcccctagaggagtgttactttatggtcctccaggtactggaaaaacaatgatcgccagggctgttgctaatgaagttggagcctatgtttctgtaattaatggtcctgaaattataagcaaattctatggtgagactgaarcmaagttacgtcagawatttsctgaagccactctacgacaccccatcattaattttawtggagagctgggawgcacyttggtccgaaaagagagggggcccagaatgraaktggaaaaagagttgtggcttcamtcttaacactgtggatggcattggttccagaagtnaattnaagggccaaatgtttggtccttgggggccanaaaacggcccccaaggcccttggga

SEQ ID NO: 535 - DNA, 432 bp, Homo sapiens
  SITE (274): n equals a,t,g, or c
  SITE (302): n equals a,t,g, or c
  SITE (313): n equals a,t,g, or c
  SITE (386): n equals a,t,g, or c
ggcacgagctggccagcaaccaaccagagcagttcgactgggccatcaatgaccgcatcaatgagatggtccacttcgacctgccagggcaggaggaacgggagcgcctggtgagaatgtattttgacaagtatgttcttaagccggccacagaaggaaagcagcgcctgaagctggcccagtttgactacgggaggaagtgctcggaggtcgctcggctgacggagggcatgtcgggccgggagatcgctcagctggccgtgtcctggcaagncacgcgttatgctgccgaggacggggtnctgaccgaggncatgatggacaaccgggtgcaagatgctgttccacacaccagcagaagttgtgttggttgaaggcggaaaggnctgggcgttggggacgagccttcccattctggagtccacaggggtt

SEQ ID NO: 536 - DNA, 2320 bp, Homo sapiens
ggcggccgccctgsccgcgcaccgcgctcagcgcccaccgccgggcttcccgcgccggacccagtacctcggctccccggggccggaccgaggccgcaagcagcgccgcggggtgtggggcggacccaggagatgaaatgacaacgtcaaccctccagaaagccattgatctggtgacgaaagccacagaggaggacaaagccaagaactacgaggaggcgctgcggctgtaccagcatgcggtggagtacttcctccacgctatcaagtatgaggcccacagcgacaaggccaaggagagcattcgagccaagtgcgtgcagtacctagaccgggccgagaagctgaaggattatttacgaagcaaagagaaacacggcaagaagccagtcaaagagaaccagagtgagggcaagggcagtgacagtgacagtgaaggggataatccggagaaaaagaaactgcaagaacagctgatgggtgccgtcgtgatggagaagcccaacatacggtggaacgacgtggccgggctggagggggccaaggaggccctcaaagaagctgtcattttgccaatcaaattcccacacttgttcacaggcaagcgcaccccctggcgggggattctgctgttcggaccccctggcacagggaaatcctacctggccaaagccgtggcaacagaggccaacaactccaccttcttctctgtgtcctcctcagatctgatgtccaagtggctgggggagagtgaaaagctggtcaagaacctgtttgagctggccaggcagcacaagccctccatcatcttcatcgatgaggtggattccctctgcgggtcccgaaatgaaaatgagagtgaggccgcccggaggatcaaaacggagttcttggtccagatgcagggggtggggaataacaatgatgggactctggttcttggagccacaaacatcccatgggtgttggattcggccatcaggaggaggtttgaaaarcgaatttatatccccttgccggaggaagctgcccgcgcccagatgttccggttgcatctcgggagcactccccacaacctcacggatgcaaacatccacgagctggcccggaagacggaaggctactcgggcgcggacatcagcatcatcgtgcgggactctctcatgcagcccgtgaggaaggtgcagtcggccacacacttcaaaaaggtctgtggcccctctcgcaccaaccccagcatgatgattgatgacctcctgactccatgctcaccaggggacccaggagccatggagatgacttggatggatgtccctggggacaaactcttagagcctgtggtttgcatgtcggacatgctgcggtctctggccaccacccggcccacggtgaatgcagacgacctcctgaaagtgaagaaattctcagaggactttgggcaagagagttaaaagctgcttcacttgggcaatggtgaaggtgggaggttgattggggcaaatccaggcactccccatgtcaacagccagacagggctccagggcttgtcccagtcaatacagagttccctctgctgtctggccgtctgccagggagccagaaggaagggccttgcagccacagagacactccactgccctggggcacacagtggacactgctcttcctacttcctcctctcctggatgctcatcagctccttctgcctcccccccttttttttccatcttttgttcccctaaattaatgctgcttggattttcatcttatttataaagataaaatcacctggaagtgtcaaggagtggggcggggtggcgggggagaagcagccgtgctgccaggtcacccagacctccagacagccggctagccccactgcccgttccttttacgcccaagttttgctccttgagagcagattggctgatgcccctgcaaccccagcccaagctctgcctcaaagaccgagtgacataagccattcccaccctcctaggttcacatccagggctgtgtcttccttgggggaggagatggtgtcgtttagatcagggtaaggcagtcaggcgggtgttcaccactgccttttcttcctctgagcgtgagaacactgaacccagccactgcccctgggtccctgtcctggaaatggtctaataaatccttttcccttcttgagctacccaagtgatctcatctttccttgactcttaactgagactctgaagggccacccttgcttccaattaaaagaccctctggtttctgtctcctctcttttctaaagcagagcaggaaacagaacactgcagttctg

SEQ ID NO: 537 - DNA, 1270 bp, Homo sapiens
agtaggcagagtttacaaaggtctaggatgacatctggtgtattgactgtggccagtcttaaagctagtttttgctatgtggaacatgctgctctaattcagatttaaagagtttcttcctgttaattcgaagctcactgtgcctcttgtttccgagggaagaaggactgattaagtcatctaaatggatgcaatactgaattacaggtcagaagatactgaagattactacacattactgggatgtgatgaactatcttcggttgaacaaatcctggcagaatttaaagtcagagctctggaatgtcacccagacaagcatcctgaaaaccccaaagctgtggagacttttcagaaactgcagaaggcaaaggagattctgaccaatgaagagagtcgagcccgctatgaccactggcgaaggagccagatgtcgatgccattccagcagtgggaagctttgaatgactcagtgaagacgtcaatgcactgggttgtcagaggtaaaaaagacctgatgctggaagaatctgacaagactcataccaccaagatggaaaatgaggaatgtaatgagcaaagagaaagaaagaaagaggagctggcttcaaccgcagagaaaacggagcagaaagaacccaagcccctagagaagtcagtctccccgcaaaattcagattcttcaggttttgcagatgtgaatggttggcaccttcgtttccgctggtccaaggatgctccctcagaactcctgaggaagttcagaaactatgaaatatgaaatatctctgcttcaaaaaatgaggaagagcaagactgtcccctatgctgccaacatgcagtctttgtttatgtcttaaaaatgtcatgtttatgtcatgtctgtgaattgctgagtactaattgattcctccatccttgaatcagttctcataatgctttttaaataagaaaaattcagaagatgaatttcttccaatatttgaataaattaaagctcttagatacagagtagattgtattatatgctttttcctattaatactacttatagaaatccattaaaaagcaatctctgtacagtgtatttaaatatttcattgacatactgtgatctctattagtgatggatgtacaaaaaatgttttcttacccttgacttacaatgaaatgtgaaattacttgtctgaaccccgtggggagaaataaataattttcccaaagttcaaaaaaaaaaaaaaaaaaaaaaaaaaaaaaaaaaaaaaaaaaa

SEQ ID NO: 538 - DNA, 961 bp, Homo sapiens
  SITE (889): n equals a,t,g, or c
  SITE (932): n equals a,t,g, or c
  SITE (936): n equals a,t,g, or c
  SITE (943): n equals a,t,g, or c
atgctccgcgccaggccccgccccggctcgccgtggagaccggcgcgtgaggaacctaccggtaccggccgcgcgctggtagtcgccggtgtggctgcacctcaccaatcccgtgcgccgcggctgggccgtcggagagtgcgtgtgcttctctcctgcacgcggtgcttgggctcggccaggcggggtccgccgccagggtttgaggatgggggagtagctacaggaagcgaccccgcgatggcaaggtatatttttgtggaatgaaaaggaagtattagaaatgagctgaagaccattcacagattaatatttttggggacagatttgtgatgcttgattcacccttgaagtaatgtagacagaagttctcaaatttgcatattacatcaactggaaccagcagtgaatcttaatgttcacttaaatcagaacttgcataagaaagagaatgggagtctggttaaataaagatgactatatcagagacttgaaaaggatcattctctgttttctgatagtgtatatggccattttagtgggcacagatcaggatttttacagtttacttggagtgtccaaaactgcaagcagtagagaaataagacaagctttcaagaaattggcattgaagttacatcctgataaaaacccgaataacccaaatgcacatggcgattttttaaaaataaatagagcatatgaagtctcaaagatgaagatctacggaaaagtatgcaatatggagaaaaggacttgaggatatcaagtgggcagtatgaaactggactattatcgtatgatttggattatatgatatctgaatcttacattggaagaaaaaattgagctctgtaattttgaaactggggttggaaatttctccagntgtacactgcctgattacttcccatgggagactttttaaaaanggtnggtcttnaattggacttttaacggg

SEQ ID NO: 539 - DNA, 1107 bp, Homo sapiens
accgtaaccagggtgacaaagaggccgaggcgaaatttaaagagatcaaggaagcttatgaagttctgaccgactcgcaaaaacgtgcggcatacgatcagtatggtcatgctgcgtttgagcaaggtggcatgggcggcggcggttttggcggcggcgcagacttcagcgatatttttggtgacgttttcggcgatatttttggcggcggacgtggtcgtcaacgtgcggcgcgcggtgctgatttacgctataacatggagctcaccctcgaagaagctgtacgtggcgtgaccaaagagatccgcattccgactctggaagagtgtgacgtttgccacggtagcggtgcaaaaccaggtacacagccgcagacttgtccgacctgtcatggttctggtcaggtgcagatgcgccagggattcttcgctgtacagcagacctgtccacactgtcagggccgcggtacgctgatcaaagatccgtgcaacaaatgtcatggtcatggtcgtgttgagcgcagcaaaacgctgtccgttaaaatcccggcaggggtggacactggagaccgcatccgtcttgcgggcgaaggtgaagcgggcgagcatggcgcaccggcaggcgatctgtacgttcaggttcaggttaaacagcacccgattttcgagcgtgaaggcaacaacctgtattgcgaagtcccgatcaacttcgctatggcggcgctgggtggcgaaatcgaagtaccgacccttgatggtcgcgtcaaactgaaagtgcctggcgaaacccagaccggtaagctattccgtatgcgcggtaaaggcgtcaagtctgtccgcggtggcgcacagggtgatttgctgtgccgcgttgtcgtcgaaacaccggtaggcctgaacgaaaggcagaaacagctgctgcaagagctgcaagaaagcttcggtggcccaaccggcgagcacaacagcccgcgctcaaagagcttctttgatggtgtgaagaagttttttgacgacctgacccgctaacctccccaaaagcctgcccgtgggcaggcctgggtaaaaatagggtgcgttgaagatatgcgagcacctgtaaagtggc

SEQ ID NO: 540 - DNA, 2212 bp, Homo sapiens
  SITE (38): n equals a,t,g, or c
  SITE (42): n equals a,t,g, or c
  SITE (55): n equals a,t,g, or c
  SITE (398): n equals a,t,g, or c
  SITE (399): n equals a,t,g, or c
  SITE (1884): n equals a,t,g, or c
cggccaagtagattaccaaaataaccccaccttccccnaggnccaggttcctttnccacgcaaaccatccaggtgcagcaaacttttgagccgcttaaaagccagttcaaatttgccatcgcagacggtaacaatcagccacttgctctgctgaataytcatcttccggtaatgatgttagcaatagcacatggcccgctgcttccagcgtttccgcctgaactactcgtccttttcgacgattctcgctgagcagtcgggttttactgattaatgctttttcgggaggaagtgatacggcaatgagacgtgccggaaagggagctccggcttttttattacctgaattgcctatcattacagtggtttcaccgttcttaccgcaatccagcccgcgnngaaaacccatcatgtcaaagcgcattccttctgcagttaaccagcgcaatcctcgccagtgaacccggacgatataatcagcttctccaaaagcaagtgagcggatacattcgggacgcgaaccgaatccccggtcagcaatgcgtatctcgtctgccgtttgcgcaaatcggtccagccgttcagcgtctctgctgtcggttagctcaaaatcagtgaactgacaggtatgaggatcatatcccatatgtagtcgccattcagcgctgccgcccccgggcgcactgattgctgttccatcgacaagacgcaatctctttccgcttgtacaacccgtaactgcggcgcgtacagcaagtgtttgtgcggcaagtatgccaaaccagtcggcggcattccgcagccgcttcaggagagccacgtcagataatgttgcaacgtcatggagctgagcccatgcagtgacttcacgtaatgacatccccccggggccgtaagccagccccagacgtagcagagttgcagcatcacgaatttcgcggcggcgggttagagccccggcattacgtgccgaagtatccagttcttcgggcttaccaatatgggccagaattgctgaccagttatcgtgagagtaattcatcggcacgttaaatcatatcaggcgtaataccacaacccttaagttagcgcttatgggagtgatccccgccactttacaggtgctcgcatatcttcaacgcaccctatttttacccaggcctgcccacgggcaggcttttggggaggttagcgggtcaggtcgtcaaaaaacttcttcacaccatcaaagaagctctttgagcgcgggctgttgtgctcgccggttgggccaccgaagctttcttgcagctcttgcagcagctgtttctgcctttcgttcaggcctaccggtgtttcgacgacaacgcggcacagcaaatcaccctgtgcgccaccgcggacagacttgacgcctttaccgcgcatacggaatagcttaccggtctgggtttcgccaggcactttcagtttgacgcgaccatcaagggtcggtacttcgatttcgccacccagcgccgccatagcgaagttgatcgggacttcgcaatacaggttgttgccttcacgctcgaaaatcgggtgcwgtttaacctgaacctgaacgtacagatcgcctgccggtgcgccatgctcgcccgyttcamcttcgcccgcaagacggatgcggtctccagtgtccacccctgccgggattttaacggacagcgttttgctgcgctcaacacgaccatgaccatgacatttgttgcacggatctttgatcakcgtaccgcggccctgacagtgtggacaggtctgctgtacagcgaagaatccctggcgcatstgcacctgaccagaaccatgacaggtcggacaagtctgcggctgtgtacctggttttgcaccgctaccgtggcaaangtcacaytcttccagagtcggaatgcggatctctttggtcacgccacgtacagcttcttcgagggtgagctccatgttatagcgtaaatcagcaccgcgcgccgcacgttgacgaccacgtccgccgccaaaaatatcgccgaaaacgtcaccaaaaatatcgctgaagtctgcgccgccgccaaaaccgccgccgcccatgccaccttgctcaaacgcagcatgaccatactgatcgtatgccgcacgtttttgcgagtcggtcagaacttcataagcttccttgatctctttaaatttcgcctcggcctctttgtcaccctggtta

SEQ ID NO: 541 - DNA, 479 bp, Homo sapiens
  SITE (91): n equals a,t,g, or c
  SITE (454): n equals a,t,g, or c
  SITE (465): n equals a,t,g, or c
gcgacggccttgagcgaggaggagctggacaatgaagactattactcgttgctgaacgtgcgcagggaggcctcttctgaagagctgaaanctgcctaccggaggctctgtatgctctaccatccagacaagcacagagacccagagctcaagtcacaggcggaacgactgttkaaccttgttcaccaggcttatgaagtgcttagtgacccccaaaccagggccatctatgatatatatgggaagagaggactggaaatggaaggatgggaggttgtggaaaggaggagaacccctgctgaaattcgagaggwgtttgwgcggctgcagagagagagagaagagaggagattgcagcagcgaaccaatcccaagggaacgatcagygttggagtagatgccaccgacctttttgatcgytatgatgrggrgttgaagatgtgtccggcagtanctttcccgcanattgaaattaataa

SEQ ID NO: 542 - DNA, 366 bp, Homo sapiens
  SITE (164): n equals a,t,g, or c
cctacacttataggagttaccttacaggggttccttcaatttgtgttgatttacgcgagataacgctatggaattaaaggattattacgccatcatgggcgtgaaaccgacggacgatctcaagacaatcaagaccgcctatcgtcgacttgcccgcaaatacngtcctgatgtcagcaaagaaccggatgccgaagcccgcttcaaagaggtcgctgaagcctgggaagtgttaagtgatgaacaacgtcgcgctgagtatgatcagatgtggcaacatcgcaacgatccgcaatttaaccgtcagttccaccatggcgacggtcagagttttaacgccgaagattttgacgatatcttctcgtc

SEQ ID NO: 543 - DNA, 689 bp, Homo sapiens
  SITE (16): n equals a,t,g, or c
  SITE (582): n equals a,t,g, or c
  SITE (624): n equals a,t,g, or c
  SITE (657): n equals a,t,g, or c
  SITE (658): n equals a,t,g, or c
  SITE (659): n equals a,t,g, or c
ggtgacaagaggtgcntcatttcagtctcttctgcaggctgatttaattcttccactaagagcctaggacgaaagaraagtaaagaaggcgtataggcagaaggccctctcctgccacccagacaaaaatccagataatcccagagcagctgaactcttccaccagctttctcaggccttggaggtgctgaccgatgctgcagccagggctgcatatgacaaggtcaggaaagccaagaagcaagcagcagagaggacccagaaacttgatgagaaaaggaagaaagtgaagcttgacctggaggcccgggagcggcaggcccaggcccaggagagtgaggaggaagaggagagccggagcaccaggacactagagcaagagatcgaacgcctgakagaagagggttccggcagctgkaggaacagcagaggctcatccggagcagatacgccaggagcgtgaccagaggttgagaggaaaggcagaaaatactgaaggccaaggaacccccaaactaaagctaaaatggaaagtgcaagaaggaggatgagtcaaaaggtggctactccaaagacgtcctnctacggcttttgcagaagtatgggtgaggttctaaacttggngcttttcaagtaaggaagccaggcacttgtggnnntggagttttcaacccgcaaggcaagtggaa

SEQ ID NO: 544 - DNA, 582 bp, Homo sapiens
ttttttttttttttrgcacaaattcattgcctttattctgatgagcttctcttcatgggatttacggacactgaattatatccagactctgctaacttcttggttttctccctcctatcgcctaatgactctttaagctactacatgagtctaatccatgggcatcctgagcttcacaaattcacgtcgcacccagcgagaaacccaccgtcttcactgagtcattcaaagcttcccactgctggaatggcatcgacatctggctccttcgccagtggtcatagcgggctcgactctcttcattggtcagaatctcctttgccttctgcagtttctgaaaagtctccacagctttggggttttcaggatgcttgtctgggtgacattccagagctctgactttaaattctgccaggatttgttcaaccgaagatagttcatcacatcccagtaatgtgtagtaatcttcagtatcttctgacctgtaattcagtattgcatccatttagatgacttaatcagtccttcttccctcggaaacaagaggcacagtgagcttcgaattaacaggaagaaactctt

SEQ ID NO: 545 - DNA, 447 bp, Homo sapiens
ggtacgcagctggacttcgtaaaagaaggcctgaacgaaggtttaaattcaccaacccgaacgtcaaagatgagtgtggttgcggcgaaagcttccacgtttgatgcgcataccgataaccccaccgtggtcgcctgcgcgtggggtttgttttacctgattcgccgttatcgcggcggatcgcagccctgagaatgttatggattacttcaccctctttggcttgcctgcccgctatcaactcgatacccaggcgctgagcctgcgttttcaggatctacaacgtcagtatcatcctgataaattcgccagcggaagccaggcggaacaactcgccgccgtacagcaatctgcaaccattaaccaggcctggcaaacgctgcgtcatccgttaatgcgcgcggaatatttgctttctttgcacggctttgatctcgccagcgagca

SEQ ID NO: 546 - DNA, 650 bp, Homo sapiens
  SITE (638): n equals a,t,g, or c
gcccacgcgtccgcgaatccgtcaggccggaaccatggcagtgaccaaggagctcttacagatggacctgtacgcgctgctaggcattgaggagaaggcagcggacaaagaggtaaagaaggcgtataggcagaaggccctctcctgccacccagacaaaaatccagataatcccagagcagctgaactcttccaccagctttctcaggccttggaggtgctgaccgatgctgcagccagggctgcatatgacaaggtcaggaaagccaagaagcaagcagcagagaggacccagaaacttgatgagaaaaggaagaaagtgaagcttgacctggaggcccgggagcggcaggcccaggcccaggagagtgaggaggaagaggagagccggagcaccaggacactagagcaagagatcgaacgcctgagagaagagggttcccggcagctggaggaacagcagaggctcatccgggagcagatacgccaggagcgtgaccagaggttgagaggtgcaggtctatcaccccgcctatctcccctccaaggaaaggcagaaaatactgaaggccaaggaacccccaaactaaagctwaaatggaagtgcagaaggaggatkagtcaaaaggtggctwctncaaagacgtcct

SEQ ID NO: 547 - DNA, 345 bp, Homo sapiens
  SITE (323): n equals a,t,g, or c
  SITE (331): n equals a,t,g, or c
  SITE (335): n equals a,t,g, or c
attaaaaagtcctatcggaagcttgccttgaaatatcaccccgacaagaaccccgacaacccggagccgcggacaagtttaaggagatcaacaacgcgcacgccatcctcacggacgccacaaaaaggaacatctacgacaagtacggctcgctgggtctctacgtggccgagcagtttggggaagagaacgtgaacaccttacttcgtgctgtccagctggtgggccaaggcctgtttgtcttctgcggccttccttcacgtgctggctactgctgctgctgtctgtgctgctgcttaaattgctgctgcgggaattttaanccaagggncctnaagggcagga

SEQ ID NO: 548 - DNA, 1030 bp, Homo sapiens; identical to SEQ ID NO: 175
  SITE (776): n equals a,t,g, or c
  SITE (923): n equals a,t,g, or c
  SITE (1002): n equals a,t,g, or c

SEQ ID NO: 549 - DNA, 1046 bp, Homo sapiens
  SITE (818): n equals a,t,g, or c
cagggatgaggctgagaaatgtgtcgwgatcgccgggaggccctgaacgccggcaaccgcgagaaggcccagcgcttcctgcagaaggccgagaagctctacccactgccctcggcccgcgcactattggaaataattatgaaaaatggaagcacggctggaaatagccctcattgccgaaaaccatcaggtagtggcgatcaaagcaagcctaattgcacaaaggacagcacatctggtagtggtgaaggtggaaaaggctataccaaagaccaagtagatggagttctcagcataaacaaatgtaaaaattactatgaagtacttggagttacgaaagatrstggtgatgaagatttgaaaaaagcttatagaaagcttgctttgaagtttcatccagacaaaaaccatgcacctggagcaacagatgcttttaaaaagrttggaaatgcttatgctgttttaagtaatccagaaaagcgaaaacagtatgacctcacgggcaatgaagaacaagcatgtaaccaccaaaacaatggcagatttaatttccatagaggttgtgaagctgatataactccagaagacttgkttaatatattttttgggggtggatttccttcaggtagtgtacattctttttcaaatggaagagctggttatagccaacaacatcagcatcgacatagtggacatgaaagagaagaggaaagaggagatggaggtttttctgtgtttatccagctgatgcccataattgtattgatcctcgtgtcattattaagccagttgatggtctctaatcctccttattcctnatatcccagatctggaactgggcaaactattaaaatgcaaacagaaaacttgggtgttgyttattatgtcaacaagggacttcaaaaatgaatatamaggratgytattacaaaaggtagaaaagagtgtggaggaagattatgtgactaatattcgaaataactgctggaaagaaggacaacaaaaaacagatatgccgtatgcagcaaagtataccgtgatgatcg

SEQ ID NO: 550 - DNA, 518 bp, Homo sapiens
  SITE (479): n equals a,t,g, or c
  SITE (511): n equals a,t,g, or c
aagtaactcagctgtcatcttcattataaaaccacacattttcctctgactctgggcaatgacctgcgtatataagctgttagtcataagggctggatggggcagcatctcaatcatatagggcacaggacagacctcagtatcaccagcaagaatccattacagttcaacatgtaacctcgggmrcgggggaggctcggcggacctgctgattgggaaccgatatggsggcgactctgggcagcggggagcgytggmcggaaggatcaagaaatgcagaaattactatgaaattctgggagtttctcgagatgctagtgacgaagagcttaagaaagcttacagaaaactcgccctgaaatttcaccctgacaagaactgtgctcctggagcaacagatgctttcaaagcaataggaaatgcatttgcagtcctgagcaatcctgataagagacttcgctatgatgaatacggggatngaccaggtgactttcactgccctcgagccagnccttatt

SEQ ID NO: 551 - DNA, 1064 bp, Homo sapiens
  SITE (1062): n equals a,t,g, or c
  SITE (1063): n equals a,t,g, or c
  SITE (1064): n equals a,t,g, or c
ggcacgagcctcccctccccccactcctctcagtgggggcccctccagtccctgagaattggtactacgaaaaggtgaactcctgggcagaatcttgcctagagcttgcggagtccagccaggcccctgctgaagggccccagaccaccggccacttctcccccgtccatctgaccagctgggcccctgcgcccacctggcctccacgttccctctcctctcacccacacccctggccatggctaactactacgaagtgctgggcgtgcaggccagcgcttccccggaggacatcaagaaagcctaccgcaagctggcccttcgttggcaccccgacaagaaccctgacaataaggaggaggcggagaagaagttcaagctggtgtctgaggcctatgaggttctgtctgactccaagaaacgctccctgtatgaccgtgctggctgtgacagctggcgggctggtggcggggccagmacgccctaccacagccccttcgacaccggctacaccttccgtaaccctgaggacatcttccgggagtttttyggtggcctggaccctttctcctttgagttctgggacagcccattcaatagtgaccgtggtggccggggccatggcctgaggggggccttctcggcaggctttggagaatttccggccttcatggaggccttctcatccttcaacatgctgggctgcagcgggggcagccacaccaccttctcatccacctccttcgggggctccagttctggcagctcggggttcaagtcggtgatgtcgtccaccgagatgatcaatggccacaaggtcaccaccaagcgcatcgtggagaacgggcaggagcgcgtggaggtggaggaagacgggcagctcaagtcggtgactgtgaacggcaaggagcagctcaaatggatggacagcaagtaggcgctggccacccsgccctgccttcccaccaccaccaccgtgcatggggcagcaaacacgtggggccgcagacatagcctgatggttaataaatgtgccaagtgagttcatggcaaaaaaaaaannn

SEQ ID NO: 552 - DNA, 396 bp, Homo sapiens
  SITE (348): n equals a,t,g, or c
  SITE (350): n equals a,t,g, or c
  SITE (384): n equals a,t,g, or c
aagaaatgagatggagaagtacgagcggatccgagtggtggggarargtgccttcgggattgtgcacctgtgcctgcgaaaggctgaccagaagctggtgatcatcaagcagattccagtggaacagatgaccaaggaagagcggcaggcagcccagaatgagtgccaggtcctcaagctgctcaaccaccccaatgtcattgagtactacgagaacttcctggaagacaaagcccttatgatcgccatggaatatgcaccaggcggcactctggctgagttcatccaaaagcgctgttaattccctgctggaggaggagaccatcctggcaatttttcgtgcagatncnggttgcaatggcattcatgtgcacaaccaacttnatcctggcaccg

SEQ ID NO: 553 - DNA, 641 bp, Homo sapiens
  SITE (236): n equals a,t,g, or c
  SITE (412): n equals a,t,g, or c
  SITE (556): n equals a,t,g, or c
  SITE (584): n equals a,t,g, or c
  SITE (602): n equals a,t,g, or c
ggcgacccagctccctggaggcccaggcacctcatgtctgccctcaacccagagtggagcagaccttccctggagcttctcaggagccacttcaaaagttcgtgccctcgtgaggctggcatgcaggatggcaggacagcccggccacatgccccatggagggagttccaacaacctctgccacaccctggggcctgtgcatcctcctgacccacagaggcatcccaacacgctgncttttcgctgctcgctggcggacttccagatcgaaaagaagataggccgaggacagttcagcgaggtgtacaaggccacctgcctgctggacaggaagacagtggctctgaagaaggtgcagatctttgagatgatggacgccaaggcgaggcaggactgtgtcaaggagatcggnctcttgaagcaactgaaccacccaaatatcattaagtatttggactcgtttatcgaagacaacgagctgaacattgtgctggagttggctgacgcaggggaccttttcgcagatgatcaagtactttaagaaagcagaagcggntcatcccggagaggacagtatggaaagnctttgtgcaactgtgcancgccgtggagcacatgcattcacgcccgggtgatgcacc

SEQ ID NO: 554 - DNA, 429 bp, Homo sapiens
  SITE (36): n equals a,t,g, or c
  SITE (409): n equals a,t,g, or c
ggcacgaggcgcgcctggctgggccctgcggaggangggaaggagcgaaggagcgaaggagcaagcggagcgcmgtcgcccaagccaagccgcgctgccaaccctcccgcccgcccgcgctcctgtccgccgtgtctagcagcggggcccagcatggtcatggcggatggccckwggcacttgcagcgcgggccggtccgggtggggttctacgacatcgagggcacgctgggcaagggcaacttcgctgtggtgaagctggggcggcaccggatcaccaagacggaggtggcaataaaaataatcgataagtctcagctggatgcagtgaaccttgagaaaatctaccgagaagtacaaataatgaaaatgttagaccaccctcacataatcaaactttatcaggtantggagaccaaaagtatgttg

SEQ ID NO: 555 - DNA, 470 bp, Homo sapiens
  SITE (415): n equals a,t,g, or c
  SITE (419): n equals a,t,g, or c
  SITE (443): n equals a,t,g, or c
  SITE (451): n equals a,t,g, or c
ttcattgacatagggcattatgtacgtgatatcagtgcttatgaagaattggtatccaagctgaatttattagtggaggatgaactgaagcaaattgctgaaaatattgaaagcattaatcagaacaaagctccttygaaatatataggcaactatgcaattttggatcatcttggaagtggagcttttggctgtgtttacaaggttagaaagcatagtggtcaaaatcttttagcaatgaaagaggtcaatttacataacccagcatttggaaaggataagaaagatcgagacagcagcgtaagggaatattgtttctgaattaacaataattaaagagcagctttatcatccccacattgtacgttattacaaaacatttctggaaaacgataggttgttcatagttatggancttnataaaaggagccccgcttggagancatttcantcctttgaaggaaaacatc

SEQ ID NO: 556 - DNA, 1107 bp, Homo sapiens
acaagagcccttcctgcaggggaacctcaggcttcagagagccgaaaagttgggaggcgtaaccacttacaggccggaagtgtccggggtggacgcattcgggtagccgaagaagtcccaggattgccgaagaagtcccaggatttccgaagcgagccgaagcatcgcgacagttttcagagacagctgatcggttggagctgttgcgccgagcagtcatggcggcggccagagctactacgccggccgatggcgaggagcccgccccggaggctgaggctctggccgcagcccgggagcggagcagccgcttcttgagcggcctggagctggtgaagcagggtgccgaggcgcgcgtgttccgtggccgcttccagggccgcgcggcggtgatcaagcaccgcttccccaagggctaccggcacccggcgctggaggcgcggcttggcagacggcggacggtgcaggaggcccgggcgctcctccgctgtcgccgcgctggaatatctgccccagttgtcttttttgtggactatgcttccaactgcttatatatggaagaaattgaaggctcagtgactgttcgagattatattcagtccrctatggagactgaaaaaactccccagggtctctccaacttagccaagacaattgggcaggttttggctcgaatgcacgatgaagacctcattcatggtgatctcaccacctccaacatgctcctgaaaccccccctggaacagctgaacattgtgctcatagactttgggctgagtttcatttcagcacttccagaggataagggagtagacctctatgtcctggagaaggccttcctcagtacccatcccaacactgaaactgtgtttgaagcctttctgaagagctactccacctcctccaaaaaggccaggccagtgctaaaaaaattagatgaagtgcgcctgagaggaagaaagaggtccatggttgggtagaagaatgtgtatgacaaccacacacagtgaagctcttttttcaaagtaaatttgaagaaatgctacaagtatgagatgagatctaagtaaaggtgttaagatataaaaaaaaaacaaaaaaaaaaaa

SEQ ID NO: 557 - DNA, 1368 bp, Homo sapiens
  SITE (659): n equals a,t,g, or c
  SITE (944): n equals a,t,g, or c
  SITE (958): n equals a,t,g, or c
aatgtctggcagtgggcasagtgggggtgcgggggtgtaggtgccaagcgccatggcttagacccgagattggagtccggccgccccccgacagcagccgcctcctgccccccgtgcgccctaggcgccaccatgtcgggagacaaacttctgagcgaactcggttataagctgggccgcacaattggagagggcagctactccaaggtgaaggtggccacatccaagaagtacaagggtaccgtggccatcaaggtggtggaccggcggcgagcgcccccggacttcgtcaacaagttcctgccgcgagagctgtccatcctgcggggcgtgcgacacccgcacatcgtgcacgtcttcgagttcatcgaggtgtgcaacgggaaactgtacatcgtgatggaagcggccgccaccgacctgctgcaagccgtgcagcgcaacgggcgcatccccggagttcaggcgcgcgacctctttgcgcagatcgccggcgccgtgcgctacctgcacgatcatcacctggtgcaccgcgacctcaagtgcgaaaacgtgctgctgagcccggacgagcgccgcgtcaagctcaccgacttcggcttcggccgccaggcccatggctacccagacctgagcaccacctactgcggctcagccgnctacgcgtcacccgaggtgctcctgggcatcccctacgaccccaagaagtacgatgtgtggagcatgggcgtcgtgctctacgtcatggtcaccgggtgcatgcccttcgacgactcggacatcgccggcctgccccggcgccagaaacgcggcgtgctctaccccgaaggcctcgagctgtccgagcgctgcaaggccctgatcgccgagctgctgcagttcagcccgtccgcaggcccttccgcgggccaggtagcgcgcaactgctggctgcgcgccggggnaytccggctagaanccsggtggttccagccattcctgcagccaagggcactgggccagggcggcgcacgcgcaagargcgcgcttcgagggaatatgcgaagctgccgcgtgctgctgcacatgcgctttttcccttccgcttccctccctttcttcccacgggggartccgcagttgcccttgttcggaatccacgttccccgcgatcccgggagctggaggcgcatgcgcatccgcgattccctgcgaccaggccccgagagggcgagaccagaggggacggaagcattgcgcctgcgcggaactctcagcctctgcgcggagggcgtcccttcccaaccagccgtgggtgccaggttcccggttggaacctgcaataaactcgctgttcctcgcaaaaaaaaaaaaaaaaaaaaaactcga

SEQ ID NO: 558 - DNA, 615 bp, Homo sapiens
  SITE (574): n equals a,t,g, or c
  SITE (576): n equals a,t,g, or c
  SITE (596): n equals a,t,g, or c
  SITE (600): n equals a,t,g, or c
ggaactgtaaaatcctggacaccattggccgtggcacgttcagtgaggtccaggatcacatgctgattgggacccaaatggccatcaaaatcatccccaaggctggctcccttggcatcactctccagagagtgataagtrttttaaagttactctgtcacttcaatattgtacggttgtatcaagtgattgacacccccaacaccagttatttatttagtaacggagtatgcaagaggaggacacccacgcaaccaatacaccaccatggcctcatgagggaggagaaggcctagaccatgttcargcagattctgtcggccatgcagtagtgccatagcaaattgcgcagagacctgaacccagaaaacatcatccttgatgaggacggtaacktkaagatcgcagacttcggctttggtaccacattccatgatgggcagaagctgacagccctttgtagcacttaacccctacatggccctggaacgtttyctargycagggctaccaatgtgccaccatggatattcagagccttaaagtaaattttattaccacatggtgtcttgggngntcttgccctttctgcttatngcancattttagggtccct

SEQ ID NO: 559 - DNA, 441 bp, Homo sapiens
  SITE (430): n equals a,t,g, or c
gcggagccaagacggtcggggctgcttgctaactccaggaacaggtttaagtttttgaaactgaagtaggyctacacagtaggaactcatgtcatttcttaccaatgatgcgagctcagagtcaatagcatccttctctaaacaggaggtcatgagtagctttctgccagagggagggtgttacgagctgctcactgtgataggcaaaggatttgaggacctgatgactgtgaatctagcaaggtacaaaccaacaggagagtacgtgactgtacggaggattaacctagaagcttgttcaatgagaatggtaacattcttgcargggcgagctgcatgtctcccaaactcttcaaaccatcccaatatcgtgccatatcgagccacttttattgcagacaatgagctgtgggttgtcacatcaatcaanggaaacggttc

SEQ ID NO: 560 - DNA, 504 bp, Homo sapiens
  SITE (420): n equals a,t,g, or c
  SITE (470): n equals a,t,g, or c
  SITE (497): n equals a,t,g, or c
gcttttttaaagaaaactggtgatttatttgctatcaaagtatttaataacataagcttccttcgtccagtggatgttcaaatgagagaatttgaagtgttgaaaaaactcaatcacaaaaatattgtcaaattatttgctattgaagaggaggtaagtagtaaaacttcaatcttatatttattgtagttacgagtcaagaaatagaacctaatattaaaaaatggattttttaaaaaactgttgaaaattaggtttgtacaaccaaatactttatcctaaaggatycttgaatatatwgaacmatagaaataaaatatcmtwaaaatggaatcmgaaacagtagtgtaagaaataaaagggggcggccggctgcggctgggtgcagtggctcacgcctgtaatcccagcactttgggnagaccgaggcgggtagatccatgcggtcaagagattgagaccagcctggncaatgtggtgaggcccccgtctctacntaaaaat

SEQ ID NO: 561 - DNA, 601 bp, Homo sapiens
  SITE (601): n equals a,t,g, or c
gacgaattcgtgctgcgcctagaaggggttatcgagaaggtgaactgggaccaagatcccaagccggctctggtgactaaattcatggagaacggctccttgtcggggctgctgcagtcccagtgccctcggccctggccgctcctttgccgcctgctgaaagaagtggtgcttgggatgttttacctgcacgaccagaacccggtgctcctgcaccgggacctcaagccatccaacgtcctgctggacccagagctgcacgtcaaggtcagctggtctacacccctctcagcctcaagacaaggccccagagctgctctagccaggcccgccggacactagacctccagagccctgtctattgaataggcgtagcctctctctctggacacagggctgccaggggacaaagcccagccaggagttttagctcctgcctaccaggtgatagaggccctgagccacacgagtcatttccaccagctgccccaccagcccctccaaagagtcatggctgacccagccctggagactcagaccttgacctagccctaccacaaggcacctagatctaccwtccaagggaaccctttttcccttn

SEQ ID NO: 562 - DNA, 698 bp, Homo sapiens
  SITE (600): n equals a,t,g, or c
  SITE (611): n equals a,t,g, or c
  SITE (615): n equals a,t,g, or c
  SITE (644): n equals a,t,g, or c
tggagctcgcgcgcctgcaggtcgacactagtggatccaaagaattcggcacgaggaggtcgttgccgagaccgataacggtgtcgatgccttgcaacttgcgcgcgagcatatgccggacattgtcatactggatattggaattcccaaactcgatggcctggaagttatatgccggctgtcatcaaccaaacaggcacatcccttcaaggtgctggtgctgacgtcccaggcgcccgggcatttctcgatgcggtgcatgcaggcgggtgctgccggctacgtgtgcaagcaacaggatctcaccgagctgttgagcgcggtcaaggcggtgctgtgcgggtacagctacttccccaaccaggcgttgaactcggtgcgctccacaatgggtaacgccagcgaagcggacatggtcgagcgcctgtccggccgggagatgatggtgttgcagcagttggcccgcggcaagaccaacaaggagatcgccgatggcatgttcctgagcaacaagactgtgagcacctacaagacccgcttgctgctcaagctcaacgcccgctcgctggtgggacttgatcgactggccagcgtaacggnctggtgtaggncggnctcacatttacatccagtcagaaaaaagnctccgcaagggaggctcttgtttatcgttggatcgattagaggatcgaagtcgg

SEQ ID NO: 563 - DNA, 904 bp, Homo sapiens
  SITE (902): n equals a,t,g, or c
atgctggaaccgggtttatcgtcgcccatcaatctttctctgccagaaccgctgaccttaatccacgttgacgggccactctttgaacgggtgctgattaatctgctggagaacgcggtgaaatatgcgggtgcgcaggccgaaattggtatcgatgcccacgttgagggcgaaaatctacaactggatgtctgggataacggccccggtcttccgccaggccaggagcagacgatatttgataagtttgctcgcgggaataaagagtcggcagtaccgggrrtagggcttggactggcaatttgtcgggcgatagtggatgtacacgggggcactattaccgcgttcaaccgaccggaargtggtgcctgttttcgtgttacacttccccagcaaactgcccctgaacttgaagaatttcatgaggatatgtgacaaacgtyctgattgttgaagatgaacaggctattcgtcgctttctcgcacggcgctggagggcgacgggatgcgcgtctttgaggccgaaacgctgcaacgcggcttgctggaagcggcaacccgtaagccagatttgattattctcgatctcggcctgcccgatggtgatgggattgagtttatccgcgacctgcgccagtggagcgcggtgccggtgattgtgctttccgcacgcagcgaagagagcgacaaaatcgccgcgctggatgccggagcggatgattatctgagtaagccgtttggcattggcgaattgcaggcccgtctgcgcgtcgcattacgccgccactctgccaccaccgcgcccgatccgctggtaaaattttccgatgttaccgtcgatttagccgcccgcgtgattcaccggggtgaggaagaggtgcatctccacaccaattgagttncg

SEQ ID NO: 564 - DNA, 764 bp, Homo sapiens
caaacaaagaggctgcagcaggttcaagtgaccttgatccttcgatgatattggacactggagagatcattgatacaggatctgattatgaagatcagggtgatgaccagttaaatgtatttggagaggacactatgggaggtttcatggaagatttgagaaagtgtaaaattattttcataattggtggtcctggctctggcaaaggcacacagtgtgaaaagctggtggaaaaatatggatttacacatctctcaactggcgagctcctgcgtgaggaactggcatcagaatctgaaagaagcaaattgatcagagacattatggaacgtggagacctggtgccctcaagcatcgttttggagctcctgaaggargccatggtggccasccycggggacaccaggggcttcctgattgacggctatcctcggraggtgaagcaaggggaagagttcggacgcaggattggagacccacagttggtgatctgtatggactgctcggcagacaccatgaccaaccgccttctccaaaggagccggagcarcctgcctgtggacgacaccaccaagaccatcgccaagcgcctagaagcctactaccgagcgtccatccccgtgatcgcctactacgagacaaaaacacagctacacaagataaatgcagagggaacaccagaggacgtttttcttcaactctgcacagctattgactctattattttctgaaggcaaaaatgcatgtttgttaggatgggaaac

SEQ ID NO: 565 - DNA, 656 bp, Homo sapiens
  SITE (99): n equals a,t,g, or c
gaccttgaaggaaccaaaggccaagaarggraaaaaccagagccctgggcctttcccagaacatcagcagggtgaggtttctgactgtgttgtgctccnactcccatctccagattggagacccacagttggtgatctgtatggactgctcggcagacaccatgaccaaccgccttctccaaaggagccggagcagcctgcctgtggacgacaccaccaagaccatcgccaagcgcctagaagcctactaccgagcgtccatccccgtgatcgcctactacgagacaaaaacacagctacacaagataaatgcagagggaacaccagaggacgtttttcttcaactctgcacagctattgactctattattttctgaaggcaaaaatgcatgtttgttagaatggaaacagaaaaacattaaaaagttcattccttaamamaatgtttcaagttaaaccttttgtgtcaccgcccccaccaaccaccacctyctaaatcctgacagcactgtttgcttcccagctagacctgtgtgagaggtgtctggaaatcatgcatggtgtatttgggactatatcaacctattctccacacttcagacaactgtctgcactcacggcaacacactttgtatcatgcaggccacactcagagc

SEQ ID NO: 566 - DNA, 510 bp, Homo sapiens
  SITE (8): n equals a,t,g, or c
gcaaagangggggccgtggaaaatgtgagaagaaatgaattcaaccaacagtgagccccagggtgtttttcctgaatgtgccatttgattccatcatggagcggctgactctgagaagaattgatccagtcactggggaaaggtaccacctcatgtacaagccacctcccaccatggagatccaggctcgcctcctgcagaacccaaaggatgctgaagagcaggtcaagctgaaaatggacctgttctacaggaactcagctgacttggagcagttgtatgggtcggccatcaccctcaatggggaccaggacccatacacagtcttcgaatacatcgagagtgggatcattaatcccctgcccaagaaaatcccctgatgggttcagagccaggagcgctgccccagggaaagagttaatcccctgcccccagccccccagcctcggcacagctcccctaaaaagccaataaagcctgctggatacagaaaaaaaaaaaaaaaaaaaa

SEQ ID NO: 567 - DNA, 266 bp, Homo sapiens
  SITE (247): n equals a,t,g, or c
  SITE (248): n equals a,t,g, or c
agtgaaggataaggatacattgtgaaaaaggtgggaaaatcacttgaacacaggaggcagagattgcagtgagccaagagtgccccactgcactccagcctaggcaacaragaaagactctgtctgaaagaaaaaaaaaaagttgttgctatatagcacataatttcattgtcatctcatttaaaattggaatagcacatttgggttgaattcttgtgcctgcagttacatttgcttctggcttaanntcactggctgtagggagg

SEQ ID NO: 568 - DNA, 324 bp, Homo sapiens
  SITE (285): n equals a,t,g, or c
  SITE (302): n equals a,t,g, or c
ctatgccgttttttccagttggtgtgctttctttgcaactgatacagactaggaaaagaacgcaatttaccagtaacagtagagctgggatttaaatctaagtgctttgacttcaaagacaaggttccaagctgctacacataccaattctsgttwaaagtgtattccatttcttttgtgctttcatattgaccattgtgtgttaatcctttcaattggaagaagagggagacagtgccattattgcaaatttcacagtccacagggcccgttatgtagcctttnaccacccacaggttttnccatttttgggggcattatttt

SEQ ID NO: 569 - DNA, 284 bp, Homo sapiens
ggaggtggggaggtacagctgggagtgtgggggatggggaaggatggggagggaacgggcccgtggacaacttgcatttgccctgacacccaccctccctgcagctctacaccctcaccgtgatcggcccaggaccgccagattgccagccagcccagatctctcgccgttactcggactttgagcggctgcaccgaaacctgcagcggcaattccggggcccaatggctgccatctccttcccccgtaagcggctgcgcgaaattttactgcagagaccattg

SEQ ID NO: 570 - DNA, 540 bp, Homo sapiens
gagagacctgtctcaaaaaaaaaagagaaaaaagatttcaagtaaatagtagaaatttgcataaattgttccagtgcatactttgttaagcaaaattatttaaagaaaatggtaaattatatatgtaaaagcttaccctaaattttattagaaatattttaaaaattaaaaagatacttttgaattcttaagacatgggttttagtaaaataaagtataaaaagtttgtgtcagtagatcagaatgtaattgagagaaataaacatttggagctctaggtgaggattgtaattatagccccaccatgtgtttgcgcacagctttaaacctcctcgtttgtgtgaacatcgtgcccagtgtaggcagaatctgagactttgtgaattgtatgactgtcccattttatgctttaacctgctgsctctcagtagktatcataaagcaagkatttaraaawctatgagagkttttctcattgrggkatggkttcagaaaaccgtttaaatataaaaactaaacactgaaagctttttaaatgct

SEQ ID NO: 571 - DNA, 498 bp, Homo sapiens
  SITE (53): n equals a,t,g, or c
  SITE (70): n equals a,t,g, or c
  SITE (154): n equals a,t,g, or c
cccccaaagatacaacattcctggaaaaaggcaaacctttggagaaaataaanggatccaatggttcccnggggtttttggggaggaacagatgaataagtggagcataggggatttttagggcagtgaaattagtctgtttgcctactgtaanagtagatacatgccatacacttgtccacacccatagaatgtacagcacccagagtgaacccacacatgaactgtggacttcgggtgataatgatgtgtccatgtaggttcctcatttgtgacaagtgtaccactctggtgggggctgttgatagggaggggggctgtgcatgtgtgaggaaggggatatatggaaattctctgtagcttttgctcagttttgctgtgaacctaaaactgctcaaaaaaaaaaaaaagtaaattcattgaaaaaatactggaaggaaataggccaaaatgataaatatcattttttaaaaataattcccactgaagtctgttggc

SEQ ID NO: 572 - DNA, 439 bp, Homo sapiens
  SITE (414): n equals a,t,g, or c
gcccacgcgtccgaacatatacaatataattatttaattgacccctttgaaagtcagttgcagattcgtgaccctgtgttcctagaaacttgtatctcctaggaacaaggtcctttgtcttacatagtctgtcgttcatgacgttgacatttttgaggagagcttacttgctggttatttggtagagtgtccttcagtttgggatgtctgtttcctgaggtttagattcagataagactaacacatattcctttcagtgcgtcacattagtaagcacattatgtcagtttttcctcctgttggtaactgattctgatcacatggktaargtcgtggctgcaaagrggcamcatggagttaccatttctctttggtaaactgataactaattgtccgggattaattaatcctggntggtaataaactttcactggggcag

SEQ ID NO: 573 - DNA, 529 bp, Homo sapiens
  SITE (499): n equals a,t,g, or c
gcactaatggcaactcaaagctgctgagctctgccctgacggcatgcgcccccgcttctgtgagagcacgcttcctggcatgggggtcgaatcatgtcgataaaatgggctcggtttcatgaagtaccccacataacagtgagattcataggaccaaagcatggggaggaaaaggaaaaagaaaaagataagattaaggagaaggagaaagattctaaagacaaggagaaagataagaagactgtcaacgggcacactttcagttccattcctgttgtgggtcccatcagctgtagccagtgtatgaagcccttcaccaacaaagatgcctatacttgtgcaaattgcagtgcttttgtccacaaargctgccgagaaagtctagcctcctgtgcaaaggtcaaaatgaagcgcccaaagggagccttcaggcacatgacacatcatcacaaagagggtggctgtgaggtgaccccagacactgcagaacgaggtgcancctctgcgttttgggatgtcttggaatgtg

SEQ ID NO: 574 - DNA, 835 bp, Homo sapiens
  SITE (577): n equals a,t,g, or c
gttctagatcgcgggcggccgctcgcgatctaggcagcttcaacgtgagtaattgtggcgcggcccgaggctgccgggagccccccagaagaaggcgggtgcactgagggcacacctgccaaggaccacagggccgggcgaggacaccaggttcacaagtcatggccgctctcgatctcagactcggacagtgggctggaccccggccctggcgcaggggactttaagaagttcgagcggacgtcatccagtggtaccatgtcgtccacggaggagctggtggacccagacggtggagccggggcttcagcctttgagcaggctgacctcaacggcatgacccccgagctgccggtggccgtgcccagtggaccgttccgccacgaggggctgtccaaggcggcccgtactcaccggctccggaagctccgcacgcccgccaagtgccgcgagtgcaacagctacgtctacttccagggtgctgagtgtgaagagtgctgcctggcctgccacaagaaatgtctggagacgctggccatacagtgcgggcacaagaagctgcagggccgcctgcagntgttcggccaggacttcagccacgcggcccgcagcgcccccgacggcgtkcccttcatcgtcaagaagtgcgtytcgagatcgagcggcgggcgctgcgcaccaagggcatctaccgggtcaatggggtaaagacacgcgtggagaagctgtgccaggccttcgagaacggcaaggagctggtcgagctgtcgcaggcctcgccccacgacatcagcaacgttcttcaagctctaactgcgttcatttccccgagccg

SEQ ID NO: 575 - DNA, 447 bp, Homo sapiens
  SITE (427): n equals a,t,g, or c
  SITE (432): n equals a,t,g, or c
gagtttggagaaggtaaccaggatcagggatttagggtgagccattctggcttttcttgtcatatccactttgagtgagaaagagccagtttatcactgttcttagttttgaagcagagagtgatcaacttacctgcttgctgaaatttaaaactttgcaaagaggagatgtgcagagagatgattgctagtgttgtgaaataagggaagtttacttgtgatgctttgacacattctgtctctttcttgaggattcttctcccccatcttgtttattagagccctttggtctttagtctctgtcaaacacacttctggacagaatatgraatcatcagtatatgcagcataattttagttaccycttccaagaggtggtttcattgaggcccatkgttaccatgaatcaakgaggkgcttcccagtngagantcccgtaccaaagag

SEQ ID NO: 576 - DNA, 177 bp, Homo sapiens
  SITE (2): n equals a,t,g, or c
gncttaatttacttaatttctcccttactgttcattcattcaacagtactttagtgcctaccatgtgccaggcactgttttatgaagtaggggtaccacagtgkaaagacaaagtctgatcttaatagaacttatattcaagtgtgtgagatattttagatattattggatatttaa

SEQ ID NO: 577 - DNA, 161 bp, Homo sapiens
  SITE (13): n equals a,t,g, or c
tgttgccgcgaantggtatggccgwcagatgtgtccacgctggatgttgatgcaaggtggtagcgaaaccactcaccgtttcagccgcttatcctttcaccgggcaatggtcgggcgacgtttgccgsttctgaaaaccgcctcgggcctgacctggctgg

SEQ ID NO: 578 - DNA, 457 bp, Homo sapiens
tcctttctttcctgtaacatacccataatacgtttatgctgttgaatagttataccttttaccccaaagtgaactttattacatagacatttttattacatacagtttaatgcttttcctcataaacatccactgagtacttactgtgtcaaaaactttcaaaattttaatatataagatgaacacagctatgatcccgacttccaaagatttcagagtactctcacagattcattaataaattaggaccttcagcttgttttctctttattgatcaataccatgaatccttcatctgcacatacctgacttcttttcttcattgttgtctctctcaccattatcacggtgcacaaattcatccccgtcactttctccatctgatttgtcggtgtcactgtcatcagtactgtcatcatgcttatcttgatccatgtcctcaggatagccatcatct

SEQ ID NO: 579 - DNA, 576 bp, Homo sapiens
  SITE (569): n equals a,t,g, or c
  SITE (575): n equals a,t,g, or c
ctgctgcccgccgcctccgagctggctcatgtgaagcagctggcctgttccatcgtggaccagaagttccctgagtgtggcttctacggcctttacgacaagatcctgcttttcaaacatgaccccacgtcggccaacctcctgcagctggtgcgctcgtccggagacatccaggarggcgacctggtggaggtggtgctgtcggcctcggccaccttcgaggacttccagatccgcccgcacgccctcacggtgcactcctatcgggcgcctgccttctgtgatcactgcggggagatgctcttcggcctagtgcgccagggcctcaagtgcgatggctgcgggctgaactaccacaagcgctgtgccttcagcatccccaacaactgtagtggggcccgcaaacggcgcctgtcatccacgtctctggccagtggccactcggtgcgcctcggcacctccgagtccctgccctgcacggctgaagagctgagccgtagcaccaccgaactcctgcctcgccgtcccccgtcatcctcttcctcctcttctggcctcatcgttattanggggcng

SEQ ID NO: 580 - DNA, 358 bp, Homo sapiens
  SITE (321): n equals a,t,g, or c
  SITE (343): n equals a,t,g, or c
gtggatttcagtttcctccatgtcttttcatggcttgataatgcatttctttttagagccaaattatgttccatcgtctggatgtttatttattcacctactgaaggactgttggatgcttccttttggcaattatgaggaaagctgttataaatatctgtgcaggctttttgtgtggacataactgaaatatttttaaagttatatttattgaggtataattacattcagtaatagtcacactttttagtgtagagttctgagttttgacagttgtatctaatcatgcaatcaacaccacaatcaagatgaagaacaggnccctcacttccctaacttcttncctatccctttttag

SEQ ID NO: 581 - DNA, 912 bp, Homo sapiens
tgagactgattaggggaggggatttgcacagggaggtaagctggtgtcatgctgagcatgcagatgcatttgctccctggatgcatagcaggtgattctgccagcatgcaccagtgcagccttaccagttgtttacatccagcatctgttctgattgtcagcatctgtcccatgctgcttgtcacatatctggagtttcactctgtgtagatgagctgtcattcaggacactaggagaaaaatctgagtgggtcattgtgcccatatccacagaaaatgcagaagttgaacagcttgcttgacaaccctcaaacatctttgagcacctggtacagatgtttatgagaatactctaagatctcaacccttgatcccaaaggcacacaatcacagagcattccttttgactgtaaactgtttaccttgcttttgagagccaaacattgtacccaacctggaaaaagtaactaccccaattaaagtgcctcatgtgtccccagagcatggcttaacttcagggacaatcacccagggaactaataactaaccagttgttcaacagcgggttaagctcagcagttttcacagtagagcagaagtccccaggaaacaaagggttagtcattagctgagatgttgattttaaaacaccttgaccttaacttttttacattattacttttaaatctcctttgggattggggaggctggccaaaataagtcttaaaactgcttatgtcatatttggattttaagttcatgacattcggaacagcaaagccatatatgcaatgtttttatgccattaaatgtctgattccaattaaaatataacaacgtatgtgtctttctagaagtcttaactcaaaggtggttctaattttctcagaatatcagtgaccctggatgtta

SEQ ID NO: 582 - DNA, 440 bp, Homo sapiens
  SITE (370): n equals a,t,g, or c
  SITE (386): n equals a,t,g, or c
  SITE (407): n equals a,t,g, or c
  SITE (418): n equals a,t,g, or c
ataactaaagaataaaaatataggggaaaaggtagccaagggatagatattgatattcattttctttttacaactttattaagttgtaatttgtgtgcaacagattgcatatatttgaagtatataacttgactaattttgacaaatatatacacccatgaaactaccagttataattttaaacattttcatgaccctccaaagtttccttgtgtccttttgcaatacacgcaaacacacacaccccacacacagtatgtaggcaaccattgatctgccttctgttacaatagggttagtttgcatcttttaggaactgtacataactggaaatcacataggtatatactcctttgcatctgggcttctntggactcaggccatantggtttgggggttccatcccntatggctgttnccatgtactaggtaacgggcat

SEQ ID NO: 583 - DNA, 529 bp, Homo sapiens
tcttttttttttttttttttttttgtaattcactagtttaatttctcatccagaacagccctgtccaatgtagacagtacaacgaggaaatgcatatttagttaatttaactttgactggccatgtttggctagtggccaccacactggatagctcasatctgaatgtgagcccagcggaggcaggaactttggtctctctcattcctcactcctcgtctgggtctcggcccacctgtgcaggtgtaccaggtctgaatgagcccccagatgatggtgttacacttgtcacaggtctgcttgacgctcttgctcttctccttgtaaaagcggtgctcaaggagcactcggatgtttggctcatcctcattggggtccttcagctcctggagcttcagccggaggtggatgagtcgcaccacggcatccttctgcttctccgactgctcgggcagctccaraatcacctgcttgcactcctcgatcgcctgccgcagctgctggacgtcagaggccaggaacagacccac

SEQ ID NO: 584 - DNA, 446 bp, Homo sapiens
gcagagactcatttcctcttcaataggacaggatgagaactcagagggtgtggccactaacctgtctttcctgaggctctccttgtcttgtctgggcattggctggcctccttacatgtcaccatgaggcattcttcctggccaccaatgttttgtttagactttcccatactatctacccagagtctttcaatttgcttcaagcttaactgtggtcagttcggagttgaaattcaagtgcacaatgtgacaatgacgtctgtgcctttgtttctggaataaataggtaaactctgaggcggagaggaaagagggagtggttcttgcactagagtggaactaacagcccatctacttcataaggcatcgatgaattgaaaaaacaaaactctttgcagaccccatttctttcttttcttttctcttttcttttctttctttttttg

SEQ ID NO: 585 - DNA, 501 bp, Homo sapiens
gctcttttaaatcttatcagctcaaaagtttcgaaccgtatgaactcaatcatctagattaggcatgggtgagagtctgagaatgatctttcctaaggtacagttcctatctatctgtgaaattctgaaattcagacaggttatttgctcccaaaatggtggggcaacgatgggatagcaattataaacattcccgttcaaaaaaggagaaaatagaaggagaaatggagttacctgttttagtcaatttcataatccagcctgggaaaaacatcctctgtgatttgagggtccacacttgtgggctcagggctctgccctttagatcatccttcctttttcatgaaaggtggcacatgtttgtggctgagcagtttcatcagcctgtttcctgcctgtggtattttgggagtctgagagtcttttttgaaattttgtttaaaattttgkcttctctttccccctttcaatttaaactggcagtgtttctgtttatgtaat

SEQ ID NO: 586 - DNA, 596 bp, Homo sapiens
  SITE (72): n equals a,t,g, or c
cattgctctaatataagtatgtaggaaaagaatctctgggtcatattgtaaatatatgtttaatgttataanaaactgccaaactattgccccaagtgtttgtaccattttattccccaaccagcatatatgarttccagttgctccatgactctgtcaacagtactgtcarcccttttaatttcagcctttcttggggttaagtgctatctcattgcagtcttcaggaaaatacatttccttgaatattaatgatattgactacctttccatgagtttattggccattcataaatttctcttgtgaagtatctctttcagtttkttccctattttaaattaggtttgtcttttattattgagatttggaatttttaaaawatcttaamacmagttatttgccagatatatgtatttttaatatttttctctatatgtcttatccccattttcttaatgatgtctttcataaatagaattttcatttttataaaattcaatttataattttttatggtttctctttattaatcccatttaagaaatctttgtgccatgattatgaagatgcactctaatgttttttcccagaagct

SEQ ID NO: 587 - DNA, 542 bp, Homo sapiens
  SITE (377): n equals a,t,g, or c
  SITE (397): n equals a,t,g, or c
  SITE (441): n equals a,t,g, or c
  SITE (507): n equals a,t,g, or c
gaactccatgaagcccttcaaggacatggactactcacgcatcatcgagcgcctcctgaagctggcggtccccaatcacctcatctggctcatcttcttctactggctcttccactcctgcctgaatgccgtggctgagctcatgcagtttggagaccgggagttctaccgggactggtggaactccgagtctgtcacctacttctggcagaactggaacatccctgtgcacaagtggtgcatcagacacttctacaagcccatgcttcgacggggcagcagcaagtggatggccaggacaggggtgttcctggcctcggctttcttccacgagtacctggtgagcgtccctctggcgaatgttccgcctctgggcntttcacrgggcatgatgggntcagatcccamtgggcctggtttcgtkgggccgcttttttccangggmaatatgggcaacgagctgtgttggcygttcggtcattcatcggacagccaatagccgtcctnatgtaagtccacgattattaagttgttcaattatg

SEQ ID NO: 588 - DNA, 378 bp, Homo sapiens
  SITE (376): n equals a,t,g, or c
aggagactgagaagacaaggctggaattccatagctcctatagatccagggtcgctcaccctctggtgtgcctcagagcagtcactctagtggacgtgcagggagaggaataccacatggtgtggcagcaaagcaaggagcccggcaccaccaggccgctccgtggtgctggtagcaggtgctgcatgtttataccaaggtactgtgaagcttccctggaagggktctttctcgacatctggtggccaagctgaaagtggattaccatttgggacatctcataactaaaagatgatgagccagcggggcctctgcacagctttctgcacgatggaccctgcaaaggtacagctgttgccctgcccctgggcttttntg

SEQ ID NO: 589 - DNA, 483 bp, Homo sapiens
  SITE (418): n equals a,t,g, or c
  SITE (431): n equals a,t,g, or c
  SITE (466): n equals a,t,g, or c
  SITE (482): n equals a,t,g, or c
tttttctttttttttaaaacaacagctttcaggtcttaaatgcagtcacagatcaataacattgcattttgctaaaagaacccttcttaccattcccctccctgaaccagcttctccttttacagtatttatgtgcactcggcagccagagcctgcagaggcgaaaggagacagtcagtgtccttaggtgctcgcctgcaagtcaggagtggggaggctgtgtacctgggcagtatggtcccctgactgtatctctgttgtgtggcacaggagacaaacttcaggcacctgggaggggacactggcacagcccctgaacaacagtagttcagaaggcacagctgtttcctgtgcctcacccgcagcagctgggtccacctggcaatttctggcagttctyttgggataggaaagtggntgttcaggcaagnccagctttgtkgttcccaggtcatttttgggcgcnatggttagggaccccnt

SEQ ID NO: 590 - DNA, 344 bp, Homo sapiens
  SITE (77): n equals a,t,g, or c
  SITE (334): n equals a,t,g, or c
  SITE (341): n equals a,t,g, or c
  SITE (344): n equals a,t,g, or c
gaccttcctccgtcccggccgttagcccagccaagcccagccaagcccagccaagccccgccgatcgcgggcaccgnagccagccccgcagcggagggaccacagagcaccagcctgcatggaacttccttcctcactcagcttcccacgttgccagctgggacaggggagatggagtaattttgctgtggaaagacttcacgtcttgccgaatgaaagtcccgcctgtctgtcacgctgatgcccgtgcagctgtctgagcacccggaatggaatgagtctatgcaytccctccggatcagtgtggggggccttctgtgctggcgtccatgancaaaggncgn

SEQ ID NO: 591 - DNA, 253 bp, Homo sapiens
  SITE (244): n equals a,t,g, or c
ggcacagtgcaatatttaagtgtaaatcttgttctacaagaaaggaaacttgcttacagtttaaaacaatgastgtttctacacatgatcttgtatactwstwcrcaasgaaaagggggttttgtaaacactgtagaatagtctcatattcatttttttatagaaatgttattccaatggtgcattttttgtttaataaataaagttttgatacaaaaaaaaaaaaaaaaaaccccgggggggncccggtccc

SEQ ID NO: 592 - DNA, 539 bp, Homo sapiens
  SITE (440): n equals a,t,g, or c
  SITE (463): n equals a,t,g, or c
agtctcgctttttctttccagtgttggctgacttacagctcttataaactagtggcaatttctgaacccagccggctccatctcagcttctggtttctaagtccatgtgccaaaggctgccaggaaggagacgccttcctgagtcctggatctttcttccttctggaaatctttgactgtgggtagttatttatttctgaataagagcgtccacgcatcatggacctcgcgggactgctgaagtctcagttcctgtgccacctggtcttctgctacgtctttattgcctcagggctaatcatcaacaccattcagctcttcactctcctcctctggcccattaacaagcagctcttccggaagatcaactgcagactgtcctattgcatctcaagccagctggtgatgctgctggagtggtggtcsggcacggaatgcancatcttcaaggaccgsgcgctanctcaaktatggraaggaaatgccacgtggtctcaacacaatttgaaatgattctgtgtggtggaccgtccaaagtt

SEQ ID NO: 593 - DNA, 529 bp, Homo sapiens
  SITE (417): n equals a,t,g, or c
  SITE (418): n equals a,t,g, or c
  SITE (487): n equals a,t,g, or c
  SITE (520): n equals a,t,g, or c
gtctcggtccctggactcacccacttccagcccaggcgctggcacgaggcagctggtgaaggcttcgtccacaggcactgagtcctcagatgactttgaggagcgagacccwgacctgggagacgggctggagaatgggctgggcagccccttcgggaagtggacactgtccagcgcggmtcagacccaccagctgcggcgactgcggggcccagccaagtgccgcgagtgcgaasctttcatggtcagcgggacggagtgtgaggagtgctttctgacctgccacaagcgctgcctggagactctcctgatcctctgtggacacaggcggctcccagcccggacacccckttttggggttgacttcctgcagctacccagggacttcccggaggaggtaccctttgtggtcacganncacggctgagatagaacaacgtgccctggatgtgcagggcatttaccgggtcagcgggtcccgggtccntgtggagcggttttgccaggtttcgagaattgncgagcgttg

SEQ ID NO: 594 - DNA, 446 bp, Homo sapiens
  SITE (390): n equals a,t,g, or c
  SITE (428): n equals a,t,g, or c
tgtttgtatggatatcgcttctcgggtattgttctcacccggtgctatcgccgtttttcctgcaagttttattttcatgtcacagtctacatccgtgcttcgtcgtaatggatttacttttaaacagttttttgttgctcacgatcgctgtgcgatgaaagtgggaacggatggtattttattgggcgcatgggcaccggtggctggggtaaaacgttgccttgatatcggcgcgggtagcgggttgctggcattaatgctggcgcacgaaccgatgacagcgtgatgattgatgcagttgaactggaaagtgaagctgccgcgcaggcgcaggaaaatatcaaccagtccccgtgggcaragcggattaacgtccatacggcggatatncagcagtggatcacacagcagacagtacgcttcgattnaatcatcagtaacccacc

SEQ ID NO: 595 - DNA, 463 bp, Homo sapiens
  SITE (429): n equals a,t,g, or c
  SITE (441): n equals a,t,g, or c
ggcacaggtttgtccggcggaaattcaagcatacatttggagaggacctcgtggtgtgtcagattggcatgtcctcctatgaatttcctccagctctgaagccaccagaagacctggtggtgctgggtaaagatgcttccgggcagccaatttttaatgcttctgccaaacactggaccaattttgtcattacagaaaatgcaaatgatgcaattggtatccttaacaattctgcctcattcaacaagatgtcaattgaatacaaatatgagatgatgccaaatcgcacatggcgttgtcgagtgtttttacaagrtcactggcttagctggaaggttatgggaaccaagaaaacaagtkaaacatggcagctgccgracgagcttttggaaaattcttgcaaaaaacacagcccacttgatgccatcnggtgcaaaagtntcacaatggccatacagggctc

SEQ ID NO: 596 - DNA, 413 bp, Homo sapiens
  SITE (364): n equals a,t,g, or c
  SITE (394): n equals a,t,g, or c
cggaaatagattatgtaatccaaaatagtgcttgcacatcaggaaatactggagggttctgttcaacatggaaactccaaggaccactggacgcgggcactggaatgctgactttgatttggtgaccctcaatccacttcgagttattggtaaatcacataattttaatttgatacggaataatcatacatgtttcttgggagcatgtggtaatctgattcatccatgcaatgtgtaacgatccaataaaggttcccaggacattcatcaccctgaacatttgttattatggttattattttgagacagagtcttgcactgtcgcccggctggcgtgcagtggcaggatctttggctcactgcnaactctgcctcccgggttcaagcggtttcngggggtcagcctcctgagt

SEQ ID NO: 597 - DNA, 557 bp, Homo sapiens
cacgtactactggaggcagagccccatgagaaggggccaagaacccgcacccatcaaaatcaagaagaaaggctgaacccggagagaaaagggagcaactgatgttgccatgcagatcccttggttgctatgagatggtaacatcactctgccccaccattggccagtgcctcctcagctgcggtgcctcccaggctgtgtggttctcacgcgggccactgacacagagctgttactatggtgaactttacaatttcctttgattggtggatttcagaaataggccatcagcggaattcattatattcagctaagtaaaaatgaaaaataaatactataactttcccctcatcactaacatgaargaaacgtgacccttcatgacataataaatcgctgttcggtaacttargatccttcagggggactgaagcgggatgatcctcctatgccaaatttgggtgggaaagatattccctgttagctttgarttcgactcttcararttaagggcagtgggccaaccagagttgggaacttcaaaattgggaagaagt

SEQ ID NO: 598 - DNA, 724 bp, Homo sapiens
  SITE (2): n equals a,t,g, or c
  SITE (428): n equals a,t,g, or c
  SITE (488): n equals a,t,g, or c
gntgggtccccggggtggcagaattcggcagaggtacgcacacagggagaaataagcaggcactttaacttcgtgacaggaaatcaatgtacacacgaaatcgatgtaaatgtgaataaggacataagtttaaagcacgctttttctgctcaagtgtttcttttagctcagaagcagaaattaaaactttcattgcaaccagcgactgtcagaaacatggcagatttccaggaactgagagatctctctctgttccctacctccctcaaccctatgcattgacacacacgcttcactcacactgtcacactcacacagtcattcccacatgttcacactcagccacacactcacttgcaccctggcatgcactagaacacatgctcacacacacacacacacgtgtgaacacacacgcgcgcgcgcgnaacgcaaccaggrtgcctttggscaatagactctggtctccagttctgcctgtcgsctgnaaaccttcctcacccctcccgagtgcagccgcctcccctccccagcagctcctggcactactctctgaacacttgttctgaccccactacccaaccctcgccacttcctagggcccagacacagccctgtgtgtcctcaacctcctccagatctctgtccctcaacatcctctctgctgttcctcgaggcgctactttaggggaaaatgcctcagatttacctggacaaatcaaca

SEQ ID NO: 599 - DNA, 790 bp, Homo sapiens
  SITE (683): n equals a,t,g, or c
  SITE (741): n equals a,t,g, or c
  SITE (743): n equals a,t,g, or c
  SITE (786): n equals a,t,g, or c
aagtcttgtggaggtagttgaaatgttacatttttgtttttggtgcgtgataagtcattaccctaattttgacaaaccatggttttgagtttataattgatatccattagacttggatttaatatcagcacatttagacttagacatttgtaatatttgtaaatttatagcagagtccatatacaagtgtcagaactagtttttatgatgtgtggcattagtgaagtaatatgccatcagttgctccttgttctttctttttcccatttatgtcatccatcagattttgatggtcctccttgtttagcataaatacttcacatgaccttgaagttggaaataagagagttaccattttaatgccatgatgttatatagtccatcagtgatgcattttttaatagagatataccagccaataaagctcagttgtgttcctccaatgtgtattttctactataggtagtttataaagttttagctataagaaatgctttttgtgtgtctgattttgaattgttcctggacaggcaaatcacttgatttctaaatgccagggaaaatgtccatattgtcagatattgckaaggcattatttgatatttaggatgctttagagattttgcagattttttcttatgggagcattttaatatcttaaagtgggaaattttaatatttgntagtattaaaaattttttttaaactttttcttcccgtagaattataaaacactatagntnttttcttttctttttttaaaaacattctgtgatcttgtaagtntgat

SEQ ID NO: 600 - DNA, 445 bp, Homo sapiens; identical to SEQ ID NO: 292
  SITE (405): n equals a,t,g, or c
  SITE (417): n equals a,t,g, or c
  SITE (439): n equals a,t,g, or c

SEQ ID NO: 601 - DNA, 1462 bp, Homo sapiens
  SITE (40): n equals a,t,g, or c
  SITE (42): n equals a,t,g, or c
aaagacacagcacacacatgcacacacagcaaaggcacgngntcggatggatcagagcccctcggtgcagctgtctgcatcttccaagcactttacagataccttggaatgtatatttttgtcttcttactcagaaggtttgcagtttgtaaaataatcaggattctgctctgtcctgtgtgtggggtcagctccctccacagagggctccagctctgttggtcacagctgatggggttctctgattgataggagacgagctctcgagctctaaggaacagtgaggtcgccggtggggagcttggctgggacaccaagcaaatgcatcgtatgtccccttggagacgtttttatgcagctgtgtatgttactatccagaaggagtcgggggtagactttcccgtgtaagctcagtccataaactggttacttctgatcctggaacgtggacttcacatgataggtctggatctgtttctgttgggatcacaggtaaggaaaatgtccattcaaatggtaaagaagggaggagggtgtttttttttttttttgctgtaggcaccattctgcatcttgaacccagactgaagtgtgcctctcacagatggaaggtgcacacgctcctgtctcctcctcactctgccacgttcacttggctttttcattggtacctaggaatttaagaatatcgaagcgagagcagtaacaaaccatagatgagcagactcccacaccgggttttcttgcccgtctttaaggcactgtttctaaattttgaacttagctctgaatccccaagaacttgagcacagcaagggttgctgagctgctgtcgccgcagccctggcccctggtgctggagctgcagcacctttgggagaggtcctgcgtcgtcctcagctgcgtcgctgtgaactcccgctctccactgtgttcctcagtgtctgcttttcaggaagtctgctgtgacctttgcccaacttctgagctcctcagggactaggaacaatttcagtagctttgccctgaaccaaacgagaaaacaaaagggaactcccgtatgacccacgtcacgtggtgcactcagagtgtgtgcggcatgatcctcggttgctcctcctctcactttagtagagtacgcggtggacagctgatctccttcagtcgtctacccacttccgtcattgtcctccgctagaataacagagtagttggtagtcatggccagaaggggggtgggggcagtgtgaggacttggggtttctgtgctgtgtgacacaaggagataagtgacaatcttgaagtcctaacttccactattctagaaagtatagtggtgatttgtgtgcaaagatttgaagttttaaaaaagtaccaagttcctgaaattcaataaaatatttttattaattttaaaaaaaaaaaaaaaaaaaaaaaaaaaaaaaaaaaaaaaaaaaaaaaa

SEQ ID NO: 602 - DNA, 368 bp, Homo sapiens
  SITE (185): n equals a,t,g, or c
aaaagttttaaaaattctattcagggactcagggtaaaagtccgagagaaagcccctgaaaatgtcctgtatacgacattaagaaacaaatgcatgtaggaggcagtgcagacactgaaaatgtgaaaggcctctgccttggatggccatggggttgggaaggagtcagtgggaaaccagaaggnaatacatcattttaggccaagaaactatggatctaggaaagtggatgtccatgaaatacttgaaggacccttattcctgatgaaagtctagggaatcttctcttggtcaggargaacaggcccaggaggactctgggaggaaaaagtatggaggtgcctaaggtttaggtttaggaggtggta

SEQ ID NO: 603 - DNA, 657 bp, Homo sapiens
  SITE (565): n equals a,t,g, or c
  SITE (584): n equals a,t,g, or c
tacaaagttatttatcttagcacatttattatgtgtgactgcatctgatttatatttaaattggcaggttttgagggatttttttcttcatcataaatgtaaacataggattttagagtctatttccccaagcgccacattataactgtaaacttaccatcttctatgtagctgtgatatctcatctttctaaaatggaacttgttaaaaagtgttcaaacactatccctaatgcctgcgcagaatttatatacgatccattcattggggctcaaagtatcttttagacttttaaggacaatttacagcaaatgaaatttatgatgctgtgacaagaaatttaaagaatcaaaacgatggtttgaaaaggaaacctatgatacatgcaggagaagcaaaacccaagtgatttgtgagaaatatagaaattatttaaattactttatagtaattattaaacactaatttttgtactgtcattgaaggtgttttatagagaaatctgagaaatcacatycmcaaattagaagtcaaacatggccaggcacagtggctcacacctgtnatcttcaggatttcaaganccagcctagccaacatgacgaaaccccatctctactgaaaatagaaaaaaaaaattagccagcttgcacctgt

SEQ ID NO: 604 - DNA, 565 bp, Homo sapiens
  SITE (358): n equals a,t,g, or c
  SITE (505): n equals a,t,g, or c
  SITE (544): n equals a,t,g, or c
  SITE (548): n equals a,t,g, or c
gggctgttcatgtgaagtgtgtggattctcatgccatataacttgtgtaaacaaagctccaaccacttgtccagttcctcctgaacagacaaaaggtcccctgggtatagatcctcagaaaggaataggaacagcatatgaaggtcatgtcaggattcctaagccagctggagtgaagaaagggtggcagagagcactggctatagtgtgtgacttcaaactctttctgtacgatattgctgaasgaaaagcatctcagcccagtgttgtcattagtcaagtggattgacatgagggatgaagaattttctgtgagttcagtcttggcttctgatgttatccatgcaagtcggaaagnatataccctgtatatttagggtcacagcttcccagctctcagcatctaataacaaatgttcaatcctgatgctagcagacactgagatgagaagaataagtgggtgggagtgctgagtggaattgcacaagattttgaagaaaaacnaatttcagagaccgctcagtctaagtttcccaaagaggnttantgacagcactctacccc

SEQ ID NO: 605 - DNA, 459 bp, Homo sapiens
ggcacgagcaccagtgagagaaattcagagaagagactcttatcttcctaggaaccagctgaccttaagaataagtagccattcagaataactgcataatctaatatcattttctatttgaacatcaataattctaagtactattacaaatactacaggcctcctgtcctcttagaatgtgtcatcttctaagaatgagaggtgaaaatgtttcgtaaacttctgatagattacaatcaagagtttcatgtaaatatcttttttctttctgctgcagtaccaatgcactttacagtttccaagttcatcgttaactacctaaattcttagatggctttggggtacatctcagacaggatggaaaccacatggttatatggkagcacttatatacatgtgctttttatgtaaagagtttctatggggctggattttggtcttagttttggcttcccccct

SEQ ID NO: 606 - DNA, 1610 bp, Homo sapiens
tttttttttttttttttttttttttggtagttcttagttttattataaccttgtattttctggcaaaaatataaatctaaatgcatgatctctgggcacacagctcaagtatcagccttgagatgacctaagcagcaaaaatttggcctatttaattaaatgcacaggaggttgcagccgcatttattagaaaaatattatcctttggaaattcctttcttgaagattggctccagggcgttgttctttctgtttttatgcaattgcacttccttggcaggcagccaggcgctccggtgctcacaggccatgggacagtccagttccctgcagacccagcggggcatgggcggacagagccgcaccgtgaagcccgcctgttatttccatcgggtggtcctggagacgacacggctggggaaatgggtcaccggaactccacggcggccagacgcccatccaatttgcctgcgggaactcgctcttcaccttttcttcacaaacttctttctggaagcgttgggatttaagcgtctccgcccagctcccaaggtgctgtcccggacctgcagggtagctgagcggctggagatgtcattctcgacaaagggtgacaccccggcgatgtagtcaggggcgaacacgttggttttctgcctggccttttgggagagtcgcagctgagggaagcgctgatcctcggtgagatgggggttgatggcgtatttgccccctttgggagtgggaagcgagtaccggaggccgcgggggttcagcaccttggggttgcgggagaagtgcatgtgcagggtgccgtcgtcgctgacggtcacggacactttcttcagggtcttgttcccacagtgtgagcagaacactcggctcatgtcagacgttgtcttgaaacagccatggcagcgcaagatgtagctccgggcctcacgaatcagcatgccgttcaccgccagcacgtgcagccccatctgcagcagaacattctgcatggcgaagtctgtggtcaggcagccaaccygcacgtcctcggggacgtcacactgctccagctcctgctggatctgcttgatgttactgggggttatccagccacccccgtcgtcatcgctgtcatcttttctgtcttcaaacccgttttcttcctcctcctcctcctcacttggaacgtcctcacctctgtcaatcagcagctcctgcagttcatgatcgatgttgggcaaagggtttctccagaacatgaaggaactaaattccaggttctcaggctcacaagctgagtgtcctttttctgtttcttgtgggggtttaggcttgtagggcagatggaaaccagaaatgtgcagaggtgtttctgggtgctgaatcgatgagctcaccttaacccagccgcacgtattccggtaagggctccttgaaccgcagctcgtagggcaggacagcgagccgcctgcgtgtggccttgtcccgaatctcagtgaccacctcccggatggtgtaaatgttcttcccgatgtcctgcagagccgcatgccgcaggaaagccccagcatccgccacaacgtgctccactggagccatgttggctgcgtgagagg

SEQ ID NO: 607 - DNA, 280 bp, Homo sapiens
  SITE (263): n equals a,t,g, or c
atgtcatcaagcgtttgaatttctgcctttctgataattggaaaatgcgttgttttgtttaactttgcattttctggatgacttacgggggtcagtgtcttcatatgtttgtcagacattccttttgctccgtgactgacttgttcatgtgttttgcccattttaaggaggttgtcgggacatttcactctccagtaaatgtggcccttggcgttactgagtcctaagaggtgtgtgttgccccaggtggagctgatggaggngggagtcggtgcctgtg

SEQ ID NO: 608 - DNA, 271 bp, Homo sapiens
  SITE (247): n equals a,t,g, or c
ccagatggaagtaatggtatggaaatagactttagggctgtctatctccatgtctaaactgtttcaaagaccataataatgaccattagtctaagtttggggtagattaagaattatctagtaggcgatgagtcacagcatctcataaacaaaacattacgtctttatttattagaccattgcctagaaagttctctctgggaacctgaagtgctgatgacagaatattctgcccatcagtgcagtnagagggtacccaactgtgggatat

SEQ ID NO: 609 - DNA, 502 bp, Homo sapiens
  SITE (447): n equals a,t,g, or c
  SITE (473): n equals a,t,g, or c
agagatgcctgagatcagagtcacgcccttgggggccggccaggacgtgggccgaagctgcatcctggtctccattgcgggcaagaatgtmatgctggactgtggaatgcacatggggcttcaatgacgaccgacgsttccctgayttctcctacatcacccagaacggccgsctaacagayttcctggactgtgtgatcattagccacttccacctggaccactgcggggcactcccctacttcagcgagatggtgggctacgacggccccatctacatgactcaccccacccaggccatctgccccatcttgctggaggactaccgcaagatcgccgtagacaagaagggcgaggccaacttcttcacctcccagatgatcaaagactgcatgaagaaggtggtggctgtccacctccaccagacggtccaggtcaggttcccangggcacagtggcacagtcactgccancccaaaccaaccatgcccttcggccgttt

SEQ ID NO: 610 - DNA, 1862 bp, Homo sapiens
  SITE (63): n equals a,t,g, or c
  SITE (940): n equals a,t,g, or c
acggggtttcgccatgttggccacgctggtcttgaatttctggtcttgattaacccatctcancctgccaaagtgctgggattacaggcatgagccactgtgcctggctccactttatcttcaatgtytctatttcctcttgtttaaatacaatggctaataagtctagaataacgctaagtaataacaccacactatggtcatgagytcaggttgggctatttataatataatcaatacctatgatgaaaccactgtccaacctcaaactagataattgctgataacaatayagacttattttacttgccatcctcttctcaccaccaaagtaaacattattgggaatttttatcattcttttgttttttatcatatatataatatacacacacataatagtcaattctcattttttgcagactccgtatgtgtgaatttacctcttgctaaaatttatttctaactccagtatcagtacttgctgggcttttgcagccatttgcggacatgcagcatgtgaaaaaatttgaattgcctgctctccatgttcccagctgaggtggaacaaggccttcttgttycagttcttataamcaagtatccttttcagtctatttagtgccatgtcttttgcatttttgtggattttgctgcttaaagtgacccccacgcacagtgccaagtgttcctaagtgcaagaagctgtgatgtgccgcctggagaactgaggtaagcttcattcaggaataagtgtcgtgggctaagttcagtgttaatgggtcaaccatatatactaaggtgtcttcaaacagaaacacatgtamcaagtttatgtactgatgggttgatgaaactgtgcccagaggttcataggaacccaaccctgtatttcccttgggaataatggttcagtactctctaattcagtgttcatggngactttataaaacataactactatagataatgagaacagactatacatatatatatacacacacagtcaccgtttagtatccgtggaggattggttccagaaccttccttggatataaaaatcctctgatgctcaagtccctaatatgaagtatttggatataacctgtgcataccttctcatatacttttaagtcatctctagattacttataataccgaatacagtataaacaccatctaatactttgtattgtttagggaaaaatgacaaggaaaaatgtctgtacaggtttagtccagacacaattttccccctcaatattttcaacctgtagttggttgagtccatagatgtggaacccacatatacagacagccaaccgcatgtctaaacaagtttcacttgtttttgaacttctggagtatcataatgtacatgtcttctgacaccagcttttttcattcaacattattattaacattcacctatattgttactcacagctgcaggacaactttatgtccttgttttagatgtgtctcctgtaaacagcatatgattggggtttggtttaattatccattttttccttgggctagtttaatacttatacatttattgtaattactgatctatttggacttgttttgccatcttttgttttatccaccttttctatgcttatttctcaaatttaaaattttgtttcttccctattatcccaccatctctcatcactattcatttagagattatatatacttctagcaattaacctcggaattttatcatgcatacwtaaaaagactaagttgatattaactggctactcccaaaaatgtaagaacactgaaacattttgactctgattaaccttcccaccatgctgtctacttttaacctacctttagcctctgcc

SEQ ID NO: 611 - DNA, 509 bp, Homo sapiens
  SITE (458): n equals a,t,g, or c
gccgtctcaaaaaaaaaaaggttaggaatcacaaawtgtgtaaatatatagcaactttaagaagagagaagaatgcttataacctagtgaatatttctgctgagccttagttgtcttgtctaaaggaaaaaagagggaattgtagaataaaagtatttgttagtggaaattattgacctgaaaccatatcatattgttagtgtaactgaatgtatcagaaattgttcctatgtaggtattctgtgaaactggtttctaaaatgttacaggaaactgtttcctttttttttgtttgtttgtttaagtggaggtgggaggaggtagggaagaggtctgaatattaaaatatgtttatgttcatgtgttcataatacgttcctttttctctctgtgtgtgtataaaagtgccttgctcatgaatgcatttttgctattcacttcgaaaggaagcctttccnccagcttggcagctgaataaaccaatagctttgtacatgcaaaaaaaaaaa

SEQ ID NO: 612 - DNA, 998 bp, Homo sapiens
  SITE (998): n equals a,t,g, or c
ttgaagattagcaacgtggctttggattctatgcattggcaaaatgactctgtccagatcatagcaagtgtcagtgatttaaaaagcatggatgaatttcttctgaaaaaggtgaatgacctagataatgaagacagcaagaaggatacactagtggatgttgtatttaaaaaagccctgaaggaatttcggcagaatatcttcagcttttattcatctgcattggcgatggatgatgggaaaagcatacggtataaagacctctatgcactatttgaacagattcyggaaaagacgatgaggcttgagcagcgtgattcactgggtgaatctccagtgagagtttgggtcaacacttttaaagtgtttttagatgaatatatgaatgaattcaagacttcagattgcacagccacwaaggtgccaaaaacagaaagaaagaaaagaaggaaaaaggaaactgatttggtggaagaacacaatggtcacatctttaaagccacccaatatagcatccctacatactgtgaatactgttcttctttgatatggataatggaccgagcctctgtttgcaaattatgcaagtatgcttgccataagaagtgctgtctgaaaaccacagccaagtgctctaaaaagtatgatccagagctgtcatctcgacaatttggggttgaactgtcccgtttgaccagtgaagaccgaactgttcctttagtagtggaaaagctcataaactacattgaaatgcatggactgtatacagaaggtatttatcgaaagtctggttcgactaataaaatcaaggagcttcggcagggtctagatacagatgctgagagtgtaaatctagatgactataacatacacgtcattgcaagtgtattcaaacaatggcttcgagatttgcccaatcctctcawgacctttgaactctatgaggaawttcttcgagctatggccttcaggagaggaaggagacaatccgtggggtn

SEQ ID NO: 613 - DNA, 456 bp, Homo sapiens
  SITE (6): n equals a,t,g, or c
  SITE (28): n equals a,t,g, or c
  SITE (371): n equals a,t,g, or c
  SITE (382): n equals a,t,g, or c
  SITE (386): n equals a,t,g, or c
ccctgnagctgctcatcggcagcctggngcagccagcctgccctgccacttcaaccccagcgtgaacctcttcagcagcttgcgtgaggaggagattgacgacattggctatgcgctatacagtggcctacaggagcccgagggstgctctaggtgggtggaaacgggtggttgccatgttttctaatgctggggagctgcacccacctcccttccagggatttgaatagtggtttttctctagctttttgccagaacaaaggagggtacattacttgaaacccaggggcatcagggatgtgcttgggccttatggtgggccatgaaaccctggaccccagagagcttggggtcactgtgcacctgagtgncagctgggctncctncaggcatttggggagtggccagccattgcctggcaagcaccttttcagttcttgggggccaacccaggac

SEQ ID NO: 614 - DNA, 511 bp, Homo sapiens
tttggctgcagcggtgctgaagcccatgctatgacagaagaagcaggcctttgaagctatcctcgggttaagaaatggtgccctaaagaggcaagcatccctttctccgttctgctgtaagacaccacatctgaaggagacagacttgaggcattcacaagcatccaaggatactggctcactgctggcttcctgtactttcttgagaaaagtgttttctttttactgactctcactgcttccttttggcctggtaccactggtggaacctggcagataatgggatttgaggagttaagtatctgttgacactgcagatactcttaaattagttaawcagactcaaatgggtcagtgctttcccttgatcttttgttgaagccttttccagaacgttgtctccaaagtgcatcctccctttggtctggaagttctgtggctaccctgtaccactggggtcaacgttttccagttggaagaggactacagggagagagggcggggttattgg

SEQ ID NO: 615 - DNA, 463 bp, Homo sapiens
  SITE (446): n equals a,t,g, or c
  SITE (454): n equals a,t,g, or c
  SITE (455): n equals a,t,g, or c
  SITE (461): n equals a,t,g, or c
ggctttacggctgcgagaagacgacagaaggggggtgaatgaccttcctagagcacttgagcagattcattatattttaaaaccagatggagtgtttatcggtgcaatgtttggaggcgacacactctatgaacttcggtgttccttacagttagcggaaacggaaagggaaggaggattttctccacacatttctcctttcactgctgtcaatgacctgggacatctgcttgggagagctggctttaatactctgactgtggacactgatgaaattcaagttaactatcctggaatgtttgaattgatggaagatttacaagaacaaaagtccagaaatgttgacctaattttacaaaacaagctgcatatcagctgatgaatgccatgagaaatttcaaggctttcacagtggtcttaagggaatgggtggagagtaactgtgncttggaanngaaagncc

SEQ ID NO: 616 - DNA, 152 bp, Homo sapiens
agacccacatattgtttcacgttatgttttgagttcttaagcatattgtcttttcctcctgtgcgctgattcccactttcgggcacacagcagctgtgtgaccatctgcatcatctcgacagtgccacagcttcctccgtagaatgctacgg

SEQ ID NO: 617 - DNA, 380 bp, Homo sapiens
  SITE (372): n equals a,t,g, or c
gaattcggcacgagggttatttctagaggatgtcgtaatctacatcacaggcagaactgatggctcagtggctgagtggccagtatattgtctttttwtttttttttttgagacagggtcttgctctgttgcccaggctggagtgcagtggcatgactgcagctcactgtaacctcaaacttcataacaggaaaattaaagaaaagtcaaaagaaaccacttagctgtaacacaaggaagatatgctgacttgtttaatggaaaggaatatactttaatggaagaatacatatatcagaatttcaaacatcccccatggawttagtaatggagcaactccattttttgtttttgatagagaattgtgtttanaattctgt

SEQ ID NO: 618 - DNA, 1382 bp, Homo sapiens
taagagcaaagagagaaacagctaaagcgatgcggtatttcattcttgaaccttccattgtgattcggacctattacaaaggaacgattgtccagacaacgaagcggtagtgttaaccaccgcctcattaatcatagacagttacggtgaaatcaccaaagtgagtgatatgtttcggataacaggaagttatccgaagcgatgagagttatcccgtaaccgggtcagccactgcatagcctgactgttattgtcctgctgcgcaatgatgtagccatggggcaatgttctgtcgaggaccgcttttgcggcggcgctctggtcgctggagtcaaatgtaattaacagagtgtcgtttttgggggtgatacttttgaaaggaatgccatgagcgtcaaggtgatgccagattgaaaaaccgtctggcatcgttgtgccttgatgaacggcacgaatcgccagcgtagactcttgctggcgaaccgcggaccaggccagcaacagcgtgccgaccagaagtaaamcagcgccggaccaggctagctggcgaagcgacatgcgaggtatttgcatcccttacccccgatttccatatttctttttccataacacgaccagagaacctgccaggccaaacaccagcagcaccaccgggagcagcatcaggcatgacatcagctggtcctcgtactttaaaaataccggcgttttgccgagcatgtaacccagagttgtcaggatcaatacccacagcagaccgctcatccagttgaaaaactgaaagcgcgcgttattcagccctgataacccggcaatcgtcggcagcagtgttctgacaaacgcaataaagcgaccaattaacagcgccgataaaccgtgtttatgaaaaagatggtgtgcgcgttgatgataatgcgcgggtaaatgagatagccagttttgtacggtgcgggtattgcccagccatcgcccctgaatatagctgacccagcagccgaggctggcggcaacggtcagcagcagaatcgtttgcggatagcccatcgcgcctttcgcaatcaacacgccgaccaataccagtaaactgtcgcccggtaaaaaggccgccggaagcaagccgttttcaaggaacaaaattacaaacaagacaaaatacaacatgccaatcatcgatggattggccagggtttcaaaatcctgcgcccacagggcttgcagcaattgggtcaaaagttccattcattattcctggtgaatcggttaacgccacgctggttttaaaagatgcactaccgcaatgttattgctgttttggtatgttctgcgggtttgatacatcaacacagcctgaactattccctgttaaatcgtgagataagaaa

SEQ ID NO: 619 - DNA, 683 bp, Homo sapiens
taaattgcccggccgcgtccgacaattttaaatccgactcacctatagggcaaaactttttttttttttttttttttttcrgagtgaaaaagacgctgtatttgatttacaatgaacaagatttacaaaaaggggtggggtggtcttggaactgctcccagtccccccggactgggtggggctctagggcagcctgtctgacagaccaggaccccaggatgtctgggccccgacgtaggacttgacctacgtctcacttgacctttgacgtggggcccagcagccgtgagtccacccagagtgccggcacccttggggaggccggtgaggtcaggaaggcatcgtaccgctttttctcctcctcccatctcgtggtggacagacagacataggatctgggaacttgccctgggggccacaggccctcagatcccccaggggcccaacctagggcatggaggcggctgctggtgcgtgggcggaggcggaggccagctgcccccagcgtggcagcgtaaggcacattttcaaatcactcgagactcgacagtgaacacccgatgctggttctgcggccggatgtccagcttgccggtgatcattacgtccttgtcgccgtccttggagggcagggagaaaaagccgtcggtgtaggttctgtagccagcacggggatgcccggc

SEQ ID NO: 620 - DNA, 891 bp, Homo sapiens
  SITE (753): n equals a,t,g, or c
  SITE (802): n equals a,t,g, or c
  SITE (815): n equals a,t,g, or c
  SITE (837): n equals a,t,g, or c
  SITE (854): n equals a,t,g, or c
tatgagcgaggagacsgcgacttctgacaacgataatagttatgcacgagtgcgagctgtggtgatgacccgagatgactcaagtggtggatggttaccacttggagggagtggactaagcagcgtcactgtcttcaaagtccctcatcaggaagagaatggctgtgctgacttttttatccgtggagagcgactcagggacaaaatggtggttttggaatgtatgcttaaaaaagacctcatttataataaggtcactccaacatttcaccactggaagattgatgacaaaaagtttggtcttacgtttcaaagtcctgctgatgctagggcttttgatagaggtatccgaagagctatagaggatatttctcaaggatgccccgaatcaaaaaatgaagctgaaggggcagatgacttacaaattctggagacctgaaaatggagtgctgctgtaacaaatactaaaacatgggaatgacttkggactcaggactcagacagtaaataaaagctggaaggtctttgargcgagttttagtgaagttccgaagagacttactggaagcttgaagatctttggatagagcgtcagtgagggcttaaatgaaaatgaagaaaaccatattggaaaatggaagaaagggaatgtttgtttagtggctgaaagcttakcaacaatgtcatggcagtaatgtggggaagcagaaaatgttcctaatgttctgagtggttaagctaaggaattttccngcaaaaaggttgaagctggttgcctgatttctccttactgcttatgatnaacagtaaatganaaaattaagcttaaggaagggntcctaaaccaaaaaaancccagggctttgctgggttttgaaaaattccccattt

SEQ ID NO: 621 - DNA, 753 bp, Homo sapiens
  SITE (661): n equals a,t,g, or c
  SITE (738): n equals a,t,g, or c
  SITE (740): n equals a,t,g, or c
gcggccgcccgggagtccgagcgccmtgcgcctccgcctctgcgtcctcaacgagatcttgggcaccgagagggactacgtgggcaccttgcgcttcttgcagtcggcattcctgcatcgcatccggcagaacgtggccgactcagtggagaagggcctcacggaggagaatgtcaaggtcctgttctcgaacatcgaagacatcctggaagttcataaggatttcttggccgccttggagtattgtttacacccggagccgcagtctcagcatgaacttgggaatgttttcttaaaattcaaggacaagttctgcgtgtacgaggagtattgcagcaaccatgagaaagccctgaggctgctggtggagctgaacaagatccctaccgtgcgcgccttccttttgagctgcatgcttctgggaggccggaagaccacggacatccctttggaaggctacctgttgtctccgatccagaggatctgcaagtacccgctcctccttaaggagctggccaagaggactcccggcaagcacccagaccaccccgcggtccagagtgccctgcaggccatgaagaccgtttgctccaacatcaatgagaccaagcggcagatggagaagctggaaccctggagcagctgcagtcccacatcgaangctggggagggttccaaacttcacagacattttggaatcagttcctcctgcaggggactttgtttaaaaaatttttngngggggaaaatttc

SEQ ID NO: 622 - DNA, 405 bp, Homo sapiens
  SITE (380): n equals a,t,g, or c
ttatttaggcgtacgggtgtgtttatagtgactagagtttamrasggggctgggtggcgggactsccgtgtacacactgtaactccatgtgtccagtttgtcctgctgacgcgttccacagctgtcaccggaaagctatctcctggggccagcagcatccaggaagggggtacctggggctgcagagacaagctcgtcggcagggcagggtgagggaccatgggtggaatggcagtggctgccagtgggctcggggctggcgcaggcatctcacgtcgcaccgtgatgcctgctgtrgctccagaagttcccaagccacgtggtgacagactgtgkgtggtggcaaagtgcacatgtcaccaagcaaggtctcgagcttncagtggtcccaccctctggggcagt

SEQ ID NO: 623 - DNA, 2033 bp, Homo sapiens
  SITE (542): n equals a,t,g, or c
  SITE (794): n equals a,t,g, or c
  SITE (1843): n equals a,t,g, or c
aagggaacaaaagctggagctccaccgcggtggcggccgctctagaactagtggatcccccgggctgcaggaattcggcacgagtccacgcagcccggctgggcagcaagggacagaacagaggcggccgctgacagcaccagcatgtcttacagtgtgaccctgactgggcccgggccctggggcttccgtctgcaggggggcaaggacttcaacatgcccctcactatctcccggatcacaccaggcagcaaggcagcccagtcccagctcagccagggtgacctcgtggtggccattgacggcgtcaacacagacaccatgacccacctggaagcccagaacaagatcaagtctgccagctacaacttgagcctcaccctgcagaaatcaaagcgtcccattcccatctccacgacagcacctccagtccagacccctctgccggtgatscctcacsagaaggtggtagtcaactctccagccaacgccgactaccaggaacgcttcaaccccagtgccctgaaggactcggccctgtncacccacaagcccatcgaggtgaaggggctgggcggcaaggccaccatcatccatgcgcagtacaacacgcccatcagcatgtattcccaggatgccatcatggatgccatcgctgggcaggcccaagcccaaggcagtgacttcagtggggagcctccctattaaggaccttgccgtagacagcgcctctcccgtctaccaggytgtgattaagagccagaacaagccagargatgaggctgacgagtggncacgccgttcctccaacctgcagtctcgctccttccgcatcctggcccagatgacggggacagaattcatgcaagaccctgatgaagaagctctgcgaaggtcaagggaaaggtttgaaacggaacgtaacagcccacgttttgccaaattgcgcaactggcaccatggcctttcagcccaaatccttaatgttaaaagctaaaaggctgcctggaatccccccaccccaacaggctggactccctccatccttacccccacacagatctggcatgtgagccccacggtgatgcttgacaatgtataactctgctgggggcacctctgatggccaaccgcagcatttctgtcctctgcccaccccagagctgatgctggggcccagccccctgcagctctgtacccaccaaacctccccagggcaaccctcgccaccccccaaatagcccgtagcccaatcccctgccctctgcacagggccttagctgtagaccagagagggcaggaggggtttgctggcataacaccccagaaccaagggaaatggatgggccgctgctcagtttcccaccatcctcagctcctggcctcatcccctcctagaatgagtcacccgtagatcagggtctggggaagaggctgatccctggcgctgcccggctccctcgctgccctctggagctcagggcagcccggaatagggctctttgaagaggaagtagaagccccagggtaatgaggcagagacccctcctggcagtggtgaggtgggggcatgcaccctcctttctgtaccgtgtgtgctggctccatagttctctcttctgtacatataagcatgcttgttctgaaataaagaagatttgaagtgaaaaaaaaaaaaaaaaaaactcgagggggggcccggtacccaattcgccctatagtgagtcgtattacaattcactggccgtcgttttacaacgtcgtgactgggaaaaccctggcgttacccaacttaatcgccttgcagcacatccccctttcgccagctggcgtaatagcgaanaggcccgcaccgatcgcccttcccaacagttgcgcagcctgaatggcgaatggcaaattgtaagcgttaatattttgttaaaattcgcgttaaatttttgttaaatcagctcattttttaaccaataggccgaaatcggcaaaatcccttataaatcaaaagaatagaccgagatagggttgagtgttgc

SEQ ID NO: 624 - protein, 586 aa, Homo sapiens
MSAGDAVCTGWLVKSPPERKLQRYAWRKRWFVLRRGRMSGNPDVLEYYRNKHSSKPIRVIDLSECAVWKHVGPSFVRKEFQNNFVFIVKTTSRTFYLVAKTEQEMQVWVHSISQVCNLGHLEDGADSMESLSYTPSSLQPSSASSLLTAHAASSSLPRDDPNTNAVATEETRSESELLFLPDYLVLSNCETGRLHHTSLPTRCDSWSNSDRSLEQASFDDVFVDCLQPLPSSHLVHPSCHGSGAQEVPSSRPQAALIWSREINGPPRDHLSSSPLLESSLSSTIQVDKNQGSLPCGAKELDIMSNTPPPRPPKPSHLSERRQEEWSTHSGSKKPECTLVPRRISLSGLDNMRTWKADVEGQSLRHRDKRLSLNLPCRFSPMYPTASASIEDSYVPMSPQAGASGLGPHCSPDDYIPMNSGSISSPLPELPANLEPPPVNRDLKPQRKSRPPPLDLRNLSIIREHASLTRTRTVPCSRTSFLSPERNGINSARFFANPVSREDEESYIEMEEHRTASSLSSGALTWTKKFSLDYLALDFNSASPAPMQQKLLLSEEQRVDYVQVDEQKTQALQSTKQEWTDERQSKV

SEQ ID NO: 625 - protein, 645 aa, Homo sapiens
GTSSCRIRHEGASAMALRKELLKSIWYAFTALDVEKSGKVSKSQLKVLSHNLYTVLHIPHDPVALEEHFRDDDDGPVSSQGYMPYLNKYILDKVEEGAFVKEHFDELCWTLTAKKNYRADSNGNSMLSNQDAFRLWCLFNFLSEDKYPLIMVPDEVEYLLKKVLSSMSLEVSLGELEELLAQEAQVAQTTGGLSVWQFLELFNSGRCLRGVGRDTLSMAIHEVYQELIQDVLKQGYLWKRGHLRRNWAERWFQLQPSCLCYFGSEECKEKRGIIPLDAHCCVEVLPDRDGKRCMFCVKTATRTYEMSASDTRQRQEWTAAIQMAIRLQAEGKTSLHKDLKQKRREQREQRERRRAAKEEELLRLQQLQEEKERKLQELELLQEAQRQAERLLQEEEERRRSQHRELQQALEGQLREAEQARASMQAEMELKEEEAARQRQRIKELEEMQQRLQEALQLEVKARRDEESVRIAQTRLLEEEEEKLKQLMQLKEEQERYIERAQQEKEELQQEMAQQSRSLQQAQQQLEEVRQNRQRADEDVEAAQRKLRQASTNVKHWNVQMNRLMHPIEPGDKRPVTSSSFSGFQPPLLAHRDSSLKRLTRWGSQGNRTPSPNSNEQQKSLNGGDEAPAPASTPQEDKLDPAPEN

SEQ ID NO: 626 - protein, 425 aa, Homo sapiens
ARAMSSSYESYDEEEEDGKGKKTRHQWPSEEASMDLVKDAKICAFLLRKKRFGQWTKLLCVIKDTKLLCYKSSKDQQPQMELPLQGCNITYIPKDSKKKKHELKITQQGTDPLVLAVQSKEQAEQWLKVIKEAYSGCSGPVDSECPPPPSSPVHKAELEKKLSSERPSSDGEGVVENGITTCNGKEQVKRKKSSKSEAKGTVSKVTGKKITKIISLGKKKPSTDEQTSSAEEDVPTCGYLNVLSNSRWRERWCRVKDNKLIFHKDRTDLKTHIVSIPLRGCEVIPGLDSKHPLTFRLLRNGQEVAVLEASSSEDMGRWIGILLAETGSSTDPEALHYDYIDVEMSASVIQTAKQTFCFMNRRVISANPYLGGTSNGYAHPSGTALHYDDVPCINGSLKGKKPPVASNGVTGKGKTLSSQPKKKKK

SEQ ID NO: 627 - protein, 76 aa, Homo sapiens
  SITE (19): Xaa equals any of the naturally occurring L-amino acids
VRWQVSRPQEQRAPTWIPXQATSCTWMSHLLTLSLSICKTGVKIPFLTGLEWGQGEGVECAETSKLSCTLESSEDL

SEQ ID NO: 628 - protein, 378 aa, Homo sapiens
  SITE (81): Xaa equals any of the naturally occurring L-amino acids
  SITE (85): Xaa equals any of the naturally occurring L-amino acids
  SITE (105): Xaa equals any of the naturally occurring L-amino acids
  SITE (106): Xaa equals any of the naturally occurring L-amino acids
  SITE (179): Xaa equals any of the naturally occurring L-amino acids
  SITE (308): Xaa equals any of the naturally occurring L-amino acids
  SITE (366): Xaa equals any of the naturally occurring L-amino acids
  SITE (375): Xaa equals any of the naturally occurring L-amino acids
ELDPKCRGLPFSSFLILPFQRITRLKLLVQNILKRVEERSERECTALDAHKELEMVVKACNEGVRKMSRTEQMISIQKKMXFKIXSVPIISHSRWLLKQGELQQXXGPKTSRTLRTKKLFHEIYLFLFNDLLVICRQIPGDKYQVFDSAPRGLLRVEELEDQGQTLANVFILRLLENAXDREATYMLKASSQSEMKRWMTSLAPNRRTKFVSFTSRLLDCPQVQCVHPYVAQQPDELTLELADILNILDKTDDGWIFGERLHDQERGWFPSSMTEEILNPKIRSQNLKECFRVHKMDDPQRSRTRTAXSWAAGIGNDPHPGGQREQGLHETPTEGGGGALGSTGQHLPRWQDLAWGARPSSLPTHXCSCVLAPCXQTG

SEQ ID NO: 629 - protein, 549 aa, Homo sapiens
  SITE (68): Xaa equals any of the naturally occurring L-amino acids
  SITE (222): Xaa equals any of the naturally occurring L-amino acids
  SITE (223): Xaa equals any of the naturally occurring L-amino acids
  SITE (224): Xaa equals any of the naturally occurring L-amino acids
  SITE (225): Xaa equals any of the naturally occurring L-amino acids
  SITE (295): Xaa equals any of the naturally occurring L-amino acids
  SITE (312): Xaa equals any of the naturally occurring L-amino acids
  SITE (373): Xaa equals any of the naturally occurring L-amino acids
  SITE (390): Xaa equals any of the naturally occurring L-amino acids
PLTKGNKSWSSTAVAAALELVDPPGCRNSARAAWPGVDAVAEPRGAGSEWRTAGPRRTRMEEEGVKEXGEKPRGAQMVDKAGWIKKSSGGLLGFWKDRYLLLCQAQLLVYENEDDQKCVETVELGSYEKCQDLRALLKRKHRFILLRSPGNKVSDIKFQAPTGEEKESWIKALNEGINRGKNKAFDEVKVDKSCALEHVTRDRVRGGQRRRPPTRVHLKEVXXXXSDGLLRLDLDVPDSGPPVFAPSNHVSEAQPRETPRPLMPPTKPFLAPETTSPGDRVETPVGERAPTPVSXSSEVSPESQEDSETPAXEDSGSEQPPNSVLPDKLKVSWENPSPQEAPAAESAEPSQAPCSETSEAAPREGGKPPTPPXKILSEKLKASMGEMQAXGPPAPGTVQVSVNGMDDSPEPAKPSQAEGTPGTPPKDATTSTALPPWDLPPQFHPRCSSLGDLLGEGPRHPLQPRERLYRAQLEVKVASEQTEKLLNKVLGSEPAPVSAETLLSQAVEQLRQATQVLQEMRDLGELSQEAPGLREKRKELVTLYRRSAP

SEQ ID NO: 630 - protein, 123 aa, Homo sapiens
HEWEPFPSEQQPCPASVLSSQQGKSISLIMEENNDSTENPQQGQGRQNAIKCGWLRKQGGFVKTWHTRWFVLKGDQLYYFKDEDETKPLEYLTTSGDSVWLVTVGEDTTDISWVEAGVQLNIL

SEQ ID NO: 631 - protein, 327 aa, Homo sapiens
NCQGTGDFNLKVEAAKIARSRSVMTGEQMAAFHPSSTPNPLERPIKMGWLKKQRSIVKNWQQRYFVLRAQQLYYYKDEEDTKPQGCMYLPGCTIKEIATNPEEAGKFVFEIIPASWDQNRMGQDSYVLMASSQAEMEEWVKFLRRVAGTPCGAVFGQRLDETVAYEQKFGPHLVPILVEKCAEFILEHGRNEEGIFRLPGQDNLVKQLRDAFDAGERPSFDRDTDVHTVASLLKLYLRDLPEPVVPWSQYEGFLLCGQLTNADEAKAQQELMKQLSILPRDNYSLLSYICRFLHEIQLNCAVNKMSVDNLATVIGVNLIRSKVEALP

SEQ ID NO: 632 - protein, 283 aa, Homo sapiens
RARMGRAELLEGKMSTQDPSDLWSRSDGEAELLQDLGWYHGNLTRHAAEALLLSNGCDGSYLLRDSNETTGLYSLSVRAKDSVKHFHVEYTGYSFKFGFNEFSSLKDFVKHFANQPLIGSETGTLMVLKHPYPRKVEEPSIYESVRVHTAMQTGRTEDDLVPTAPSLGTKEGYLTKQGGLVKTWKTRWFTLHRNELKYFKDQMSPEPIRILDLTECSAVQFDYSQERVNCFCLVFPFRTFYLCAKTGVEADEWIKILRWKLSQIRKQLNQGEGTIRSRSFIFK

SEQ ID NO: 633 - protein, 174 aa, Homo sapiens
QTTYYSPGKVTIDSIKDEGDLRNGWLIKTPTKSFAVYAATATEKSEWMNHINKCVTDLLSKSGKTPSNEHAAVWVPDSEATVCMRCQKAKFTPVNRRHHCRKCGFVVCGPCSEKRFLLPSQSSKPVRICDFCYDLLSAGDMATCQPARSDSYSQSLKSPLNDMSDDDDDDDSSD

SEQ ID NO: 634 - protein, 224 aa, Homo sapiens
LNILLRIDFDEGCHNERKVTCKHPVTGQPSQDNCIFVVNEQTVATMTSEEKKERPISMINEASNYNVTSDYAVHPMSPVGRTSRASKKVHNFGKRSNSIKRNPNAPVVRRGWLYKQDSTGMKLWKKRWFVLSDLCLFYYRDEKEEGILGSILLPSFQIALLTSEDHINRKYAFKAAHPNMRTYYFCTDTGKEMELWMKAMLDAALVQTEPVKRVDKITSENAPT

SEQ ID NO: 635 - protein, 925 aa, Homo sapiens
ARGEITGRCTAMGPFKSSVFILILHLLEGALSNSLIQLNNNGYEGIVVAIDPNVPEDETLIQQIKDMVTQASLYLFEATGKRFYFKNVAILIPETWKTKADYVRPKLETYKNADVLVAESTPPGNDEPYTEQMGNCGEKGERIHLTPDFIAGKKLAEYGPQGRAFVHEWAHLRWGVFDEYNNDEKFYLSNGRIQAVRCSAGITGTNVVKKCQGGSCYTKRCTFNKVTGLYEKGCEFVLQSRQTEKASIMFAQHVDSIVEFCTEQNHNKEAPNKQNQKCNLRSTWEVIRDSEDFKKTTPMTTQPPNPTFSLLQIGQRIVCLVLDKSGSMATGNRLNRLNQAGQLFLLQTVELGSWVGMVTFDSAAHVQSELIQINSGSDRDTLAKRLPAAASGGTSICSGLRSAFTVIRKKYPTDGSEIVLLTDGEDNTISGCFNEVKQSGAIIHTVALGPSAAQELEELSKMTGGLQTYASDQVQNNGLIDAFGALSSGNGAVSQRSIQLESKGLTLQNSQWMNGTVIVDSTVGKDTLFLITWTTQPPQILLWDPSGQKQGGFVVDKNTKMAYLQIPGIAKVGTWKYSLQASSQTLTLTVTSRASNATLPPITVTSKTNKDTSKFPSPLVVYANIRQGASPILRASVTALIESVNGKTVTLELLDNGAGADATKDDGVYSRYFTTYDTNGRYSVKVRALGGVNAARRRVIPQQSGALYIPGWIENDEIQWNPPRPEINKDDVQHKQVCFSRTSSGGSFVASDVPNAPIPDLFPPGQITDLKAEIHGGSLINLTWTAPGDDYDHGTAHKYIIRISTSILDLRDKFNESLQVNTTALIPKEANSEEVFLFKPENITFENGTDLFIAIQAVDKVDLKSEISNIARVSLFIPPQTPPETPSPDETSAPCPNIHINSTIPGIHILKIMWKWIGELQLSIA

SEQ ID NO: 636 - protein, 268 aa, Homo sapiens
  SITE (85): Xaa equals any of the naturally occurring L-amino acids
PRVRLAELLKYTAQDHSDYRYVAAALAVMRNVTQQINERKRRLENIDKIAQWQASVLDWEGEDILDRSSELIYTGEMAWIYQPYXRNQQRVFFLFDHQMVLCKKDLIRRDILYYKGRIDMDKYEVVDIEDGRDDDFNVSMKNAFKLHNKETEEIHLFFAKKLEEKIRWLRAFREERKMVQEDEKIGFEISENQKRQAAMTVRKVPKQKGVNSARSVPPSYPPPQDPLNHGQYLVPDGIAQSQVFEFTEPKRSQSPFWQNFSRLTPFKK

SEQ ID NO: 637 - protein, 119 aa, Homo sapiens
  SITE (10): Xaa equals any of the naturally occurring L-amino acids
  SITE (112): Xaa equals any of the naturally occurring L-amino acids
  SITE (116): Xaa equals any of the naturally occurring L-amino acids
LRAGSLKYSXLQAEGNFDPSCCFTIYHGNHMESLDLITSNPEEARTWITGLKYLMAGISDEDSLAKRQRTHDQWVKQTFEEADKNGDGLLNIEEIHQLMHKLNVNLPRRKVXQMFXEAD

SEQ ID NO: 638 - protein, 239 aa, Homo sapiens
ELTLEILDRRNVGIREKDYWTCFEVNEREEAERPLHFAEKVLPILHGLGTDSHLVVKKHQAMEAMLLYLASRVGDTKHGMMKFREDRSLLGLGLPSGGFHDRYFILNSSCLRLYKEVRSHRPEKEWPIKSLKVYLGVKKKLRPPTCWGFTVVHETEKHEKQQWYLCCDTQMELREWFATFLFVQHDGLVWPSEPSRVSRAVPEVRLGSVSLIPLRGSENEMRRSVAAFTADPLSLLRNV

SEQ ID NO: 639 - protein, 104 aa, Homo sapiens
  SITE (81): Xaa equals any of the naturally occurring L-amino acids
YCSWGAGRCLGHSLAAVLVIKEAMAGEDEPAAFPETEPRAVLLMKPASDVHGKVGIPPERIASLPKGVDLVYLPGGLLGAXAAERGDGGGAAGQAQAAAFGRIR

SEQ ID NO: 640 - protein, 279 aa, Homo sapiens
  SITE (89): Xaa equals any of the naturally occurring L-amino acids
  SITE (104): Xaa equals any of the naturally occurring L-amino acids
  SITE (136): Xaa equals any of the naturally occurring L-amino acids
  SITE (278): Xaa equals any of the naturally occurring L-amino acids
KHRPEAEAARWSQDEMPLPGACRPGLFPAAPPLWALESPGKPQRAGVFRGTCLCPGGVLCSPHGQALWVGAVRCPFLGASGGRALPTPXQPQTARGSPAPRPRXPCRSEKGAWPPSLQLDELLSTADPGLDSELLXHWAEPDGPSRTDRLLAGTQPSLPVVGSLTYLQGARVSGSHVRGSPGLSAGSYQRPSSPSCTSSTTSPLLTRSASGPPFSWSATTVYLPGTSFLGPNPPSSSASDELICSSALDQPPSSSGASSEWDVLLQPLPFSGGFVRAXS

SEQ ID NO: 641 - protein, 128 aa, Homo sapiens
PDLCPRTWCAGLRRCWGQSPMNTGTGDGTHLRLKGCIFGSFLTPASYQVCRGYLVKMGGKIKSWKKRWFVFDRLKRTLSYYVGEFPQGHPGGQPGSLGSVTQDGWSSRRRPSFQVGDQSLGLGFALLP

SEQ ID NO: 642 - protein, 304 aa, Homo sapiens
  SITE (21): Xaa equals any of the naturally occurring L-amino acids
  SITE (210): Xaa equals any of the naturally occurring L-amino acids
  SITE (253): Xaa equals any of the naturally occurring L-amino acids
  SITE (275): Xaa equals any of the naturally occurring L-amino acids
  SITE (284): Xaa equals any of the naturally occurring L-amino acids
  SITE (286): Xaa equals any of the naturally occurring L-amino acids
  SITE (290): Xaa equals any of the naturally occurring L-amino acids
SSRSLMEQGIQEDEQLLYDLXYYSFFDLNPKYDAVRINQLYEQARWAILLEEIDCTEEEMLIFAALQYHISKLSLSAETQDFAGESEVDEIEAALSNLEVTLEGGKADSLLEDITDIPKLADNLKLFRPKKLLPKAFKQYWFIFKDTSIAYFKNKELEQGEPLEKLNLRGCEVVPDVNVAGRKFGIKLLIPVADGMNEMYLRCDHENQYXQWMAACMLASKGKTMADSSYQPEVLNILSFLRMKNRNSASQVXSSLENMDMNPEWFGSPRCAKRXQIPNSLGPXRXPGKXATQKPVGPKNCPPW

SEQ ID NO: 643 - protein, 305 aa, Homo sapiens
GCRNSARGDSIPKSLSDSLSPSLSSGTLSTSTSISSQISTTTFESAITPSESSGYDSGDIESLVDREKELATKCLQLLTHTFNREFSQVHGSVSDCKLSDISPIGRDPSESSFSSATLTPSSTCPSLVDSRSNSLDQKTPEANSRASSPCPEFEQFQIVPAVETPYLARAGKNEFLNLVPDIEEIRPSSVVSKKGYLHFKEPLYSNWAKHFVVVRRPYVFIYNSDKDPVERGIINLSTAQVEYSEDQQAMVKTPNTFAVCTKHRGVLLQALNDKDMNDWLYAFNPLLAGTIRSKLSRRCPSQSKY

SEQ ID NO: 644 - protein, 262 aa, Homo sapiens
  SITE (149): Xaa equals any of the naturally occurring L-amino acids
  SITE (152): Xaa equals any of the naturally occurring L-amino acids
AHASAHASAHASGRRGIAVASWCSPRWFAGEEMAFVKSGWLLRQSTILKRWKKNWFDLWSDGHLIYYDDQTRQNIEDKVHMPMDCINIRTGQECRDTQPPDGKSKDCMLQIVCRDGKTISLCAESTDDCLAWKFTLQDSRTNTAYVGSXVMXDETSVVSSPPPYTAYAAPAPEVGRTLSLQQAYGYGPYGGAYPPGTQVVYAANGQAYAVPYQYPYAGLYGQQPANQVIIRERYRDNDSDLALGMLAGAATGMALGSLFWVF

SEQ ID NO: 645 - protein, 135 aa, Homo sapiens
  SITE (114): Xaa equals any of the naturally occurring L-amino acids
  SITE (116): Xaa equals any of the naturally occurring L-amino acids
  SITE (119): Xaa equals any of the naturally occurring L-amino acids
  SITE (126): Xaa equals any of the naturally occurring L-amino acids
ARDDLFSDVLEEGELDMEKSQEEMDQALAESSEEQEDALNISSMSLLAPLAQTVGVVSPESLVSTPRLELKDTSRSDESPKPGKFQRTRVPRAESGDSLGSEDRDLLYSIDAYXSXRFXETERPSXKQVIVPKEN

SEQ ID NO: 646 - protein, 409 aa, Homo sapiens
CSSSEMPYVDRQNRICGFLDIEENENSGKFLRRYFILDTREDSFVWYMDNPQNLPSGSSRVGAIKLTYISKVSDATKLRPKAEFCFVMNAGMRKYFLQANDQQDLVEWVNVLNKAIKITVPKQSDSQPNSDNLSRHGECGKKQVSYRTDIVGGVPIITPTQKEEVNECGESIDRNNLKRSQSHLPYFTPKPPQDSAVIKAGYCVKQGAVMKNWKRRYFQLDENTIGYFKSELEKEPLRVIPLKEVHKVQECKQSDIMMRDNLFEIVTTSRTFYVQADSPEEMHSWIKAVSGAIVAQRGPGRSASSEHPPGPSESKHAFRPTNAAAATSHSTASRSNSLVSTFTMEKRGFYESLAKVKPGNFKVQTVSPREPASKVTEQALLRPQSKNGPQEKDCDLVDLDDASLPVSDV

SEQ ID NO: 647 - protein, 1031 aa, Homo sapiens
  SITE (636): Xaa equals any of the naturally occurring L-amino acids
ADAWADAWVNDTVVPTSPSADSTVLLAPSVQDSGSLHNSSSGESTYCMPQNAGDLPSPDGDYDYDQDDYEDGAITSGSSVTFSNSYGSQWSPDYRCSVGTYNSSGAYRFSSEGAQSSFEDSEEDFDSRFDTDDELSYRRDSVYSCVTLPYFHSFLYMKGGLMNSWKRRWCVLKDETFLWFRSKQEALKQGWLHKKGGGSSTLSRRNWKKRWFVLRQSKLMYFENDSEEKLKGTVEVRTAKEIIDNTTKENGIDIIMADRTFHLIAESPEDASQWFSVLSQVHASTDQEIQEMHDEQANPQNAVGTLDVGLIDSVCASDSPDRPNSFVIITANRVLHCNADTPEEMHHWITLLQRSKGDTRVEGQEFIVRGWLHKEVKNSPKMSSLKLKKRWFVLTHNSLDYYKSSEKNALKLGTLVLNSLCSVVPPDEKIFKETGYWNVTVYGRKHCYRLYTKLLNEATRWSSAIQNVTDTKAPIDTPTQQLIQDIKENCLNSDVVEQIYKRNPILRYTHHPLHSPLLPLPYGDINLNLLKDKGYTTLQDEAIKIFNSLQQLESMSDPIPIIQGILQTGHDLRPLRDELYCQLIKQTNKVPHPGSVGNLYSWQILTCLSCTFLPSRGILKYLKFHLKRIREQFPGXEMEKYALFTYESLKKTKCREFVPSRDEIEALIHRQEMTSTVYCHGGGSCKITINSHTTAGEVVEKLIRGLAMEDSRNMFALFEYNGHVDKAIESRTVVADVLAKFEKLAATSEVGDLPWKFYFKLYCFLDTDNVPKDSVEFAFMFEQAHEAVIHGHHPAPEENLQVLAALRLQYLQGDYTLHAAIPPLEEVYSLQRLKARISQSTKTFTPCERLEKRRTSFLEGTLRRSFRTGSVVRQKVEEEQMLDMWIKEEVSSARASIIDKWRKFQGMNQEQAMAKYMALIKEWPGYGSTLFDVECKEGGFPQELWLGVSADAVSVYKRGEGRPLEVFQYEHILSFGAPLANTYKIVVDERELLFETSEVVDVAKLMKAYISMIVKKRYSTTRSASSQGSSR

SEQ ID NO: 648 - protein, 157 aa, Homo sapiens
NLSDPSSPLPTQDDNNLIRLGKYLTWNYFKKELPWVLFIAGMLRNFISRQKNSTQGLGFIFIFEIIELIPLEHKPASMPSLDKASLLPQPPTLDGILPPLALLGVLRGVIVLLHYQADGLSLLGAQDRCRTGLLLRRKRLPGPAVRKRKEKKVVGRV

SEQ ID NO: 649 - protein, 157 aa, Homo sapiens; identical to SEQ ID NO: 648

SEQ ID NO: 650 - protein, 178 aa, Homo sapiens
FFFFFFFFFFFFFFFFFFFFFLRGGRRPTTVFPCQLGLRSVPYPGAGQHPRSAALPRTRRDKESSEVSPGGSSFSPAWGTGVQGCQEEATEGALQRAFFSSKGGRPLHRIELGPLERLELPGRVKEMDLEKGRFSGVALEGLDSCANLLNPAVHVFWTVCLYVEGPGACYYFKQVVPH

SEQ ID NO: 651 - protein, 602 aa, Homo sapiens
PKPLGSCLERDPDPGGHGPDIPLQDDSINQAPLEIVSKLLSENTNLTTQEHENIIVAIAPLLENNHPPPDLCEFFCKHCRERPRSMVVIEVFTPVVQRILKHNMDFGKCPRLRLFTQEYILALNELNAGMEVVKKFIQSMHGPTGHCPHPRVLPNLVAVCLAAIYSCYEEFINSRDNSPSLKEIRNGCQQPCDRKPTLPLRLLHPSPDLVSQEATLSEARLKSVVVASSEIHVEVERTSTAKPALTASAGNDSEPNLIDCLMVSPACSTMSIELGPQADRTLGCYVEILKLLSDYDDWRPSLASLLQPIPFPKEALAHEKFTKELKYVIQRFAEDPRQEVHSCLLSVRAGKDGWFQLYSPGGVACDDDGELFASMVHILMGSCYKTKKFLLSLAENKLGPCMLLALRGNQTMVEILCLMLEYNIIDNNDTQLQIISTLESTDVGKRMYEQLCDRQRELKELQRKGGPTRLTLPSKSTDADLARLLSSGSFGNLENLSLAFTNVTSACAEHLIKLPSLKQLNLWSTQFGDAGLRLLSEHLTMLQVLNLCETPVTDAGLLALSSMKSLCSLNMNSTKLSADTYEDLKAKLPNLKEVDVRYTEAW

SEQ ID NO: 652 - protein, 208 aa, Homo sapiens
DRMDCGRKVRVESGYFSLEKTKQDLKAEEQQLPPPLSPPSPSTPNHRRSQVIEKFEALDIEKAEHMETNAVGPSPSSDTRQGRSEKRAFPRKRDFTNEAPPAPLPDASASPLSPHRRAKSLDRRSTEPSVTPDLLNFKKGWLTKQYEDGQWKKHWFVLADQSLRYYRDSVAEEAADLDGEIDLSACYDVTEYPVQRNYGFQIHTKEGE

SEQ ID NO: 653 - protein, 158 aa, Homo sapiens
VPLSFGSISQSLIRHWLSSCSIFAWDLLSPLSLAAWSSLCTTCSTRISFPKCSCNSWKLEGVLTVARKPLSSGDEMGSWPVAWHSSQYWVLVGGEGGQQPSQPPPARASQCPQPSLQLFLGFCSQLVGPPTCALHPRGQDGKGIGFCSLKVWFHLAVL

SEQ ID NO: 654 - protein, 512 aa, Homo sapiens
  SITE (406): Xaa equals any of the naturally occurring L-amino acids
  SITE (410): Xaa equals any of the naturally occurring L-amino acids
  SITE (411): Xaa equals any of the naturally occurring L-amino acids
  SITE (471): Xaa equals any of the naturally occurring L-amino acids
  SITE (496): Xaa equals any of the naturally occurring L-amino acids
GASEARRGWLGRRGWRGSRAAAMGSLKEELLKAIWHAFTALDQDHSGKVSKSQLKVLSHNLCTVLKVPHDPVALEEHFRDDDEGPVSNQGYMPYLNRFILEKVQDNFDKIEFNRMCWTLCVKKNLTKNPLLITEEDAFKIWVIFNFLSEDKYPLIIVSEEIEYLLKKLTEAMGGGWQQEQFEHYKINFDDSKNGLSAWELIELIGNGQFSKGMDRQTVSMAINEVFNELILDVLKQGYMMKKGHRRKNWTERWFVLKPNIISYYVSEDLKDKKGDILLDENCCVESLPDKDGKKCLFLVKCFDKTFEISASDKKKKQEWIQAIHSTIHLLKLGSPPPHKEARQRRKELRKKQLAEQEELERQMKELQAANESKQQELEAVRKKLEEAASRAAEEEKKRLQTQVELXARFXXELEREKLIRQQMEEQVAQKSSELEQYLQRVRELEDMYLKLQEALEDERQARQDEETVRKXQARCQICLQTLPLCTLPGLIQFLGXTNTLVEREKCLCSGCD

SEQ ID NO: 655 - protein, 403 aa, Homo sapiens
RDKVVEDDEDDFPTTRSDGDFLHSTNGNKEKLFPHVTPKGINGIDFKGEAITFKATTAGILATLSHCIELMVKREDSWQKRLDKETEKKRRTEEAYKNAMTELKKKSHFGGPDYEEGPNSLINEEEFFDAVEAALDRQDKIEEQSQSEKVRLHWPTSLPSGDAFSSVGTHRFVQKVEEMVQNHMTYSLQDVGGDANWQLVVEEGEMKVYRREVEENGIVLDPLKATHAVKGVTGHEVCNYFWNVDVRNDWETTIENFHVVETLADNAIIIYQTHKRVWPASQRDVLYLSVIRKIPALTENDPETWIVCNFSVDHDSAPLNNRCVRAKINVAMICQTLVSPPEGNQEISRDNILCKITYVANVNPGGWAPASVLRAVAKREYPKFLKRFTSYVQEKTAGKPILF

SEQ ID NO: 656 - protein, 162 aa, Homo sapiens
  SITE (99): Xaa equals any of the naturally occurring L-amino acids
  SITE (161): Xaa equals any of the naturally occurring L-amino acids
YGRLGEVNPPSHMGTFRRSNTDVHTVASLLKLYLRELPEPVIPYAKYEDFLSCAKLLSKEEEAGVKELAKQVKSLPVVNYNLLKYICRFLDEVQSYSGXNKMSVQNLATVFGPNILRPKVEDPLTIMEGTVVVQQLMSVMISKHDCLFPKDAELQKQAPRXE

SEQ ID NO: 657 - protein, 167 aa, Homo sapiens
EIEKLEHKLNQAPEKWQQLWERVTVDLKEEPRTDRSQRHLSRSPGIVSTNLPSYQKRSLLHLPDSSMGEEQNSSISPSNGVERRAATLYSQYTSKNDENRSFEGTLYKRGALLKGWKPRWFVLDVTKHQLRYYDSGEDTSCKGHIDLAEVEMVIPAGPRWESPKAHK

SEQ ID NO: 658 - protein, 214 aa, Homo sapiens
  SITE (53): Xaa equals any of the naturally occurring L-amino acids
QHVQREWSGHGEDRGDGEDAERGSCREEPAHGVEGAGDGAAAAGPGGGAAEAXQVERRLQSESARRQQLVEKEVKMREKQFSQARPLTRYLPIRKEDFDLKTHIESSGHGVDTCLHVVLSSKVCRGYLVKMGGKIKSWKKRWFVFDRLKRTLSYYVDKHETKLKGVIYFQAIEGSVLRPPAPVQPRRGFSASTMVTEKPEPSPHLLRKRPMDRL

SEQ ID NO: 659 - protein, 319 aa, Homo sapiens
  SITE (17): Xaa equals any of the naturally occurring L-amino acids
  SITE (36): Xaa equals any of the naturally occurring L-amino acids
QQHVAVLCAQISFGRLXITVRNRVGIDGMKFVETQXEEYPHTFQVSGKERTLELQASSAQDKEEWIKALQETIDAFHQRHETFRNAIAKDNDIHSEVSTAELGKRAPRWIRDNEVTMCMKCKEPFNALTRRRHHCRACGYVVCWKCSDYKAQLEYDGGKLSKVCKDCYQIISGFTDSEEKKRKGILEIESAEVSGNSVVCSFLQYMEKSKPWQKAWCVIPKQDPLVLYMYGAPQDVRAQATIPLLGYVVDEMPRSADLPHSFKLTQSKSVHSFAADSEELKQKWLKVILLAVTGETPGGPNEHPATLDDHPEPKKKSEC

SEQ ID NO: 660 - protein, 301 aa, Homo sapiens
SMEGVLYKWTNYLTGWQPRWFVLDNGILSYYDSQDDVCKGSKGSIKMAVCEIKVHSADNTRMELIIPGEQHFYMKAVNAAERQRWLVALGSSKACLTDTRTKKEKEISETSESLKTKMSELRLYCDLLMQQVHTIQEFVHHDENHSSPSAENMNEASSLLSATCNTFITTLEECVKIANAKFKPEMFQLHHPDPLVSPVSPSPVQMMKRSVSHPGSCSSERSSHSIKEPVSTLHRLSQRRRRTYSDTDSCSDIPLEDPDRPVHCSKNTLNGDLASATIPEESRLMAKKQSESEDTLPSFSS

SEQ ID NO: 661 - protein, 687 aa, Homo sapiens
  SITE (339): Xaa equals any of the naturally occurring L-amino acids
  SITE (627): Xaa equals any of the naturally occurring L-amino acids
  SITE (649): Xaa equals any of the naturally occurring L-amino acids
  SITE (674): Xaa equals any of the naturally occurring L-amino acids
TCWARKRFSRKPSTVCKLLPANPRPQHGARRLCPPTLSILLRKAGGIRKPLASLHLSPVSSALRMESGRGSSTPPGPIAALGMPDTGPGSSSLGKLQALPVGPRAHCGDPVSLAAAGDGSPDIGPTGELSGSLKIPNRDSGIDSPSSSVAGENFPCEEGLEAGPSPTVLGAHAEMALDSQVPKVTPQEEADSDVGEEPDSENTPQKADKDAGLAQHSGPQKLLHIAQELLHTEETYVKRLHLLDQVFCTRLTDAGIPPEVIMGIFSNISSIHRFHGQFLLPELKTRITEEWDTNPRLGDILQKLAPFLKMYGEYVKNFDRAVGLVSTWTQRSPLFKDVXHSIQKQEVCGNLTLQHHMLEPVQRVPRYELLLKDYLKRLPQDAPDRKDAERSLELISTAANHSNAAIRKVEKMHKLLEVYEQLGGEEDIVNPANELIKEGQIQKLSAKNGTPQDRHLFLFNSMILYCVPKLRLMGQKFSVREKMDISGLQVQDIVKPNTAHTFIITGRKRSLELQTRTEEEKKEWIQIIQATIEKHKQNSETFKAFGGAFSQDEDPSLSPDMPITSTSPVEPVVTTEGSSGAAGLEPRKLSSKTRRDKEKQSCKSCGETFNSITKRRHHCKLVWGGIXGKVLPRFKGPRNKPGKSPGLQXELVSWTQAQWAPLEKPQRKDTPIGXTPKPKPGFWGPPG

SEQ ID NO: 662 - protein, 70 aa, Homo sapiens
KQSYDFIVMLREQLAGVLHNKKKSDNLKDSGYWLPLFSAPGMEKSSAKQAPNTRYSLYLKVVQHDRMPVA

SEQ ID NO: 663 - protein, 612 aa, Homo sapiens
GTSSWEVVEGLRGEMNYTQEPPVQKGFLLKKRKWPLKGWHKRFFYLDKGILKYAKSQTDIEREKLHGCIDVGLSVMSVKKSSKCIDLDTEEHIYHLKVKSEEVFDEWVSKLRHHRMYRQNEIAMFPHEVNHFFSGSTITDSSSGVFDSISSRKRSSISKQNLFQTGSNVSFSCGGETRVPLWLQSSEDMEKCSKDLAHCHAYLVEMSQLLQSMDVLHRTYSAPAINAIQGGSFESPKKEKRSHRRWRSRAIGKDAKGTLQVPKPFSGPVRLHSSNPNLSTLDFGEEKNYSDGSETSSEFSKMQEDLCHIAHKVYFTLRSAFNIMSAEREKLKQLMEQDASSSPSAQVIGLKNALSSALAQNTDLKERLRRIHAESLLLDSPAVAKSGDNLAEENSRDENRALVHQLSNESRLSITDSLSEFFDAQEVLLSPSSSENEISDDDSYVSDISDNLSLDNLSNDLDNERQTLGPVLDSGREAKSRRRTCLPAPCPSSSNISLWNILRNNIGKDLSKVAMPVELNEPLNTLQRLCEELEYSELLDKAAQIPSPLERMVRSQPSLATVQPRSPSHEAIHGAHQRDSPCSLRFHFDCSVNRFITQSCLASSAWLFPVTL

SEQ ID NO: 664 - protein, 325 aa, Homo sapiens
PRVRQKLTELQRDLVGIENLIAPGREFIREGCLHKLTKKGLQQRMFFLFSDMLLYTSKGVAGTSHFRIRGLLPLQGMLVEESDNEWSVPHCFTIYAAQKTIVVAASTRLEKEKWMLDLNSAIQAAKSGGDTAPALPGRTVCTRPPRSPNEVSLEQESEDDARGVRSSLEGHGQHRANTTMHVCWYRNTSVSRADHSAAVENQLSGYLLRKFKNSHGWQKLWVVFTNFCLFFYKTHQDDYPLASLPLLGYSVSIPREADGIHKDYVFKLQFKSHVYFFRAESKYTFERWMEVIQGASSSAGRAPSIVQDGPQPSSGLEGMVRGKEE

SEQ ID NO: 665 - protein, 468 aa, Homo sapiens
  SITE (77): Xaa equals any of the naturally occurring L-amino acids
  SITE (270): Xaa equals any of the naturally occurring L-amino acids
  SITE (376): Xaa equals any of the naturally occurring L-amino acids
SAGLGWPGGGHQRGGWAVLGFQEASWDSGSSVGCACQGAGGFCGYTPILSSLCVPKPALVPRCLETWGRPAQEAIWXCRCSLQSVRWRLLPRPVGVLGLPEGKGITCSEAIRTQCPAKRHWESRKSHSPPLHLPPWDGVPEPWAASGAALLGAWAVELAWGQMFCRPGVSCGRQTRPPPRRRTPRCWASRRPCCPPCPRRSHRHLHWTSADGPGQVGWLPWGPRALLLRLLLPLLGGQFAVAEAADAHGLGGQAREQEALARALSADHEXALAAVVAPREGREARLRAAHADVRGLVGDPGCRVLRAGRAARGPQLPPHALLDVANPFLALRSGGGRHHKGLLGRLDHPAVLGLQRLRQQLQCDLLQGDDVLAAVXALVEHDAAIHQDVVKEEEDARLGLLAALFGQHALAQQHSAWQRQRLPRGPEAALHCRDALAVDLRVGQVVHHRLQLAASAPAPRPALESTPQ

SEQ ID NO: 666 - protein, 143 aa, Homo sapiens
  SITE (1): Xaa equals any of the naturally occurring L-amino acids
  SITE (15): Xaa equals any of the naturally occurring L-amino acids
  SITE (120): Xaa equals any of the naturally occurring L-amino acids
XHTDDKSRLTVTGPXIPGIDPRVRGKRVGGSIRPWKQMYVVLRGHSLYLYKDKREQTTPSEEEQPISVNACLIDISYSETKRKNVFRLTTSDCECLFQAEDRDDMLAWIKTIQESSNLNXEDTGVTNRDLISRRIKEYNNLMS

SEQ ID NO: 667 - protein, 744 aa, Homo sapiens
GRPTRPPKMASIMEGPLSKWTNVMKGWQYRWFVLDYNAGLLSYYTSKDKMMRGSRRGCVRLRGAVIGIDDEDDSTFTITVDQKTFHFQARDADEREKWIHALEETILRHTLQLQGLDSGFVPSVQDFDKKLTEADAYLQILIEQLKLFDDKLQNCKEDEQRKKIETLKETTNSMVESIKHCIVLLQIAKDQSNAEKHADGMISTINPVDAIYQPSPLEPVISTMPSQTVLPPEPVQLCKSEQRPSSLPVGPVLATLGHHQTPTPNSTGSGHSPPSSSLTSPSHVNLSPNTVPEFSYSSSEDEFYDADEFHQSGSSPKRLIDSSGSASVLTHSSSGNSLKRPDTTESLNSSLSNGTSDADLFDSHDDRDDDAEAGSVEEHKSVIMHLLSQVRLGMDLTKVVLPTFILERRSLLEMYADFFAHPDLFVSISDQKDPKDRMVQVVKWYLSAFHAGRKGSVAKKPYNPILGEIFQCHWTLPNDTEENTELVSEGPVPWVSKNSVTFVAEQVSHHPPISAFYAECFNKKIQFNAHIWTKSKFLGMSIGVHNIGQGCVSCLDYDEHYILTFPNGYGRSILTVPWVELGGECNINCSKTGYSANIIFHTKPFYGGKKHRITAEIFSPNDKKSFCSIEGEWNGVMYAKYATGENTVFVDTKKLPIIKKKVRKLEDQNEYESRSLWKDVTFNLKIRDIDAATEAKHRLEERQRAEARERKEKEIQWETRLFHEDGECWVYDEPLLKRLGAAKH

SEQ ID NO: 668 - protein, 98 aa, Homo sapiens
LIVHAVHTILIIFFRWCYCNSLSCKFFIKISSICLRCYLRFKRRYKLFIIYILPVYSREETVSHNFFCIIWSSTKADSHRKLVNFCCTPKPLMDETYD

SEQ ID NO: 669 - protein, 276 aa, Homo sapiens
  SITE (17): Xaa equals any of the naturally occurring L-amino acids
  SITE (181): Xaa equals any of the naturally occurring L-amino acids
  SITE (233): Xaa equals any of the naturally occurring L-amino acids
  SITE (254): Xaa equals any of the naturally occurring L-amino acids
GDTIEGTPAGTGPEFPXRPTRPVNGGELFFHLQRERSFPEHRARFYAAEIASALGYLHSIKIVYRDLKPENILLDSVGHVVLTDFGLCKEGIAISDTTTTFCGTPEYLAPEVIRKQPYDNTVDWWCLGAVLYEMLYGLPPFYCRDVAEMYDNILHKPLSLRPGVSLTAWSILEELLEKDRXNRLGAKEDFLEIQNHPFFESLSWADLVQKKIPPPFNPNVAGPDDIRNFDTAXTEETVPYSVCVSSDYSIVNAXVLEADDAFVGFSYAPPSEDLFL

SEQ ID NO: 670 - protein, 255 aa, Homo sapiens
FGTSKYGPECDWWSLGVCMYEMLYGETPFYAESLVETYGKIMNHEERFQFPSHVTDVSEEAKDLIQRLICSRERRLGQNGIEDFKKHAFFEGLNWENIRNLEAPYIPDVSSPSDTSNFDVDDDVLRNTEILPPGSHTGFSGLHLPFIGFTFTTESCFSDRGSLKSIMQSNTLTKDEDVQRDLEHSLQMEAYERRIRRLEQEKLELSRKLQESTQTVQSLHGSSRALSNSNRDKEIKKLNEEIERLKNKIADSNRL

SEQ ID NO: 671 - protein, 573 aa, Homo sapiens
  SITE (185): Xaa equals any of the naturally occurring L-amino acids
  SITE (216): Xaa equals any of the naturally occurring L-amino acids
  SITE (234): Xaa equals any of the naturally occurring L-amino acids
  SITE (255): Xaa equals any of the naturally occurring L-amino acids
  SITE (269): Xaa equals any of the naturally occurring L-amino acids
  SITE (275): Xaa equals any of the naturally occurring L-amino acids
RTGRAGGERPRVGSGPRGTMSAKVRLKKLEQLLLDGPWRNESALSVETLLDVLVCLYTECSHSALRRDKYVAEFLEWAKPFTQLVKEMQLHREDFEIIKVIGRGAFGEVAVVKMKNTERIYAMKILNKWEMLKRAETACFREERDVLVNGDCQWITALHYAFQDENHLYLVMDYYVGGDLLTLLXKFEDKLPEDMARFYIGEMVLAIDSIHQLHYXHRDIKPDNVLLDVNGHIXLADFGSCLKMNDDGTVQSSVXVGTPDYISPEILQXMEDGMXKYGPECDWWSLGVCMYEMLYGETPFYAESLVETYGKIMNHEERFQFPSHVTDVSEEAKDLIQRLICSRERRLGQNGIEDFKKHAFFEGLNWENIRNLEAPYIPDVSSPSDTSNFDVDDDVLRNTEILPPGSHTGFSGLHLPFIGFTFTTESCFSDRGSLKSIMQSNTLTKDEDVQRDLEHSLQMEAYERRIRRLEQEKLELSRKLQESTQTVQSLHGSSRALSNSNRDKEIKKLNEEIERLKNKIADSNRLERQLEDTVALRQEREDSTQRLRGLEKQHRVVRQEKEELHKQLVEASE

SEQ ID NO: 672 - protein, 112 aa, Homo sapiens
PRMKGDYKVMCTREELPESPSGPTVKDPLKHCPTPESGLGTSIVHCQLARSLVKAGQRLSTAQAPHTLGGQGRRVAGLKAGTGTRTRAPCVNGRTGAQLGPRAAQPDQLHTA

SEQ ID NO: 673 - protein, 151 aa, Homo sapiens
GKLVRLQVPVRNSRVDPRVRFLACFSVVQPSSFQNITEKWLPEIRTHNPQAPVLLVGTQADLRDDVNVLIQLDQGGREGPVPQPQAQGLAEKIRACCYLECSALTQKNLKEVFDSAILSAIEHKARLEKKLNAKGVRTLSRCRWKKFFCFV

SEQ ID NO: 674 - protein, 194 aa, Homo sapiens
EKMGKGCKVVVCGLLSVGKTAILEQLLYGNHTIGMEDCETMEDVYMASVETDRGVKEQLHLYDTRGLQEGVELPKHYFSFADGFVLVYSVNNLESFQRVELLKKEIDKFKDKKEVAIVVLGNKIDLSEQRQVDAEVAQQWAKSEKVRLWEVTVTDRKTLIEPFTLLASKLSQPQSKSSFPLPGRKNKGNSNSEN

SEQ ID NO: 675 - protein, 149 aa, Homo sapiens
PRVREAEGCRYQFRVALLGDAAVGKTSLLRSYVAGAPGAPEPEPEPEPTVGAECYRRALQLRAGPRVKLQLWDTAGHERFRCITRSFYRNVVGVLLVFDVTTGSPLNTSKTGTRRSWPLRARTRSSSCWLATRVTCRAPAVSQPRRPRS

SEQ ID NO: 676 - protein, 194 aa, Homo sapiens
KLSMGKSCKVVVCGQASVGKTSILEQLLYGNHVVGSEMIETQEDIYVGSIETDRWVREQVRFYDTRGLRDGAELPRHCFSCTDGYVLVYSTDSRESFQRVELLKKEIDKSKDKKEVTIVVLGNKCDLQEQRRVDPDVAQHWAKSEKVKLWEVSVADRRSLLEPFVYLASKMTQPQSKSAFPLSRKNKGSGSLDG

SEQ ID NO: 677 - protein, 198 aa, Homo sapiens
RPTRPPTRPGNPVQGAPPSWTSPRKILREHRSSHRCHCYCRYCCRRVCTSRPASVPAGASVDRPRPLSRCVRTPVPGPDAPLPPGKLPSHQQPPSATMATAPYNYSYIFKYIIIGDMGVGKSCLLHQFTEKKFMADCPHTIGVEFGTRIIEVSGQKIKLQIWDTAGQERLGLLHGATTEELRELLWSMISLEEVHITT

SEQ ID NO: 678 - protein, 158 aa, Homo sapiens
IEWLERSEVSGYRSRADPEPRGRDTMTYAYLFKYIIIGDTGVGKSCLLLQFTDKRFQPVHDLTIGVEFGARMVNIDGKQIKLQIWDTGLALSPKLECSGTISTHCTLNLPGSTSPPTSAPQVAGTADVCHHTWLIFSIFFRGVVSPCCPGWSQTPELK

SEQ ID NO: 679 - protein, 206 aa, Homo sapiens
QQLRLQGQRREEDVEVCGGGGRAVGKTCLLMSYANDAFPEEYVPTVFDHYAVTVTVGGKQHLLGLYDTAGQEDYNQLRPLSYPNTDVFLICFSVVNPASYHNVQEEWVPELKDCMPHVPYVLIGTQIDLRDDPKTLARLLYMKEKPLTYEHGVKLAKAIGAQCYLECSALTQKGLKAVFDEAILTIFHPKKKKKRCSEGHSCCSII

SEQ ID NO: 680 - protein, 190 aa, Homo sapiens
ELVKVRLMREYKVVVLGSGGVGKSALTVQFVTGTFIEKYDPTIEDFYRKEIEVDSSPSVLEILDTAGTEQFASMRDLYIKNGQGFILVYSLVNQQSFQDIKPMRDQIVRVKRYEKVPLILVGNKVDLEPEREVMSSEGRALAQEWGCPFMETSAKSKSMVDELFAEIVRQMNYSSLPEKQDQCCTTCVVQ

SEQ ID NO: 681 - protein, 223 aa, Homo sapiens
VGAVWGRGLRLGRCLGRAEIGVCLPSPLRTLTWLKRPREHERQRVDVKVVMLGKEYVGKTSLVERYVHDRFLVGPYQNTIGAAFVAKVMSVGDRTVTLGIWDTAGSERYEAMSRIYYRGAKAAIVCYDLTDSSSFERAKFWVKELRSLEEGCQIYLCGTKSDLLEEDRRRRRVDFHDVQDYADSSCSSALWGVGVCGCLGGSKKIGTALAARARCSRRSSWPP

SEQ ID NO: 682 - protein, 227 aa, Homo sapiens
YGESKDWNQKDLLSALVLTTVNCLPTPIMAKSAEVKLAIFGRAGVGKSALVVRFLTKRFIWEYDPTLESTYRHQATIDDEVVSMEILDTAGQEDTIQREGHMRWGEGFVLVYDITDRGSFEEVLPLKNILDEIKKPKNVTLILVGNKADLDHSRQVSTEEGEKLATELACAFYECSACTGEGNITEIFYELCREVRRRRMVQGKTRRRSSTTHVKQAINKMLTKISS

SEQ ID NO: 683 - protein, 138 aa, Homo sapiens
  SITE (59): Xaa equals any of the naturally occurring L-amino acids
  SITE (71): Xaa equals any of the naturally occurring L-amino acids
YGISRPRSDFTPSHLPIQRRMGIMLVYAITNGKRFENISKWLRNIDEHANEDVERMLLXNKCDMDDKRVVXKGKGEQIAREHGIRFFETSAKANINIEKAFLTLAEDILRKTPVKEPNSENVDISSGGGVTGWKSKCC

SEQ ID NO: 684 - protein, 226 aa, Homo sapiens
TRPMTGTPGAVATRDGEAPERSPPCSPSYDLTGKVMLLGDTGVGKTCFLIQFKDGAFLSGTFIATVGIDFSNKVVTVDGVRVKLQIWDTAGQERFRSVTHAYYRDAQALLLLYDITNKSSFDNIRAWLTEIHEYAQRDVVIMLLGNKADMSSERVIRSEDGETLAREYGVPFLETSAKTGMNVELAFLAIAKELKYRAGHQADEPSFQIRDYVESQKKRSSCCSFM

SEQ ID NO: 685 - protein, 230 aa, Homo sapiens
ARAALHGHKDFHPRVTCACQEHRTGTVGFKISKVIVVGDLSVGKTCLINRFCKDTFDKNYKATIGVDFEMERFEVLGIPFSLQLWDTAGQERFKCIASTYYRGAQAIIIVFNLNDVASLEHTKQWLADALKENDPSSVLLFLTPAQYALMEKDALQVAQEMKAEYWAVSSLTGENVREFFFRVAALTFEANVLAELEKSGARRIGDVVRINSDDSNLYLTASKKKPTCCP

SEQ ID NO: 686 - protein, 255 aa, Homo sapiens
  SITE (239): Xaa equals any of the naturally occurring L-amino acids
  SITE (243): Xaa equals any of the naturally occurring L-amino acids
  SITE (244): Xaa equals any of the naturally occurring L-amino acids
RRRRLPEGRGGVPAAKAGPTRLAADRPDLRPEDGRQPPLRGPGLGRAAAAAPGDALAGPGLSLLNLGRRRARAPGSRAMALRELKVCLLGDTGVGKSSIVWRFVEDSFDPNINPTIGASFMTKTVQYQNELHKFLIWDTAGQERFRALAPMYYRGSAAAIIVYDITKEETFSTLKNWVKELRQHGPPNIVVAIAGNKCDLIDVREVMERDAKDYADSIHAIFVETSAKNAININELFIXISEXXCALSISSVKAA

SEQ ID NO: 687 - protein, 168 aa, Homo sapiens
TKKLNIGGKRVNLAIWDTAGQERFHALGPIYYRDSNGAILVYDITDEDSFQKVKNWVKELRKMLGNEICLCIVGNKIDLEKERHVSIQEAESYAESVGAKHYHTSAKQNKGIEELFLDLCKRMIETAQVDERAKGNGSSQPGTARRGVQIIDDEPQAQTSGGGCCSSG

SEQ ID NO: 688 - protein, 139 aa, Homo sapiens
WDTAGQERFRSVTHAYYRDAHALLLLYDVTNKASFDNIQAWLTEIHEYAQHDVALMLLGNKVDSAHERVVKREDGEKLAKEYGLPFMETSAKTGLNVDLAFTAIAKELKQRSMKAPSEPRFRLHDYVKREGRGASCCRP

SEQ ID NO: 689 - protein, 146 aa, Homo sapiens
  SITE (89): Xaa equals any of the naturally occurring L-amino acids
  SITE (133): Xaa equals any of the naturally occurring L-amino acids
  SITE (141): Xaa equals any of the naturally occurring L-amino acids
GFQVSLSQEACAKMASAGDTQAGPRDAADQNFDYMFKLLLIGNSSVGKTSFLFRYADDSFTPAFVSTVGIDFKVKTVYRHDKRIKLQIXGHSGPGALPHHHHGLLPGSQGFLLMYDIANQESFAAVQDGATQXKTLLLGTXPSSSG

SEQ ID NO: 690 - protein, 393 aa, Homo sapiens
AQPPRWPPCSWGKEGRSWRIQWCLSREPREAGTQEWQAWGARVEQCQVYVYPLPDRLFHFKHNLSLHWGDTRGGGGCDEGTCESRQQTLAPAPTSPPCPRGSLEGSLWSEPQPGKERVPECSKSLAAGPRHHELEGRDGAASLVQSAPGPPGPVSAVVRSVCPGSEQQAEPALLLPLRLLQSAESHLGGLPEDVLHILPKLGGTFQVESSSDLFAGAQALHVGDGLQLGGPELPQLLLVLPQVCLAADEHHGDPAAEMRDLREPLDEDVVVAGGIHDVIADEHEVGVLVGQGPQPVIVFLPGRVVEVQGHLLAANGHADRVLLEHRWGVVLGEGALAVHHEQRGLAAAAVAHDHDLQLLPARTGGGGLGQGPGGIHCPEPAALAAARWALALV

SEQ ID NO: 691 - protein, 91 aa, Homo sapiens
WIPRAAGIRHEDQREVNERQARELADKYGIPYFETSAATGQNVEKAVETLLDLIMKRMEQCVEKTQIPDTVNGGNSGNLDGEKPPEKKCIC

SEQ ID NO: 692 - protein, 225 aa, Homo sapiens
TRPSLPVGIPDFGSIWSDFLFKFLVIGSAGTGKSCLLHQFIENKFKQDSNHTIGVEFGSRVVNVGGKTVKLQIWDTAGQERFRSVTRSYYRGAAGALLVYDITSRETYNSLAAWLTDARTLASPNIVVILCGNKKDLDPEREVTFLEASRFAQENELMFLETSALTGENVEEAFLKCARTILNKIDSGELDPERMGSGIQYGDASLRQLRQPRSAQAVAPQPCGC

SEQ ID NO: 693 - protein, 157 aa, Homo sapiens
SPRIRVGTETISAPKMLEEDMEVAIKMVVVGNGAVGKSSMIQRYCKGIFTKDYKKTIGVDFLERQIQVNDEDVRLMLWDTAGQEEFDAITKAYYRGAQACVLVFSTTDRESFEAVSSWREKVVAEVGDIPTVLVQNKIDLLDDSCIKNEKLRHWQKG

SEQ ID NO: 694 - protein, 78 aa, Homo sapiens
  SITE (64): Xaa equals any of the naturally occurring L-amino acids
  SITE (67): Xaa equals any of the naturally occurring L-amino acids
LCLQGYYRGAVGALLVFDLTKHQTYAVVERWLKELYDHAEATIVVMLVGNKSDLSQAREVPLRXPEXSLKQWTALLET

SEQ ID NO: 695 - protein, 102 aa, Homo sapiens
  SITE (9): Xaa equals any of the naturally occurring L-amino acids
  SITE (11): Xaa equals any of the naturally occurring L-amino acids
  SITE (92): Xaa equals any of the naturally occurring L-amino acids
  SITE (95): Xaa equals any of the naturally occurring L-amino acids
FLMLKSLMXAXCSVLRCPDFQPRKGKSPLRSLCGRNLHQLLPEGGKDHPASCGAARRGGRWAEICELGRRVQRSRGPNRGRRGSYRRGRGKXVEXGRVGKGW

SEQ ID NO: 696 - protein, 183 aa, Homo sapiens
GQVPSELLTPRCRDGPTINFIGHHDAWDLWPELPKLCIPGAQVPIGDFPLYIKHHDAGVGLVVVGGMHALEPLLACRVPKVHKDGPSIYRGCVLVQGQGVRGQLLWLKAIHEKSLHEFGFAHCAVSQADDLHVVISIILPLVQLTRFGFVFCHWLLAVERGPAQGRGGYCHCLGRSTRGCCQR

SEQ ID NO: 697 - protein, 227 aa, Homo sapiens; identical to SEQ ID NO: 682

SEQ ID NO: 698 - protein, 146 aa, Homo sapiens
  SITE (92): Xaa equals any of the naturally occurring L-amino acids
  SITE (103): Xaa equals any of the naturally occurring L-amino acids
  SITE (135): Xaa equals any of the naturally occurring L-amino acids
  SITE (140): Xaa equals any of the naturally occurring L-amino acids
EAEQSRLGATERAAAAAMNPEYDYLFKLLLIGDSGVGKSCLLLRFADDTYTESYISTIGVDFKIRTIELDGKTIKLQIWDTAGQERFRTITXHLPSGPSACCXEPPGSVRGPLKEDTQGALVGPRAKGAGKGPWXGGLGXPLLKGG

SEQ ID NO: 699 - protein, 239 aa, Homo sapiens
  SITE (23): Xaa equals any of the naturally occurring L-amino acids
AALPKSLSCAEPRLRFPGQARHXWPAARMQAPHKEHLYKLLVIGDLGVGKTSIIKRYVHQNFSSHYRATIGVDFALKVLHWDPETVVRLQLWDIAGQERFGNMTRVYYREAMGAFIVFDVTRPATFEAVAKWKNDLDSKLSLPNGKPVSVVLLANKCDQGKDVLMNNGLKMDQFCKEHGFVGWFETSAKENINIDEASRCLVKHILANECDLMESIEPDVVKPHLTSTKVASCSGCAKS

SEQ ID NO: 700 - protein, 287 aa, Homo sapiens
SSGLHAPGSLTRIRPRRLLRAPCKAAGRMNILAPVRRDRVLAELPQCLRKEAALHGHKDFHPRVTCACQEHRTGTVGFKISKVIVVGDLSVGKTCLINRFCKDTFDKNYKATIGVDFEMERFEVLGIPFSLQLWDTAGQERFKCIASTYYRGAQAIIIVFNLNDVASLEHTKQWLADALKENDPSSVLLFLVGSKKDLSTPAQYALMEKDALQVAQEMKAEYWAVSSLTGENVREFFFRVAALTFEANVLAELEKSGARRIGDVVRINSDDSNLYLTASKKKPTCCP

SEQ ID NO: 701 - protein, 401 aa, Homo sapiens
TRPRWQRRSRAEPAARPQFPAPLAPVMAKQYDVLFRLLLIGDSGVGKTCLLCRFTDNEFHSSHISTIGVDFKMKTIEVDGIKVRIQIWDTAGQERYQTITKQYYRRAQGIFLVYDISSERSYQHIMKWVSDVDEYAPEGVQKILIGNKADEEQKRQVGREQGQQLAKEYGMDFYETSACTNLNIKESFTRLTELVLQAHRKELEGLRMRASNELALAELEEEEGKPEGPANSSKTCWCCVLWGAPHTTPLFPQEARGQTGEPGLCPAAVLSCDDPIEYQKPLLPLPGPESGSAVISSSPCPQPVHPGVGFFSLFPQPQACYDPHDVPQALSHHPAPTRQQPGLESRPLSAAPFSVHRVSSLLFLSSPTSLSLTPPLRCVSYQSSSNPVPRVSCCVQLALSS

SEQ ID NO: 702 - protein, 221 aa, Homo sapiens
  SITE (221): Xaa equals any of the naturally occurring L-amino acids
IVTKTHWVLLVTNSFPSGAAKMSGKSLLLKVILLGDGGVGKSSLMNRYVTNKFDSQAFHTIGVEFLNRDLEVDGRFVTLQIWDTAGQERFKSLRTPFYRGADCCLLTFSVDDRQSFENLGNWQKEFIYYADVKDPEHFPFVVLGNKVDKEDRQVTTEEAQTWCMENGDYPYLETSAKDDTNVTVAFEEAVRQVLAVEEQLEHCMLGHTIDLTGLQAGSSCX

SEQ ID NO: 703 - protein, 140 aa, Homo sapiens
  SITE (127): Xaa equals any of the naturally occurring L-amino acids
ATRRSNKKLPFNRSSSDMDLQKKQSNLATGLSKAKSQVFKNQDPVLPPRPKPGHPLYSKYMLSVPHGIANEDIVSQNPGELSCKRGDVLVMLKQTENNYLECQKGEDTGRVHLSQMKIITPLDEHLXKQTKRSKPRSEAC

SEQ ID NO: 704 - protein, 143 aa, Homo sapiens
  SITE (2): Xaa equals any of the naturally occurring L-amino acids
  SITE (5): Xaa equals any of the naturally occurring L-amino acids
KXAAXINLLKEQSWSSTAVAAALELVDPPGCRIRHEVFDLLSDMHGTLTFVLIPSQQIKPPPAKETVIHVKAHFDYDPSDDPYVPCRELGLSFQKGDILHVISQEDPNWWQAYREGDEDNQPLAGLVPGKTQYGRKYIILKEH

SEQ ID NO: 705 - protein, 603 aa, Homo sapiens
  SITE (163): Xaa equals any of the naturally occurring L-amino acids
QPSRLPADRVLFDYQPEAPDELALRRGDVVKVLSKTTEDKGWWEGECQGRRGVFPDNFVLPPPPIKKLVPRKVVSRESAPIKEPKKLMPKTSLPTVKKLATATTGPSKAKTSRTPSRDSQKLTSRDSGPNGGFQSGGSYHPGRKRSKTQTPQQRSVSSQEEEXSSPVKAPSVKRTPMPDKTATPERPPAPENAPSSKKIPAPDKVPSPEKTLTLGDKASIPGNSTSGKIPAPDKVPTPEKMVTPEDKASIPENSIIPEETLTVDKPSTPERVFSVEESPALEAPPMDKVPNPKMAPLGDEAPTLEKVLTPELSEEEVSTRDDIQFHHFSSEEALQKVKYFVAKEDPSSQEEAHTPEAPPPQPPSSERCLGEMKCTLVRGDSSPRQAELKSGPASRPALEKPHPHEEATTLPEEAPSNDERTPEEEAPPNEQRPLREEVLPKEGVASKEEVTLKEELPPKEEVAPKEEVPPIERAFAQKTRPIKPPPDSQETLALPSLVPQNYTENKNEGVDVTSLRGEVESLRRALELMEEEADRHLGGAEEREGAAPAAGGPGDAGDPEVPDPARHPHADADLLRVGLGRDRGLTWLGPPTSLHTTLGNARK

SEQ ID NO: 706 - protein, 263 aa, Homo sapiens
KDEKTAQTRESHAKADSAVSQEQLRKLQERVERCAKEAEKTKAQYEQTLAELHRYTPRYMEDMEQAFETCQAAERQRLLFFKDMLLTLHQHLDLSSSEKFHELHRDLHQGIEAASDEEDLRWWRSTHGPGMAMNWPQFEEWSLDTQRTISRKEKGGRSPDEVTLTSIVPTRDGTAPPPQSPGSPGTGQDEEWSDEESPRKAATGVRVRALYDYAGQEADELSFRAGEELLKMSEEDEQGWCQGQLQSGRIGLYPANYVECVGA

SEQ ID NO: 707 - protein, 274 aa, Homo sapiens
  SITE (7): Xaa equals any of the naturally occurring L-amino acids
  SITE (10): Xaa equals any of the naturally occurring L-amino acids
  SITE (259): Xaa equals any of the naturally occurring L-amino acids
KAQKLFXTAXAAALELVDPPGCRNKTMNKKIHSLALLVNLGIYGVAQAQEPTDTPVSHDDTIVVTAAEQNLQAPGVSTITADEIRKNPVARDVSKIIRTMPGVNLTGNSTSGQRGNNRQIDIRGMGPENTLILIDGKPVSSRNSVRQGWRGERDTRGDTSWVPPEMIERIEVLRGPAAARYGNGAAGGVVNIITKKGSGEWHGSWDAYFNAPEHKEEGATKRTNFSLTGPLGDEFSFRLYGNLDKTQADAWDINQGHQXARAGTYATTLPAGRE

SEQ ID NO: 708 - protein, 192 aa, Homo sapiens
  SITE (24): Xaa equals any of the naturally occurring L-amino acids
KPTCNELIKTIIIQHENIFPSPRXLEGPVYSRGGSMEDYCDSPHGETTSVEDSTQDVTAEHHTSDDECEPIEAIAKFDYVGRTARELSFKKGASLLLYQRASDDWWEGRHNGIDGLIPHQYIVVQDTEDGVVERSSPKSEIEVISEPPEEKVTARAGASCPSGGHVARYLSCKHQQAKEASRIWEASENFSE

SEQ ID NO: 709 - protein, 192 aa, Homo sapiens
NPSSMAVSFTSGSCQKQPQDASPPPKECDQGTLSASLNPSNSESSPSRCPSDPDSTSQPRSGASADVARDVKQPTATPRSYRNFRHPEIVGYSVPGRNGQSQDLVKGCARTAQAPEDRSTEPDGSEAEGNQVYFAVYTFKARNPNELSVSANQKLKILEFKDVTGNTEWWLAEVNGKKGYVPSNYIRKTEYT

SEQ ID NO: 710 - protein, 136 aa, Homo sapiens
  SITE (123): Xaa equals any of the naturally occurring L-amino acids
VKPDENSKAFYVPAQYVKEVTRKALMPPVKQVAGLPNNSTKIMQSLHLQRSTENVNKLPELSSFGKPSSSVQGTGLIRDANQNFGPSYNQGQTVNLSLDLTHNNGKFNNDSHSPKVSSQNRTXFIWSFSRSRVLGM

SEQ ID NO: 711 - protein, 406 aa, Homo sapiens
  SITE (111): Xaa equals any of the naturally occurring L-amino acids
  SITE (220): Xaa equals any of the naturally occurring L-amino acids
  SITE (223): Xaa equals any of the naturally occurring L-amino acids
  SITE (224): Xaa equals any of the naturally occurring L-amino acids
  SITE (249): Xaa equals any of the naturally occurring L-amino acids
  SITE (258): Xaa equals any of the naturally occurring L-amino acids
  SITE (264): Xaa equals any of the naturally occurring L-amino acids
  SITE (278): Xaa equals any of the naturally occurring L-amino acids
VPVRNSRVDPRVRAQGASEGHSGPKPYPRLPAWEKGEPERRGRSATGRAKEPLSRATETGEARGQDGSGRRGPQKRGVRVLRPSTAELVPARSPSETLAYQHLPVRIFVAXFDYDPVSMSPNPDAGEEELPFREGQILKVFGDKDADGFYQGEGGGRTGYIPCNMVAEVAVDSPAGRQQLLQRGYLSPDILLEGSGNGPFVYSTAHTTGPPPKPRRSKKXESXXPAQPCPGPPKLVPSADLKAPHSMVXAFDYNPQEXSPNMDXEAELPFRAGDVITXFGGMDDDGFYYGELNGQGAWFHPTSWRALGLRQAAWTGNPGHPRLRVRTGAAPHKGPQGPQVGLVPPALAAPPGLNVGSPRAEARRCGVSSPRGSSSSGGWALGRRSEAVAHPAGRRGPERPPDHCLC

SEQ ID NO: 712 - protein, 283 aa, Homo sapiens
HASADAWADAWADAWVSPVSRQSIRNSQKHSPTSEPTPPGDALPPVSSPHTHRGYQPTPAMAKYVKILYDFTARNANELSVLKDEVLEVLEDGRQWWKLRSRSGQAGYVPCNILGEARPEDAGAPFEQAGQKYWGPASPTHKLPPSFPGNKDELMQHMDEVNDELIRKISNIRAQPQRHFRVERSQPVSQPLTYESGPDEVRAWLEAKAFSPRIVENLGILTGPQLFSLNKEELKKVCGEEGVRVYSQLTMQKAFLEKQQSGSELEELMNKFHSMNQRRGEDS

SEQ ID NO: 713 - protein, 168 aa, Homo sapiens
AGFPLPQPACRLCLLCPRPSWLLLTGPVFPTGWFPAKFVEVLDERSKEYSIAGDDSVTEGVTDLVRGTLCPALKALFEHGLKKPSLLGGACHPWLFIEEAAGREVERDFASVYSRLVLCKTFRLDEDGKVLTPEELLYRAVQSVNVTHDAVHAQMDVKLRSLICVGLK

SEQ ID NO: 714 - protein, 49 aa, Homo sapiens
PSKSNGHFMLKRISIQTSHILGAQEPLVAIVATWWTAKLQASREEGLNR

SEQ ID NO: 715 - protein, 219 aa, Homo sapiens
PRVRDSPSPEEDKEEHISLAHRGVDASKKTSKTVTISQVSDNFVREIKKEMKKDPLTNKAPEKPLHEVPSGNSLLSSETILRTNKRGERRRRRCQVAFSYLPQNDDELELKVGDIIEVVGEVEEGWWEGVLNGKTGMFPSNFIKELSGESDELGISQDEQLSKSSLRETTGSESDGGDSSSTKSEGANGTVATAAIQPKKVKGVGFGDIFKDKPIKLRP

SEQ ID NO: 716 - protein, 268 aa, Homo sapiens
  SITE (122): Xaa equals any of the naturally occurring L-amino acids
  SITE (250): Xaa equals any of the naturally occurring L-amino acids
  SITE (263): Xaa equals any of the naturally occurring L-amino acids
HLGEQGRSLPGWRTMLRRKPSNASEKEPTQKKKLSLQRSSSFKDFAKSKPSSPVVSEKEFNLDDNIPEDDSGVPTPEDAGKSGKKLGKKWRAVISRTMNRKMGKMMVKALSEEMADTLEEGXASPTSPDYSLDSPGPEKMALAFSEQEEHELPVLSRQHATGSELCSPSPGSGSFGEEPPAPQYTGPFCGRARVHTDFTPSPYDHDSLKLQKGDVIQIIEKPPVGTWLGLLNGKVGSFKFIYVGCAARGXRGACPPQPPTEQXQEAQA

SEQ ID NO: 717 - protein, 119 aa, Homo sapiens
  SITE (21): Xaa equals any of the naturally occurring L-amino acids
  SITE (119): Xaa equals any of the naturally occurring L-amino acids
EPGKRTLLAVGNCRVMPQVTXNDVAIDFTHEEWGWLSSAQRDLYKDVMVQNYENLVSVAGLSVTKPYVITLLEDGKEPWMMEKKLSKGMIPDWESRWENKELSTKKDNYDEDSPQTVIX

SEQ ID NO: 718 - protein, 377 aa, Homo sapiens
SEFKMLKRKPSNVSEKEKHQKPKRSSSFGNFDRFRNNSLSKPDDSTEAHEGDPTNGSGEQSKTSNNGGGLGKKMRAISWTMKKKVGKKYIKALSEEKDEEDGENAHPYRNSDPVIGTHTEKVSLKASDSMDSLYSGQSSSSGITSCSDGTSNRDSFRLDDDGPYSGPFCGRARVHTDFTPSPYDTDSLKIKKGDIIDIICKTPMGMWTGMLNNKVGNFKFIYVDVISEEEAAPKKIKANRRSNSKKSKTLQEFLERIHLQEYTSTLLLNGYETLEDLKDIKESHLIELNIENPDDRRRLLSAAENFLEEEIIQEQENEPEPLSLSSDISLNKSQLDDCPRDSGCYISSGNSDNGKEDLESENLSDMVHKIIITEPSD

SEQ ID NO: 719 - protein, 124 aa, Homo sapiens
LQSSGELLHITDMKGTGIMDCAPKALLARALYDNCPDCSDELAFSRGDILTILEQHVPESEGWWKCLLHGRQGLAPANRLQILTEVAADRPCPPFLRGLEEAPASSEETYQVPTLPRLHSRPRL

SEQ ID NO: 720 - protein, 185 aa, Homo sapiens
GKACQSPAAFPVYTLGISRQVPWKAPARHCLSCSRTKVSLLPAPSPAGSELCSPSPGSGSFGEEPPAPQYTGPFCGRARVHTDFTPSPYDHDSLKLQVRSASGLLWSLAGCAQKGSWTEPGYDSVSGGQGPPYPLSLAPFSSPLPQQKGDVIQIIEKPPVGTWLGLLNGKVGSFKFIYVDVLPEE

SEQ ID NO: 721 - protein, 268 aa, Homo sapiens
  SITE (203): Xaa equals any of the naturally occurring L-amino acids
  SITE (254): Xaa equals any of the naturally occurring L-amino acids
  SITE (256): Xaa equals any of the naturally occurring L-amino acids
  SITE (264): Xaa equals any of the naturally occurring L-amino acids
GTGEQYVVVANYQKQESSEISLSVGQVVDIIEKNESGWWFVSTAEEQGWVPATCLEGQDGVQDEFSLQPEEEEKYTVIYPYTARDQDEMNLERGAVVEVIQKNLEGWWKIRYQGKEGWAPASYLKKNSGEPLPPKPGPGSPSHPGALDLDGVSRQQNAVGREKELLSSQRDGRFEGRPVPDGDAKQRSPKMRQRPPPRRDMTXPRGLNLPKPPIPPQVEEEYYTIAEFQTTIPDGISFQAGLKVEEQWALPTTXVXAHRMTLEXPTLT

SEQ ID NO: 722 - protein, 122 aa, Homo sapiens
AVCNEIINIAEKSVHYCSTVSHPLDFHHKVSPSDNKSSLIISQQPQAQQRRVTPDRSQTSQDLFSYQALYSYIPQNDDELELRDGDIVDVMEKCDDGWFVGTSRRTKQFGTFPGNYVKPLYL

SEQ ID NO: 723 - protein, 188 aa, Homo sapiens
  SITE (28): Xaa equals any of the naturally occurring L-amino acids
  SITE (65): Xaa equals any of the naturally occurring L-amino acids
IKLKAEARLDLLKQIGVSVDTWLKSAMXQVMEELENERWARPPAVTSNGTLHSLNADTEREEGEXFEDNMDVFDDSSSSPSGTLRNYPLTCKVVYSYKASQPDELTIEEHEVLEVIEDGDMEDWVKARNKVGQVGYVPEKYLQFPTSNSLLSMLQSLAALDSRSHTSSNSTEAELVSGSLNGDASGKD

SEQ ID NO: 724 - protein, 134 aa, Homo sapiens
APRLQCPPLAGRGPHTLCRPVLRALWPPLSCSVSSYEKTQSYPTDWSDDESNNPFSSTDANGDSNPFDDDATSGTEVRVRALYDYEGQEHDELSFKAGDELTKMEDEDEQGWCKGRLDNGQVGLYPANYVEAIQ

SEQ ID NO: 725 - protein, 136 aa, Homo sapiens
  SITE (33): Xaa equals any of the naturally occurring L-amino acids
TVANCSSKDLQSSQGGQQPRVQSWSPPVRGIPXLPCAKALYNYEGKEPGDLKFSKGDIIILRRQVDENWYHGEVNGIHGFFPTNFVQIIKPLPQPPPQCKAFYDFEVKDKEADKDCLPFAKDDVLTVIRRVDENWG

SEQ ID NO: 726 - protein, 42 aa, Homo sapiens
RNFSAGDTAISKYFGLIPENLMQKIRFSSKLVMMLCKGFLKA

SEQ ID NO: 727 - protein, 237 aa, Homo sapiens
  SITE (67): Xaa equals any of the naturally occurring L-amino acids
  SITE (119): Xaa equals any of the naturally occurring L-amino acids
ARIARDLQGSPEHKTKPGKAPEKSREFSPYIDINGTCDKLTPFWFTLWSQRGKCEDQKVECLYEALXRAGDRLLGSFPTAVPLALHSSISYLGFFVSGSPADVIREFAMTFATEASLLXDCSVKPCTKQLHLTLAHKFYPHHQRTLEQLARAIPLGHSCQWTAALYSRDMRFVHYQTLRALFQYKPQNVDELTLSPGDYIFVDPTQQDEASEGWVIGISQRTGCRGFLPENYTGSSQ

SEQ ID NO: 728 - protein, 768 aa, Homo sapiens
  SITE (610): Xaa equals any of the naturally occurring L-amino acids
QDRRLLRLELQKTCQPTSTMSGSHTPACGPFSALTPSIWPQEILAKYTQKEESAEQPEFYYDEFGFRVYKEEGDEPGSSLLANSPLMEDAPQRLRWQAHLEFTHNHDVGDLTWDKIAVSLPRSEKLRSLVLAGIPHGMRPQLWMRLSGALQKKRNSELSYREIVKNSSNDETIAAKQIEKDLLRTMPSNACFASMGSIGVPRLRRVLRALAWLYPEIGYCQGTGMVAACLLLFLEEEDAFWMMSAIIEDLLPASYFSTTLLGVQTDQRVLRHLIVQYLPRLDKLLQEHDIELSLITLHWFLTAFASVVDIKLLLRIWDLFFYEGSRVLFQLTLGMLHLKEEELIQSENSASIFNTLSDIPSQMEDAELLLGVAMRLAGSLTDVAVETQRRKHLAYLIADQGQLLGAGTLTNLSQVVRRRTQRRKSTITALLFGEDDLEALKAKNIKQTELVADLREAILRVARHFQCTDPKNCSVELTPDYSMESHQRDHENYVACSRSHRRRAKALLDFERHDDDELGFRKNDIITIVSQKDEHCWVGELNGLRGWFPAKFVEVLDERSKEYSIAGDDSVTEGVTDLVRGTLCPALKALFEHGLKKPSLLGGACHPWLXIEEAAGREVERDFASVYSRLVLCKTFRLDEDGKVLTPEELLYRAVQSVNVTHDAVHAQMDVKLRSLICVGLNEQVLHLWLEVLCSSLPTVEKWYQPWSFLRSPGWVQIKCELRVLCCFAFSLSQDWELPAKREAQQPLKEGVRDMLVKHHLFSWDVDG

SEQ ID NO: 729 - protein, 173 aa, Homo sapiens
  SITE (141): Xaa equals any of the naturally occurring L-amino acids
  SITE (171): Xaa equals any of the naturally occurring L-amino acids
AGDVIKVLDASNKDWWWGQIDDEEGWFPASFVRLWVNQEDEVEEGPSDVQNGHLDPNSDCLCLGRALQNRDQMRANVINEIMSTERHYIKHLKDICEGYLKQCRKRRDMFSDEQLKVIFGNIEDIYRFQMGFVRDLEKQYXNDDPHLSEIGPCFLEHQVEFSLDLTRLNLXKG

SEQ ID NO: 730 - protein, 91 aa, Homo sapiens
  SITE (6): Xaa equals any of the naturally occurring L-amino acids
ITKHNXCFVLLSSMRYFDRAALFVEACLKYGAFEVTEDTEKLITAIYADYARSLKNLGFKQGAVLFASKAGAAGKDLLNELEFPKEEPMEE

SEQ ID NO: 731 - protein, 721 aa, Homo sapiens
  SITE (123): Xaa equals any of the naturally occurring L-amino acids
APLIPATSNRESVKSEDGDDEEPPYRGPFCGRARVHTDFTPSPYDTDSLKLKKGDIIDIISKPPMGTWMGLLNNKVGTFKFIYVDVLSEDEEKPKRPTRRRRKGRPPQPKSVEDLLDRINLKXHMPTFLFNGYEDLDTFKLLEEEDLDELNIRDPEHRAVLLTAVELLQEYDSNSDQSGSQEKLLVDSQGLSGCSPRDSGCYESSENLENGKTRKASLLSAKSSTEPSLKSFSRNQLGNYPTLPLMKSGDALKQGQEEGRLGGGLAPDTSKSCDPPGVTGLNKNRRSLPVSICRSCETLEGPQTVDTWPRSHSLDDLQVEPGAEQDVPTEVTEPPPQIVPEVPQKTTASSTKAQPLEQDSAVDNALLLTQSKRFSEPQKLTTKKLEGSIAASGRGLSPPQCLPRNYDAQPPGAKHGLARTPLEGHRKGHEFEGTHHPLGTKEGVDAEQRMQPKIPSQPPPVPAKKSRERLANGLHPVPMGPSGALPSPDAPCLPVKRGSPASPTSPSDCPPALAPRPLSGQAPGSPPSTRPPPWLSELPENTSLQEHGVKLGPALTRKVSCARGVDLETLTENKLHAEGIDLTEEPYSDKHGRCGIPEALVQRYAEDLDQPERDVAANMDQIRVKQLRKQHRMAIPSGGLTEICRKPVSPGCISSVSDWLISIGLPMYAGTLSTAGFSTLSQVPSLSHTCLQEAGITEERHIRKLLSAARLFKLPPGPEAM

SEQ ID NO: 732 - protein, 116 aa, Homo sapiens
  SITE (28): Xaa equals any of the naturally occurring L-amino acids
  SITE (114): Xaa equals any of the naturally occurring L-amino acids
AEEEISIQQDEDLVIFSETSLDGWLQGXNSRGETGLFPASYVEIVRSGISTNHADYSSSPAGFSRSPGELVTTAPVWPAQLGVVGAVASSQTRVALRRMMDDGLGMTGDDGCTXVG

SEQ ID NO: 733 - protein, 133 aa, Homo sapiens
  SITE (7): Xaa equals any of the naturally occurring L-amino acids
  SITE (31): Xaa equals any of the naturally occurring L-amino acids
  SITE (33): Xaa equals any of the naturally occurring L-amino acids
  SITE (74): Xaa equals any of the naturally occurring L-amino acids
RGSLERXGKNLDISVQKEMVLRQWVRGPCIXEXPSGVNFVWTSSSTTLVSLRRPLFASSLHLPRHLTYPDIAFXGQNEGTISVVEGETLYVIEEDKGDGWTRIRRNEDEEGYVPTSYVEVCLDKNAKGAKTYI

SEQ ID NO: 734 - protein, 137 aa, Homo sapiens
  SITE (114): Xaa equals any of the naturally occurring L-amino acids
  SITE (116): Xaa equals any of the naturally occurring L-amino acids
RGLLKLLAGASTKKKSRSPPSVSPTHDPQVAVDALLQGAVGPEVSSLSIHGRAGSCPIESEMQGAMGMEPLHRKAGSLDLNFTSPSRQAPLSMAAIRPEPKLLPRERYRVVVSXPXQSEAEIELKEGDIVFVHKKRD

SEQ ID NO: 735 - protein, 121 aa, Homo sapiens
  SITE (75): Xaa equals any of the naturally occurring L-amino acids
  SITE (98): Xaa equals any of the naturally occurring L-amino acids
AIVEFDYQAQHDDELTISVGEIITNIRKEDGGWWEGQINGRRGLFPDNFVREIKKEMKKDPLTNKAPEKPLHEVXSGNSLLSSETILRTNKRGERRRXRCQVAFSYLPQNDDELELKLATS

SEQ ID NO: 736 - protein, 267 aa, Homo sapiens
  SITE (6): Xaa equals any of the naturally occurring L-amino acids
GTPCKXTGVRNSRVDPRVRGTQRVLLDNVLSEEQCRELHSVASGIMLVGDGYRGKTSPHTPNEKFEGATVLKALKSGYEGRVPLKSARLFYDISEKARRIVESYFMLNSTLYFSYTHMVCRTALSGQQDRRNDLSHPIHADNCLLDPEANECWKEPPAYTFRDYSALLYMNDDFEGGEFIFTEMDAKTVTASIKPKCGRMISFSSGGENPHGVKAVTKGKRCAVALWFTLDPLYRELERIQADEVIAILDQEQQGKHELNINPKDEL

SEQ ID NO: 737 - protein, 491 aa, Homo sapiens
MFPDNFVKEIKRETEFKDDSLPIKRERHGNVASLVQRISTYGLPAGGIQPHPQTKNIKKKTKKRQCKVLFEYIPQNEDELELKVGDIIDINEEVEEGWWSGTLNNKLGLFPSNFVKELEVTDDGETHEAQDDSETVLAGPTSPIPSLGNVSETASGSVTQPKKIRGIGFGDIFKEGSVKLRTRTSSSETEEKKPEKPLILQSLGPKTQSVEITKTDTEGKIKAKEYCRTLFAYEGTNEDELTFKEGEIIHLISKETGEAGWWRGELNGKEGVFPDNFAVQINELDKDFPKPKKPPPPAKAPAPKPELIAAEKKYFSLKPEEKDEKSTLEQKPSKPAAPQVPPKKPTPPTKASNLLRSSGTVYPKRPEKPVPPPPPIAKINGEVSSISSKFETEPVSKLKLDSEQLPLRPKSVDFDSLTVRTSKETDVVNFDDIASSENLLHLTANRPKMPGRRLPGRFNGGHSPTHSPEKILKLPKEEDSANLKPSEKKKK

SEQ ID NO: 738 - protein, 530 aa, Homo sapiens
KGGRRKTKATPGRKKTQEKIQEEERKAEEKQRETASVLVNYRALYPFEARNHDEMSFNSGDIIQVDEKTVGEPGWLYGSFQGNFGWFPCNYVEKMPSSENEKAVSPKKALLPPTVSLSATSTSSEPLSSNQPASVTDYQNVSFSNLTVNTSWQKKSAFTRTVSPGSVSPIHGQGQVVENLKAQALCSWTAKKDNHLNFSKHDIITVLEQQENWWFGEVHGGRGWFPKSYVKIIPGSEVKREEPEALYAAVNKKPTSAAYSVGEEYIALYPYSSVEPGDLTFTEGEEILVTQKDGEWWTGSIGDRSGIFPSNYVKPKDQESFGSASKSGASNKKPEIAQVTSAYVASGSEQLSLAPGQLILILKKNTSGWWQGELQARGKKRQKGWFPASHVKLLGPSSERATPAFHPVCQVIAMYDYAANNEDELSFSKGQLINVMNKDDPDWWQGEINGVTGLFPSNYVKMTTDSDPSQQWCADLQALDTMQPIERKRQGYIHELIQTEERTWLTFSSSSRFFRNAWQSQAFSLKGRWP

SEQ ID NO: 739 - protein, 168 aa, Homo sapiens
  SITE (14): Xaa equals any of the naturally occurring L-amino acids
  SITE (51): Xaa equals any of the naturally occurring L-amino acids
  SITE (118): Xaa equals any of the naturally occurring L-amino acids
  SITE (121): Xaa equals any of the naturally occurring L-amino acids
  SITE (127): Xaa equals any of the naturally occurring L-amino acids
  SITE (161): Xaa equals any of the naturally occurring L-amino acids
LTRQCGWPRGRRSXRIFIQKKDLEEDESVTAAHLKSRGRSPRKIDQFCNSXNMVHGSVTFRDVAIDFSQEEWECLQPDQRTLYRDVMLENYSHLISLGSSISKPDVITLLEQEKEPWXVVXKETSRXYPDLELKYGPEKVSPENDTSEVNLPKQVIKQISXKKKKKKL

SEQ ID NO: 740 - protein, 229 aa, Homo sapiens
  SITE (60): Xaa equals any of the naturally occurring L-amino acids
  SITE (65): Xaa equals any of the naturally occurring L-amino acids
  SITE (124): Xaa equals any of the naturally occurring L-amino acids
KCGRIGWYTQRTHFQSLLEAHDIVASKCYDSPPSSPEMNNSSINNQLLPVDAIRILGIHXRAGEXLGVTFRVENNDLVIARILHGGMIDRQGLLHVGDIIKEVNGHEVGNNPKELQELLKNISXSVTLKILPSYRDTITPQQVFVKCHFDYNPYNDNLIPCKEAGLKFSKGEILQIVNREDPNWWQASHVKEGGSAGLIPSQFLEEKRKAFVRRDWDNSGPFCGTISSK

SEQ ID NO: 741 - protein, 52 aa, Homo sapiens
ASACRFWYPSEFLEPIHHRYQGTTAQIKTLMHYYRVPTIITKMGRNRNARYW

SEQ ID NO: 742 - protein, 89 aa, Homo sapiens
FRIWGKAILNVKLGTGGTIPVSYVKIPGKLDLSFPQEGRLKYNQGICRSCSLINSPKDWCKKKAFPSTTEEENSGGQKSAAATKGMLPV

SEQ ID NO: 743 - protein, 113 aa, Homo sapiens
RASSSFQRLYLTHFRYTQTNGITCNILMEQWERLFEMGFASFCNILISLVPYSYLMLALTYPQEADTEVSLRRGDIWVMFEHAGAMGSLVSVGGEGTRWHLLAEANRNCTSPL

SEQ ID NO: 744 - protein, 287 aa, Homo sapiens
  SITE (146): Xaa equals any of the naturally occurring L-amino acids
  SITE (180): Xaa equals any of the naturally occurring L-amino acids
  SITE (247): Xaa equals any of the naturally occurring L-amino acids
  SITE (252): Xaa equals any of the naturally occurring L-amino acids
HDFPAEQVDDLNLTSGEIVYLLEKIDTDWYRGNCRNQIGIFPANYVKVIIDIPEGGNGKRECVSSHCVKGSRCVARFEYIGEQKDELSFSEGEIIILKEYVNEEWARGEVRGRTGIFPLNFVEPVEDYPTSGANVLSTKVPLKTKXEDSGSNSQVNSLPAEWCEALHSFTAETSDDLSFXRGDRIQILERLDSDWCRGRLQDREGIFPAVFVRPCPAEAKSMLAIVPKGRKAKALYDFRGENEDELXFKAGXIITELESVDDDWMSGELMGKSGIFPKNYIQFLQIS

SEQ ID NO: 745 - protein, 108 aa, Homo sapiens
  SITE (17): Xaa equals any of the naturally occurring L-amino acids
  SITE (24): Xaa equals any of the naturally occurring L-amino acids
  SITE (64): Xaa equals any of the naturally occurring L-amino acids
  SITE (65): Xaa equals any of the naturally occurring L-amino acids
  SITE (66): Xaa equals any of the naturally occurring L-amino acids
  SITE (74): Xaa equals any of the naturally occurring L-amino acids
  SITE (75): Xaa equals any of the naturally occurring L-amino acids
NLPFRHSGCATVGKGDXVRGLLRXLRPAGERGMCCKAIKLGNGQGFPSHDVVKRRPVNCNTTPXXXNWVPGPPXXFFFFFFFFGSSLMHHHTSNSMCDVHHTVLLQEE

SEQ ID NO: 746 - protein, 51 aa, Homo sapiens
  SITE (14): Xaa equals any of the naturally occurring L-amino acids
  SITE (30): Xaa equals any of the naturally occurring L-amino acids
  SITE (47): Xaa equals any of the naturally occurring L-amino acids
MIKKTIIFLAYLNXLSCGFPCLVALYSYSXIIADTLLVRVGGKSSLXNSLF

SEQ ID NO: 747 - protein, 89 aa, Homo sapiens
QKQNICNFPIILVIIGFCPHTSSTGFSLYFALGFIPSYKITSFFKMVTSFSRVKRVSEPFPYSWMFSLFPYFSSVYITNNTPNDRQEKK

SEQ ID NO: 748 - protein, 101 aa, Homo sapiens
  SITE (2): Xaa equals any of the naturally occurring L-amino acids
PXMPARYPCGRKYPLMSQGIADGSSIPFYLPLDLHFYQIVHCILKFWVLSFIFPFPFKSFNGKKASEAWCKLKFLNGVEMQIIPSKIIQILLKFLVLRCCR

SEQ ID NO: 749 - protein, 94 aa, Homo sapiens
  SITE (29): Xaa equals any of the naturally occurring L-amino acids
  SITE (48): Xaa equals any of the naturally occurring L-amino acids
  SITE (49): Xaa equals any of the naturally occurring L-amino acids
  SITE (60): Xaa equals any of the naturally occurring L-amino acids
HVVFRYQAGREDELTITEGEWLEVIEEGXADEWVKARNQHGEVGFVPXXYLNFPDLSLPXSSQDSDNPCGQSTSIPGTGPVQLHRTECRGAELP

SEQ ID NO: 750 - protein, 451 aa, Homo sapiens
  SITE (296): Xaa equals any of the naturally occurring L-amino acids
  SITE (325): Xaa equals any of the naturally occurring L-amino acids
HRWPETPPFSYTCGDPSTYRVTFPVCPQKLSLAPPSAKASPHNPGSCGEPQAKFLEAFFEEPPRRQSPVSNLGSEGECPSSGAGSQAQELAEAWEGCRKDLLFQKSPQNHRPPSVSDQTGEKENCYQHMGTSKSPAPGFIHLRTECGPRKEPCQEKAALERVLRQKQDAQGFTPPQLGASQQYASDFHNVLKEEQEALCLDLWGTERREERREPEPHSRQGQALGVKRGCQLHEPSSALCPAPSAKVIKMPRGGPQQLGTGANTPARVFVALSDYNPLVMSANLKAAEEELVFQKXQLLRVWGSQDTHDFYLSECNRQVGNIPGXLVAEMEVGTEQTDRRWRSPAQGHLPSVAHLEDFQGLTIPQGSSLVLQGNSKRLPLWTPKIMIAALDYDPGDGQMGGQGKGRLALRAGDVVMVYGPMDDQGFYYGELGGHRGLVPAHLLDHMSLHGH

SEQ ID NO: 751 - protein, 69 aa, Homo sapiens
CLRAIFIVMLHARIENGIGPFYVAIFDFLNHLTTCTHLQCVIHGAVPSLHNRTRSQAPTHRDSPCPRYL

SEQ ID NO: 752 - protein, 112 aa, Homo sapiens
GPYSGPFCGRARVHTDFTPSPYDTDSLKIKKGDIIDIICKTPMGMWTGMLNNKVGNFKFIYVDVISEEEAAPKKIKANRRSNSKKSKTLQEFLERIICRNTPQHFCSMVMRL

SEQ ID NO: 753 - protein, 234 aa, Homo sapiens
  SITE (46): Xaa equals any of the naturally occurring L-amino acids
  SITE (47): Xaa equals any of the naturally occurring L-amino acids
  SITE (173): Xaa equals any of the naturally occurring L-amino acids
  SITE (200): Xaa equals any of the naturally occurring L-amino acids
LKTMKRFFGRRPILHSLSPPACQHHPQMRHQGSRRDKAREPRGPWXXYNLCLELEDGDNPYPSKEDTPTSSLDSLSSPSPVTTAVPGPPGPDKNHLLADGGSFGDWASTIPGQTRSSMVQWLNPQSPTTTSSNSAVTPLSPGSSPFPFSPPATVADKPPESIRSRKARAVYPXEAEHSSELSFEIGAIFEDVQTSREPGXARRDSERQEGADSTELRQAAVAPGLRAPADPGTQ

SEQ ID NO: 754 - protein, 151 aa, Homo sapiens
  SITE (83): Xaa equals any of the naturally occurring L-amino acids
  SITE (115): Xaa equals any of the naturally occurring L-amino acids
  SITE (130): Xaa equals any of the naturally occurring L-amino acids
  SITE (150): Xaa equals any of the naturally occurring L-amino acids
QSPPKRAKVGAKRPTHWRHLRTTGAGQVQRSRLTRPTQRRTAGWAPRSWFQVNTRSWRTTRREAPMRCAEERGRGGAGAGGRXGPLVRPRAQPRTAPHVAAADPRPLQYVRDPTXGKEGWVPASSLSVRXGPSGSAQCLSSSDSSPGSAXL

SEQ ID NO: 755 - protein, 725 aa, Homo sapiens
  SITE (164): Xaa equals any of the naturally occurring L-amino acids
GQPRRGSALPAWRCGAAALATFPAPALPGLMYRALYAFRSAEPNALAFAAGETFLVLERSSAHWWLAARARSGETGYVPPAYLRRLQGLEQDVLQAIDRAIEAVHNTAMRDGGKYSLEQRGVLQKLIHHRKETLSRRGPSASSVAVMTSSTSDHHLDAAAARQXNGVCRAGFERQHSLPSSEHLGADGGLYQIPLPSSQIPPQPRRAAPTTPPPPVKRRDREALMASGSGGHNTMPSGGNSVSSGSSVSSTSLDTLYTSSSPSEPGSSCSPTPPPVPRRGTHTTVSQVQPPPSKASAPEPPAEEEVATGTTSASDDLEALGTLSLGTTEEKAAAEAAVPRTIGAELMELVRRNTGLSHELCRVAIGIIVGHIQASVPASSPVMEQVLLSLVEGKDLSMALPSGQVCHDQQRLEVIFADLARRKDDAQQRSWALYEDEGVIRCYLEELLHILTDADPEVCKKMCKRNEFESVLALVAYYQMEHRASLRLLLLKCFGAMCSLDAAIISTLVSSVLPVELARDMQTDTQEHLGTPFAQFLLNIVEDGLPLDTTEQLPDLCVNLLLALNLHLPAADQNVIMAALSKHANVKIFSEKLLLLLNRGDDPVRIFKHEPQPPHSVLKFLQDVFGSPATAAIFYHTDMMALIDITVRHIADLSPGDKLRMEYLSLMHAIVRTTPYLQHRHRLPDLQAILRRILNEEETSPQCQMDRMIVREMCKEFLVLGEAPS

SEQ ID NO: 756 - protein, 121 aa, Homo sapiens
  SITE (4): Xaa equals any of the naturally occurring L-amino acids
GGDXWQVLDHSKRWWLVKNEAGRSGYIPSNILEPLQPGTPGTQGQSPSRVPMLRLSSRPEEVTDWLQAENFSTATVRTLGSLTGSQLLRIRPGELQMLCPQEAPRILSRLEAVRRMLGISP

SEQ ID NO: 757 - protein, 179 aa, Homo sapiens
STLRIPGPCFPSEKTHNHDPQPGDPNSRPSSPKPAQPALKMQVLYEFEARNPRELTVVQGEKLEVLDHSKRWWLVKNEAGRSGYIPSNILEPLQPGTPGTQGQSPSRVPMLRLSSRPEEVTDWLQAENFSTATVRTLGSLTGSQLLRIRPGELQMLCPQEAPRILSRLEAVRRMLGISP

SEQ ID NO: 758 - protein, 333 aa, Homo sapiens
LPLPEDPGTLSAERRCLTQPVEDQGVSTQLLAPSGSVCFSYTGTPWKLFLRKEVFYPRENFSHPYYLRLLCEQILRDTFSESCIRISQNERRKMKDLLGGLEVDLDSLTTTEDSVKKRIVVAARDNWANYFSRFFPVSGESGSDVQLLAVSHRGLRLLKVTQGPGLRPDQLKILCSYSFAEVLGVECRGGSTLELSLKSEQLVLHTARARAIEALVELFLNELKKDSGYVIALRSYITDNCSLLSFHRGDLIKLLPVATLEPGWQFGSAGGRSGLFPADIVQPAAAPDFSFSKEQRSGWHKGQLSNGEPGLARWDRASEVRKMGEGQAEARPA

SEQ ID NO: 759 - protein, 230 aa, Homo sapiens
PEEPLKELMEPKSPALGRGPVVCDGSLSRASACTIKDALGQQGSGSMGEGFRPPLSLPSPISRAGLGGLKRVERVGLAHTKEYWLLMALGWPPSSPSPPSGDCCSCTIGGTPASPPDPAPWASEPGAMASSNSTTGTSSTTGTSSSGTPPPPAFSFSCLSLAAAAAAAATSGALDASSAPGCGGSVHEGGSGGWGGSWEVVGSHFLGARAPPPLQTCSAHPAVAGRMGHS

SEQ ID NO: 760 - protein, 193 aa, Homo sapiens
  SITE (86): Xaa equals any of the naturally occurring L-amino acids
  SITE (161): Xaa equals any of the naturally occurring L-amino acids
  SITE (162): Xaa equals any of the naturally occurring L-amino acids
  SITE (175): Xaa equals any of the naturally occurring L-amino acids
EVPGLPAGQRGKHDCCGPKCPALGSRGAAGEPEAGSDYVKFSKEKYILDSSPEKLHKELEEELKLSSTDLRSHAWYHGRIPREVSXTLVQRNGDFLIRDSLTSLGDYVLTCRWRNQALHFKINKVVVKAGESYTHIQYLFEQESFDHVPALVRYHVGQPQXXSEQSGAIIYCPVXRTFPCANFEASYGLGTGE

SEQ ID NO: 761 - protein, 524 aa, Homo sapiens
HESTLPRSPRDAPCSASSELSGPSTPLHTSSPVQGKESTRRQDTRSPTSAPTQRLSPGEALPPVSQAGTGKAPELPSGSGPEPLAPSPVSPTFPPSSPSDWPQERSPGGHSDGASPRSPVPTTLPGLRHAPWQGPRGPPDSPDGSPLTPVPSQMPWLVASPEPPQSSPTPAFPLAASYDTNGLSQPPLPEKRHLPGPGQQPGPWGPEQASSPARGISHHVTFAPLLSDNVPQTPEPPTQESQSNVKFVQDTSKFWYKPHLSRDQAIALLKDKDPGAFLIRDSHSFQGAYGLALKVATPPPSAQPWKGDPVEQLVRHFLIETGPKGVKIKGCPSEPYFGSLSALVSQHSISPISLPCCLRIPSKDPLEETPEAPVPTNMSTAADLLRQGAACSVLYLTSVETESLTGPQAVARASSAALSCSPRPTPAVVHFKVSAQGITLTDNQRKLFFRRHYPVNSITFSSTDPQDRRWTNPDGTTSKIFGFVAKKPGSPWENVCHLFAELDPDQPAGAIVTFITKVLLGQRK

SEQ ID NO: 762 - protein, 235 aa, Homo sapiens
  SITE (21): Xaa equals any of the naturally occurring L-amino acids
KQICKSWKEDSEWQASLRKSXAADEKRRSLAKQAREDYKRLSLGAQKGRGGERLQSPLRVPQKPERPPLPPKPQFLNSGAYPQKPLRNQGVVRTLSSSAQEDIIRWFKEEQLPLRAGYQKTSDTIAPWFHGILTLKKANELLLSTGMPGSFLIRVSERIKGYALSYLSEDGCKHFLIDASADAYSFLGVDQLQHATLADLVEYHKEEPITSLGKELLLYPCGQQDQLPDYLELFE

SEQ ID NO: 763 - protein, 372 aa, Homo sapiens
  SITE (1): Xaa equals any of the naturally occurring L-amino acids
XEQKLELHRGGGRSRTSGSPVCRNSAREKRASEGDRSLGSVSPSSSGFSSPHSGSTISIPFPNVLPDFSKASEAASPLPDSPGDKLVIVKFVQDTSKFWYKADISREQAIAMLKDKEPGSFIVRDSHSFRGAYGLAMKVATPPPSVLQLNKKAGDLANELVRHFLIECTPKGVRLKGCSNEPYFGSLTALVCQHSITPLALPCKLLIPERDPLEEIAESSPQTAANSAAELLKQGAACNVWYLNSVEMESLTGHQAIQKALSITLVQEPPPVSTVVHFKVSAQGITLTDNQRKLFFRRHYPVNSVIFCALDPQDRKWIKDGPSSKVFGFVARKQGSATDNVCHLFAEHDPEQPASAIVNFVSKVMIGSPKKV

SEQ ID NO: 764 - protein, 370 aa, Homo sapiens
  SITE (340): Xaa equals any of the naturally occurring L-amino acids
  SITE (351): Xaa equals any of the naturally occurring L-amino acids
RNTWSHFFSPGRYLSTISNAIIANHHMQSISFASGGDPDTTDYVAYVAKDPVNQRACHILECHNGMAQDVISTIGQAFELRFKQYLKNPSLNTSCESEEVHIDSHAEEREDHEYYNEIPGKQPPVGGVSDMRIKVQATEQMAYCPIQCEKLCYLPGNSKCSSVYENCLEQSRAIGNVHPRGVQSQRDTSLLKHTCRVDLFDDPCYINTQALQSTPGSAGNQRSAQPLGSPWHCGKAPETVQPGATAQPGSSHSLPHIKQQLWSEECYHGKLSRKAAESLLVKDGDFLVRESATSPGQYVLSGLQGGQAKHLLLVDPEGKVRTKDHVFDNVGHLIRYHMDXSLPIISSGSEXSLKQPVRKDNNPALLHSNK

SEQ ID NO: 765 - protein, 461 aa, Homo sapiens
MGKLQSKHAAAARKRRESPEGFPRVRPRTAGDSFVASAYASGRKGAEEAERRARDKQELPNGDPKEGPFREDQCPLQVALPAEKAEGREHPGQLLSADDGERAANREGPRGPGGQRLNIDALQCDVSVEEDDRQEWTFTLYDFDNCGKVTREDMSSLMHTIYEVVDASVNHSSGSSKTLRVKLTVSPEPSSKRKEGPPAGQDREPTRCRMEGELAEEPRVADRRLSAHVRRPSTDPQPCSERGPYCVDENTERRNHYLDLAGIENYTSRFGPGSPPVQAKQEPQGRASHLQARSRSQEPDTHAVHHRRSQVLVEHVVPASEPAARALDTQPRPKGPEKQFLKSPKGSGKPPGVPASSKSGKAFSYYLPAVLPPQAPQDGHHLPQPPPPPYGHKRYRQKGREGHSPLKAPHAQPATVEHEVVRDLPPTPAGEGYAVPVIQRHEHHHHHEHHHHHHHHHFHPS

SEQ ID NO: 766 - protein, 181 aa, Homo sapiens
  SITE (5): Xaa equals any of the naturally occurring L-amino acids
  SITE (136): Xaa equals any of the naturally occurring L-amino acids
  SITE (174): Xaa equals any of the naturally occurring L-amino acids
WIPRXAGIRHEEKPSTLTRFCESMWRFSFYLYVFTYGVRFLKKTPWLWNTRHCWYNYPYQPLTTDLHYYYILELSFYWSLMFSQFTDIKRKDFGIMFLHHLVSIFLITFSYVNNMARVGTLVLCLHDSADALLEAXKMANYAKFQKMCDLLFVMFAVVFITTRLGIFPLWPLLXCPDGSAV

SEQ ID NO: 767 - protein, 258 aa, Homo sapiens
VLWPVLRSDAFSGLTALPRSILLFGPRGTGKTLLGRCIASQLGATFFKIAGSGLVAKWLGEAEKIIHASFLVARCRQPSVIFVSDIDMLLSSQVNEEHSPVSRMRTEFLMQLDTVLTSAEDQIVVICATSKPEEIDESLRRYFMKRLLIPLPDSTARHQIIVQLLSQHNYCLNDKEFALLVQRTEGFSGLDVAHLCQEAVVGPLHAMPATDLSAIMPSQLRPVTYQDFENAFCKIQPSISQKELDMYVEWNKMFGCSQ

SEQ ID NO: 768 - protein, 138 aa, Homo sapiens
  SITE (101): Xaa equals any of the naturally occurring L-amino acids
  SITE (135): Xaa equals any of the naturally occurring L-amino acids
VGESGVGKTAIAEGLAWRIVQGDVPEVMADCTIYSLDIGSLLAGTKYRGDFEKRFKALLKQLEQDTNSILFIDEIHTIIGAGAASGGQVDAANLIKPLLDXLNPRFPFVVIFQGVIIIIDQVTDIVTISGNTPVXPSG

SEQ ID NO: 769 - protein, 193 aa, Homo sapiens
ADIIREQIRLKGPEHRQTVLESIRTAGTLFGEGFRAFVTDWDKVTATVAGLTLLAVGVYSAKNATLVAGRFIEARLGKPSLVRETSRITVLEALRHPIQVSRRLLSRPQDALEGVVLSPSLEARVRDIAIATRNTKKNRSLYRNILMYGPPGTGKTLFAKKLALHSGMDYAIMTGGDVAPMGRGRRDRHAQAL

SEQ ID NO: 770 - protein, 383 aa, Homo sapiens
SHGTVPRGAMCAVNRVLMKLQEQQKKNPEMEDLPSKGVQEERLGTEPTSETQDELQRLLGLLRDQDPLSEEQMQGLCIELNDFIVALSSVQPSAKREGFVTVPNVTWADIGALEDIREELTMAILAPVRNPDQFKALGLVTPAGVLLAGPPGCGKTLLAKAVANESGLNFISVKGPELLNMYVGESERAVRQVFQRAKNSAPCVIFFDEVDALCPRRSDRETGASVRVVNQLLTEMDGLEARQQVFIMAATNRPDIIDPAILRPGRLDKTLFVGLPPPADRLAILKTITKNGTKPPLDADVNLEAIAGDLRCDCYTGADLSALVREASICALRQEMARQKSGNEKGELKVSHKHFEEAFKKVRSSISKKDQIMYERLQESLSR

SEQ ID NO: 771 - protein, 215 aa, Homo sapiens
  SITE (153): Xaa equals any of the naturally occurring L-amino acids
GRLRALALAVSAPGLTFKMVHAEAFSRPLSRNEVVGLIFRLTIFGAVTYFTIKWMVDAIDPTRKQKVEAQKQAEKLMKQIGVKNVKLSEYEMSIAAHLVDPLNMHVTWSDIAGLDDVITDLKDTVILPIKKKHLFENSRLLQPPKGVLLYGPXGCGKTLIAKATAKEAGCRFINLQPSTLTDKWYGESQKLAAAVFSLAIKLQPSIIFIDEIDAD

SEQ ID NO: 772 - protein, 120 aa, Homo sapiens
  SITE (70): Xaa equals any of the naturally occurring L-amino acids
  SITE (71): Xaa equals any of the naturally occurring L-amino acids
  SITE (72): Xaa equals any of the naturally occurring L-amino acids
  SITE (115): Xaa equals any of the naturally occurring L-amino acids
  SITE (116): Xaa equals any of the naturally occurring L-amino acids
GPILWNPHSMLFPISLGINIVRALYFGEKVCHRGLRLVHNLKSGMLKVFSPCPQKMTWAGHGGSQDGFTXXXLASTLANLCQVSSREAISHFSQELQVHILGNWGLAQVSLEDGXXGCAE

SEQ ID NO: 773 - protein, 168 aa, Homo sapiens
  SITE (65): Xaa equals any of the naturally occurring L-amino acids
  SITE (95): Xaa equals any of the naturally occurring L-amino acids
  SITE (97): Xaa equals any of the naturally occurring L-amino acids
  SITE (111): Xaa equals any of the naturally occurring L-amino acids
NGFSQRLNGFILTEDQHFQAIAEVFQGITITLRNTLLWNACNTGHHGLNIRHINGFLAFAYRHQXCASARFVDNINGFIRQMTIVNVFHRQLLPXHXPFCGITHVVVRFIXRFQAIDDLNSFFDRRFSNINFLEATRQSTVFLENVAELLIGCRTNYTNFTAGEQRFD

SEQ ID NO: 774 - protein, 574 aa, Homo sapiens
ARASDVLLDVTQSPGDGSGLMLEEVTGLKCNFESAREGNEQLTEEERLLKFSIGAKCNTDTFYFISSTTRVNFTEIDKNSKEHDNQFKVTYDMIGGLSSQLKAIREIIELPLKQPELFKSYGIPAPRGVLLYGPPGTGKTMIARAVANEVGAYVSVINGPEIISKFYGETEAKLRQIFAEATLRHPSIIFIDELDALCPKREGAQNEVEKRVVASLLTLMDGIGSEVSEGQVLVLGATNRPHALDAALRRPGRFDKEIEIGVPNAQDRLDILQKLLRRVPHLLTEAELLQLANSAHGYVGADLKVLCNEAGLCALRRILKKQPNLPDVKVAGLVKITLKDFLQAMNDIRPSAMREIAIDVPNVSWSDIGGLESIKLKLEQAVEWPLKHPESFIRMGIQPPKGVLLYGPPGCSKTMIAKALANESGLNFLAIKGPELMNKYVGESERAVRETFRKARAVAPSIIFFDELDALAVERGSSLGAGNVADRVLAQLLTEMDGIEQLKDVTILAATNRPDRIDKALMRPGRIDRIIYVPLPDAATRREIFKLQFHSMPVSNEVDLDELILQTDAYSGAE

SEQ ID NO: 775 - protein, 167 aa, Homo sapiens
AVDLPVDSGWGGLVPTPRPFRLQPAHLLLVLLDSILHAGVHHGLGQDPVLGGIRRGLPGHGQLSDLPARHALRQPSDLRALPPVVKLGQLQALLSFCGRLKNILVKIHSHQALPFLLPWQVEVDHLIDAVIDGPVELLWLVAGQDQHELVAVLARAVQEGVQCGPEV

SEQ ID NO: 776 - protein, 489 aa, Homo sapiens
LQEFGTRRPPCPRTALSAHRRASRAGPSTSAPRGRTEAASSAAGCGADPGDEMTTSTLQKAIDLVTKATEEDKAKNYEEALRLYQHAVEYFLHAIKYEAHSDKAKESIRAKCVQYLDRAEKLKDYLRSKEKHGKKPVKENQSEGKGSDSDSEGDNPEKKKLQEQLMGAVVMEKPNIRWNDVAGLEGAKEALKEAVILPIKFPHLFTGKRTPWRGILLFGPPGTGKSYLAKAVATEANNSTFFSVSSSDLMSKWLGESEKLVKNLFELARQHKPSIIFIDEVDSLCGSRNENESEAARRIKTEFLVQMQGVGNNNDGTLVLGATNIPWVLDSAIRRRFEKRIYIPLPEEAARAQMFRLHLGSTPHNLTDANIHELARKTEGYSGADISIIVRDSLMQPVRKVQSATHFKKVCGPSRTNPSMMIDDLLTPCSPGDPGAMEMTWMDVPGDKLLEPVVCMSDMLRSLATTRPTVNADDLLKVKKFSEDFGQES

SEQ ID NO: 777 - protein, 198 aa, Homo sapiens
MDAILNYRSEDTEDYYTLLGCDELSSVEQILAEFKVRALECHPDKHPENPKAVETFQKLQKAKEILTNEESRARYDHWRRSQMSMPFQQWEALNDSVKTSMHWVVRGKKDLMLEESDKTHTTKMENEECNEQRERKKEELASTAEKTEQKEPKPLEKSVSPQNSDSSGFADVNGWHLRFRWSKDAPSELLRKFRNYEI

SEQ ID NO: 778 - protein, 157 aa, Homo sapiens
  SITE (9): Xaa equals any of the naturally occurring L-amino acids
  SITE (56): Xaa equals any of the naturally occurring L-amino acids
  SITE (57): Xaa equals any of the naturally occurring L-amino acids
  SITE (81): Xaa equals any of the naturally occurring L-amino acids
  SITE (116): Xaa equals any of the naturally occurring L-amino acids
  SITE (139): Xaa equals any of the naturally occurring L-amino acids
  SITE (156): Xaa equals any of the naturally occurring L-amino acids
RPFTVYMAXLVGTDQDFYSLLGVSKTASSREIRQAFKKLALKLHPDKNPNNPNAHXXFLKINRAYEVLKDEDLRKKYDKYXEKGLEDNQGGQYESWNYYRYDFGIYDDDPEIITLXRREFDAAVNSGELWFVNFYSPGXSHCHDLAPTVCIFHILXT

SEQ ID NO: 779 - protein, 315 aa, Homo sapiens
  SITE (219): Xaa equals any of the naturally occurring L-amino acids
FNVPMNYSHDNWSAILAHIGKPEELDTSARNAGALTRRREIRDAATLLRLGLAYGPGGMSLREVTAWAQLHDVATLSDVALLKRLRNAADWFGILAAQTLAVRAAVTGCTSGKRLRLVDGTAISAPGGGSAEWRLHMGYDPHTCQFTDFELTDSRDAERLDRFAQTADEIRIADRGFGSRPECIRSLAFGEADYIVRVHWRGLRWLTAEGMRFDMMGFXRGLDCGKNGETTVMIGNSGNKKAGAPFPARLIAVSLPPEKALISKTRLLSENRRKGRVVQAETLEAAGHVLLLTSLPEDEYSAEQVADCYRLRWQI

SEQ ID NO: 780 - protein, 159 aa, Homo sapiens
  SITE (107): Xaa equals any of the naturally occurring L-amino acids
  SITE (143): Xaa equals any of the naturally occurring L-amino acids
  SITE (144): Xaa equals any of the naturally occurring L-amino acids
  SITE (152): Xaa equals any of the naturally occurring L-amino acids
  SITE (155): Xaa equals any of the naturally occurring L-amino acids
ATALSEEELDNEDYYSLLNVRREASSEELKAAYRRLCMLYHPDKHRDPELKSQAERLFNLVHQAYEVLSDPQTRAIYDIYGKRGLEMEGWEVVERRRTPAEIREEFXRLQREREERRLQQRTNPKGTISVGVDATDLFDRYDXXLKMCPAVXFPXIEIN

SEQ ID NO: 781 - protein, 129 aa, Homo sapiens
  SITE (89): Xaa equals any of the naturally occurring L-amino acids
  SITE (97): Xaa equals any of the naturally occurring L-amino acids
  SITE (105): Xaa equals any of the naturally occurring L-amino acids
  SITE (112): Xaa equals any of the naturally occurring L-amino acids
VMNNVALSMIRCGNIATIRNLTVSSTMATVRVLLERPRAHRFSTRVGYQVSVPNSPYSESYYNSLAVVLQRRDWENPGVTQLNRLAAHXPFASWRNXRKGPHRSXFQQLRKXEWRMGDPIFKADNGVNL

SEQ ID NO: 782 - protein, 282 aa, Homo sapiens
  SITE (110): Xaa equals any of the naturally occurring L-amino acids
  SITE (118): Xaa equals any of the naturally occurring L-amino acids
  SITE (260): Xaa equals any of the naturally occurring L-amino acids
  SITE (281): Xaa equals any of the naturally occurring L-amino acids
DERKVKKAYRQKALSCHPDKNPDNPRAAELFHQLSQALEVLTDAAARAAYDKVRKAKKQAAERTQKLDEKRKKVKLDLEARERQAQAQESEEEEESRSTRTLEQEIERLXEEGSRQLXEQQRLIREQIRQERDQRLRGKAENTEGQGTPKLKLKWKCKKEDESKGGYSKDVLLRLLQKYGEVLNLVLSSKKPGTAVVEFATVKAAELAVQNEVGLVDNPLKISWLEGQPQDAVGRSHSGLSKGSVLSERDYESLVMMRMXQAAERQQLIARMQQEDQEGPXT

SEQ ID NO: 783 - protein, 132 aa, Homo sapiens
SQALLAQIHCLYSDELLFMGFTDTELYPDSANFLVFSLLSPNDSLSYYMSLIHGHPELHKFTSHPARNPPSSLSHSKLPTAGMASTSGSFASGHSGLDSLHWSESPLPSAVSEKSPQLWGFQDACLGDIPEL

SEQ ID NO: 784 - protein, 95 aa, Homo sapiens
FAVIAADRSPENVMDYFTLFGLPARYQLDTQALSLRFQDLQRQYHPDKFASGSQAEQLAAVQQSATINQAWQTLRHPLMRAEYLLSLHGFDLASE

SEQ ID NO: 785 - protein, 312 aa, Homo sapiens
PTRPRIRQAGTMAVTKELLQMDLYALLGIEEKAADKEVKKAYRQKALSCHPDKNPDNPRAAELFHQLSQALEVLTDAAARAAYDKVRKAKKQAAERTQKLDEKRKKVKLDLEARERQAQAQESEEEEESRSTRTLEQEIERLREEGSRQLEEQQRLIREQIRQERDQRLRGAGLSPRLSPLQGKAENTEGQGTPKLKLKWKCKKEDESKGGYSKDVLLRLLQKELAVQNEVGLVDNPLKISWLEGQPQDAVGRSHSGLSKVRSQASPGWALRSRSSSYLGSSQALSFQIQILGPRVSLAGPPTQARGAVISR

SEQ ID NO: 786 - protein, 138 aa, Homo sapiens
  SITE (4): Xaa equals any of the naturally occurring L-amino acids
  SITE (124): Xaa equals any of the naturally occurring L-amino acids
VRLXHGPRRRPQLLTAAPPLQARGAFRSFPHSWGEDFLASLMFKIQLEPLKLRAWTLNGFVKFRNKETSAGPVAVMGKDYYKILGIPSGANEDEIKKAYRKMALKYHPDKNKEPNAEEKFKEIXEAYDVLSDPKETGA

SEQ ID NO: 787 - protein, 183 aa, Homo sapiens
RGAGGRAGGRADGQPNMADQRQRSLSTSGESLYHVLGLDKNATSDDIKKSYRKLALKYHPDKNPDNPEAADKFKEINNAHAILTDATKRNIYDKYGSLGLYVAEQFGEENVNTYFVLSSWWAKALFVFCGLLTCCYCCCCLCCCFNCCCGKCKPKAPEGEETEFYVSPEDLEAQLQSDERGGH

SEQ ID NO: 788 - protein, 266 aa, Homo sapiens
  SITE (3): Xaa equals any of the naturally occurring L-amino acids
  SITE (9): Xaa equals any of the naturally occurring L-amino acids
  SITE (16): Xaa equals any of the naturally occurring L-amino acids
ASXAQTPLXRHHPGLXAVLPLLVGIAHAAVAVDVDVTRREAAAKEHVEEVFRGDVGLKATVEIPMPMAVPGRLALVIAELVILLPLLRVAEYRICCANGFEGFSGTRCVVLVWVEFEGQSAVGLLQVLIRGPSAHPQDLIVIFTLLDPFHSCNLFCSVAFGALSSSFTVGRGGIGPTCFPVGGMGCVCGWGLVTGSLWFLVEGLNQGANSRRRIQPLCLLQEAERPVGLVALDGLEGDADTALSFILVGFHGGTRTRNQGGGGRAS

SEQ ID NO: 789 - protein, 373 aa, Homo sapiens
HEEKCVEIAREALNAGNREKAQRFLQKAEKLYPLPSARALLEIIMKNGSTAGNSPHCRKPSGSGDQSKPNCTKDSTSGSGEGGKGYTKDQVDGVLSINKCKNYYEVLGVTKDAGDEDLKKAYRKLALKFHPDKNHAPGATDAFKKIGNAYAVLSNPEKRKQYDLTGNEEQACNHQNNGRFNFHRGCEADITPEDLFNIFFGGGFPSGSVHSFSNGRAGYSQQHQHRHSGHEREEERGDGGFSVFIQLMPIIVLILVSLLSQLMVSNPPYSLYPRSGTGQTIKMQTENLGVVYYVNKDFKNEYKGMLLQKVEKSVEEDYVTNIRNNCWKERQQKTDMQYAAKVYRDDRLRRKADALSMDNCKELERLTSLYKGG

SEQ ID NO: 790 - protein, 60 aa, Homo sapiens
  SITE (40): Xaa equals any of the naturally occurring L-amino acids
  SITE (56): Xaa equals any of the naturally occurring L-amino acids
NMVDYYEVLGVQRHASPEDIKKAYRKLALKWHPDKNPEDXRRSREKIQASSGGMMXVPVG

SEQ ID NO: 791 - protein, 125 aa, Homo sapiens
NSQNFIVISAFLDPLYPKQLFLTIRGVPLTLPGLSPLILRLLFLLCLHAVTAATGVMTLRRCVFWVFVSSNCVNVSFRPALPAAQSRRHIGSQSAGPPSLPRARGYMLNCNGFLLVILRSVLCPI

SEQ ID NO: 792 - protein, 178 aa, Homo sapiens
  SITE (32): Xaa equals any of the naturally occurring L-amino acids
THLAHLLTIRLCLRPHVFAAPCTVVVVGRQGXVASAYLLSIHLSCSLPFTVTDLSCPSSSTSTRSCPFSTMRLVVTLWPLIISVDDITDLNPELPELEPPKEVDEKVVWLPPLQPSMLKDEKASMKAGNSPKPAEKAPLRPWPRPPRSLLNGLSQNSKEKGSRPPKNSRKMSSGLRKV

SEQ ID NO: 793 - protein, 84 aa, Homo sapiens
  SITE (48): Xaa equals any of the naturally occurring L-amino acids
PVGNWATQQEDLYHQSYECVCVLFASVPDFKEFYSESNINHEGLECLXLLNEIIADFDELLSKPKFSGVEKIKTIGSTYMAATG

SEQ ID NO: 794 - protein, 241 aa, Homo sapiens
  SITE (5): Xaa equals any of the naturally occurring L-amino acids
  SITE (6): Xaa equals any of the naturally occurring L-amino acids
NSAQXXRGDGGAAAYNRRLLHNILPKDVAAHFLARERRNDELYYQSCECVAVMFASIANFSEFYVELEANNEGVECLRLLNEIIADFDEIISEDRFRQLEKIKTIGSTYMAASGLNDSTYDKVGKTHIKALADFAMKLMDQMKYINEHSFNNFQMKIGLNIGPVVAGVIGARKPQYDIWGNTVNVASRMDSTGVPDRIQVTTDMYQVLAANTYQLECRGVVKVKGKGEMMTYFLNGGPPLS

SEQ ID NO: 795 - protein, 109 aa, Homo sapiens
  SITE (21): Xaa equals any of the naturally occurring L-amino acids
  SITE (91): Xaa equals any of the naturally occurring L-amino acids
  SITE (95): Xaa equals any of the naturally occurring L-amino acids
  SITE (96): Xaa equals any of the naturally occurring L-amino acids
LPLSLPDHAINCVRMGLDMCXAIRKLRAATGVDINMRVGVHSGSVLCGVIGLQKWQYDVWSHDVTLANHMEAGGVPGRVHITGATLALLAXAYAXXDQAWSIGTPTFGS

SEQ ID NO: 796 - protein, 173 aa, Homo sapiens
PHILQRMVTLWYRPPDVLLGSTEYSTCLDMWGVGCIFVEMIQGVAAFPGMKDIQDQLERIFLVLGTPNEDTWPGVHSLPHFKPERFTLYSSKNLRQAWNKLSYVNHAEDLASKLLQCSPKNRLSAQAALSHEYFSDLPPRLWELTDMSSIFTVPNVRLQPEAGESMRGFWEKQ

SEQ ID NO: 797 - protein, 111 aa, Homo sapiens
LVPQEYAAKIINTKKLSARDHQKLEREARICRLLKHPNIVRLHDSISEEGFHYLVFDLVTGGELFEDIVAREYYSEADASHCIQQILESVNHCHLNGIVHRDLKPEEFAFS

SEQ ID NO: 798 - protein, 340 aa, Homo sapiens
  SITE (274): Xaa equals any of the naturally occurring L-amino acids
  SITE (289): Xaa equals any of the naturally occurring L-amino acids
  SITE (296): Xaa equals any of the naturally occurring L-amino acids
  SITE (307): Xaa equals any of the naturally occurring L-amino acids
  SITE (319): Xaa equals any of the naturally occurring L-amino acids
EENKARVIFITEYMSSGSLKQFLKKTKKNHKTMNEKAWKRWCTQILSALSYLHSCDPPIIHGNLTCDTIFIQHNGLIKIGSVAPDTINNHVKTCREEQKNLHFFAPEYGEVTNVTTAVDIYSFGMCALEMAVLEIQGNGESSYVPQEAISSAIQLLEDPLQREFIQKCLQSEPARRPTARELLFHPALFEVPSLKLLAAHCIVGHQHMIPENALEEITKNMDTSAVLAEIPAGPGREPVQTLYSQSPALELDKFLEDVRNGIYPLTAFGLPRPXQPQQEEVTSPVVPPXVKDFHTXTSLRWRLARWXLDAVQHWSPVEXGSQTPTGHFWLKLEGQTGPGT

SEQ ID NO: 799 - protein, 92 aa, Homo sapiens
  SITE (4): Xaa equals any of the naturally occurring L-amino acids
DIEXLVFHLVIQAEILSVLSHRNIIQFYGVILEPPNYGIVTEYASLGSLYDYINSNRSEEMDMDHIMTWATDVAKGMHYLHMEAPVKVIHRD

SEQ ID NO: 800 - protein, 167 aa, Homo sapiens
  SITE (134): Xaa equals any of the naturally occurring L-amino acids
  SITE (135): Xaa equals any of the naturally occurring L-amino acids
  SITE (136): Xaa equals any of the naturally occurring L-amino acids
  SITE (138): Xaa equals any of the naturally occurring L-amino acids
  SITE (162): Xaa equals any of the naturally occurring L-amino acids
  SITE (164): Xaa equals any of the naturally occurring L-amino acids
LHRDLKTQNILLDKHRMVVKIGDFGISKILSSKSKAYTVVGTPCYISPELCEGKPYNQKSDIWALGCVLYELASLKRAFEAANLPALVLKIMSGTFAPISDRYSPELRQLVLSLLSLEPASGTTQPHHGTSPLXXXLXNFTPTWAVSRMRRAEKSVGPSNTXSXTTN

SEQ ID NO: 801 - protein, 127 aa, Homo sapiens
VITYMLLSGLSPFLGDDDTETLNNVLSGNWYFDEETFEAVSDEAKDFVSNLIVKDQRARMNAAQCLAHPWLNNLAEKAKRCNRRLKSQILLKKYLMKRRWKKNFIAVSAANRFKKISSSGALMALGV

SEQ ID NO: 802 - protein, 111 aa, Homo sapiens
  SITE (99): Xaa equals any of the naturally occurring L-amino acids
CSQTCRSWSGSSSRILPESLASSEASTLEAMGRKEEDDCSSWKKQTTNIRKTFIFMEVLGSGAFSEVFLVKQRLTGKLFALKCIKKSPAFRDSSLENEXCCVEKVSSMKTL

SEQ ID NO: 803 - protein, 130 aa, Homo sapiens
  SITE (15): Xaa equals any of the naturally occurring L-amino acids
  SITE (67): Xaa equals any of the naturally occurring L-amino acids
  SITE (97): Xaa equals any of the naturally occurring L-amino acids
PATPSNFLPKKTPLXEEMTPPPKPPRLYLPQEPTSEETPRTKRPHMEPRTRRGPSPPASPTRKPPRXQDFRCLAVLGRGHFGKVLLVQFKGTGKYYXIKALKKQEVLSRDEIESLYCEKRIPGRLWGCTG

SEQ ID NO: 804 - protein, 104 aa, Homo sapiens
  SITE (49): Xaa equals any of the naturally occurring L-amino acids
  SITE (61): Xaa equals any of the naturally occurring L-amino acids
KTLGKGQTGLVKLGVHCITGQKVAIKIVNREKLSESVLMKVEREIAILXLIEHPHVLKLHXVYENKKYLYLVLEHVSGGELFDYLVLPHDLLYGFPLRRILVSR

SEQ ID NO: 805 - protein, 169 aa, Homo sapiens
  SITE (124): Xaa equals any of the naturally occurring L-amino acids
  SITE (163): Xaa equals any of the naturally occurring L-amino acids
  SITE (169): Xaa equals any of the naturally occurring L-amino acids
EHCFSFPETLLPGLKSKKWSKKFFSFIEGCLVKNYMQRPSTEQLLKHPFIRDQPNERQVRIQLKDHIDRTRKKRGEKDETEYEYSGSEEEEEEVPEQEGEPSSIVNVPGESTLRRDFLRLQQEXKERSEALRRQQLLQEQQLREQEEYKRQLLAERQNGLSSXKNRGDX

SEQ ID NO: 806 - protein, 254 aa, Homo sapiens
LRNEMEKYERIRVVGRGAFGIVHLCLRKADQKLVIIKQIPVEQMTKEERQAAQNECQVLKLLNHPNVIEYYENFLEDKALMIAMEYAPGGTLAEFIQKRCNSLLEEETILHFFVQILLALHHVHTHLILHRDLKTQNILLDKHRMVVKIGDFGISKILSSKSKAYTVPGHGRDLQGTRSLEGQDLTLPPPLPLKNPWPFGPCLGGSAGGSPLACFEKKLSPNGLMHRAPGLPSLQGCDPSFYPAGGGYPMLYLP

SEQ ID NO: 807 - protein, 114 aa, Homo sapiens
  SITE (106): Xaa equals any of the naturally occurring L-amino acids
  SITE (113): Xaa equals any of the naturally occurring L-amino acids
SIQEGKYEFPDKDWAHISCAAKDLISKLLVRDAKQRLSAAQVLQHPWVQGCAPENTLPTPMVLQRNSCAKDLTSFAAEAIAMNRQLAQHDEDLAEKKKKKKKKKKXKKKKKKXK

SEQ ID NO: 808 - protein, 148 aa, Homo sapiens
DPAGITRGLPDPAKMQSTSNHLWLLSDILGQGATANVFRGRHKKTGDLFAIKVFNNISFLRPVDVQMREFEVLKKLNHKNIVKLFAIEEETTTRHKVLIMEFCPCGSLYTVLEEPSNAYGLPESEFLIVLRDVVGGMNHLRENGNSAP

SEQ ID NO: 809 - protein, 244 aa, Homo sapiens
  SITE (39): Xaa equals any of the naturally occurring L-amino acids
  SITE (79): Xaa equals any of the naturally occurring L-amino acids
LVQKKDTGHIYAMKILRKSDMLEKEQVAHIRAERDILVXADGAWVVKMFYSFQDKRNLYLIMEFLPGGDMMTLLMKKDXLTEEETQFYISETVLAIDAIHQLGFIHRDIKPDNLLLDAKGHVKLSDFGLCTGLKKAHRTEFYRNLTHNPPSDFSFQNMNSKRKAETWKKNRRQLAYSTVGTPDYIAPEVFMQTGYNKLCDWWSLGVIMYEMLIGYPPFCSETPQETYRKVMNWKETLVFPPEVP

SEQ ID NO: 810 - protein, 206 aa, Homo sapiens
  SITE (136): Xaa equals any of the naturally occurring L-amino acids
  SITE (138): Xaa equals any of the naturally occurring L-amino acids
  SITE (145): Xaa equals any of the naturally occurring L-amino acids
  SITE (160): Xaa equals any of the naturally occurring L-amino acids
  SITE (161): Xaa equals any of the naturally occurring L-amino acids
  SITE (164): Xaa equals any of the naturally occurring L-amino acids
ISDSEIAFRALVRLACRMAGQPGHMPHGGSSNNLCHTLGPVHPPDPQRHPNTLSFRCSLADFQIEKKIGRGQFSEVYKATCLLDRKTVALKKVQIFEMMDAKARQDCVKEIGLLKQLNHPNIIKYLDSFIEDNELXIXLELADAXDLSQMIKYFKKQKRXXPGXDSMEVLCAAVQRRGAHAFTPGDAPRHQACQRVHHSHGLREAR

SEQ ID NO: 811 - protein, 276 aa, Homo sapiens
  SITE (223): Xaa equals any of the naturally occurring L-amino acids
MQRDHTMDYKESCPSVSIPSSDEHREKKKRFTVYKVLVSVGRSEWFVFRRYAEFDKLYNTLKKQFPAMALKIPAKRIFGDNFDPDFIKQRRAGLNEFIQNLVRYPELYNHPDVRAFLQMDSPKHQSDPSEDEDERSSQKLHSTSQNINLGPSGNPHAKPTDFDFLKVIGKGSFGKVLLAKRKLDGKFYAVKVLQKKIVLNRKEQKHIMAERNVLLKNVKHPFXVGLHYSFQTTEKLYFVLDFVNGGELFFHLQRKENSSLLQRGVLEKWVTPVGLI

SEQ ID NO: 812 - protein, 249 aa, Homo sapiens
AHASAHASAHASEIFEMMDAKARQDCVKEIGLLKQLNHPNIIKYLDSFIEDNELNIVLELADAGDLSQMIKYFKKQKRLIPERTVWKYFVQLCSAVEHMHSRRVMHRDIKPANVFITATGVVKLGDLGLGRFFSSETTAAHSLVGTPYYMSPERIHENGYNFKSDIWSLGCLLYEMAALQSPFYGDKMNLFSLCQKIEQCDYPPLPGEHYSEKLRELVSMCICPDPHQRPDIGYVHQVAKQMHIWMSST

SEQ ID NO: 813 - protein, 154 aa, Homo sapiens
KPENILVSQSGITKLCDFGFARTLAAPGDIYTDYVATRWYRAPELVLKDTSYGKYVYFGILSAFPRPVDIWALGCMIIEMATGNPYLPSSSDLDLLHKIVLKVGNLSPHLQNIFSKSPIFAGVVLPQVQHPKNARKKYPKLNGLLADIVHACYN

SEQ ID NO: 814 - protein, 265 aa, Homo sapiens
  SITE (146): Xaa equals any of the naturally occurring L-amino acids
  SITE (155): Xaa equals any of the naturally occurring L-amino acids
  SITE (158): Xaa equals any of the naturally occurring L-amino acids
  SITE (168): Xaa equals any of the naturally occurring L-amino acids
CLWPPAPELLEQKPYGKAVDVWALGVISYILLCGYPPFYDESDPELFSQILRASYEFDSPFWDDISESAKDFIRHLLERDPQKRFTCQQALRHLWISGDTAFDRDILGSVSEQIRKNFARTHWKRAFNATSFLRHIRKLGQIPEAXGPLSRAWPXTAXQASVLASPPXGDAQLRMGPRVDADLGTPPFRGHHRDASRMPLCQPDTRTFVKNSNRQERQRVTRLCPVIGWHMLTSCQTTSTRVIHVHLQQPARYSLCDFSVCVCVS

SEQ ID NO: 815 - protein, 115 aa, Homo sapiens
TLIRNILFGAVRGLNYLHQNGCIHRSIKASHILISGDGLVTLSGLSHLHSLVKHGQRHRAVYDFPQFSTSVQPWLSPELLRQDLHGYNVKSDIYSVGITACGIKPVGRCLFQDMH

SEQ ID NO: 816 - protein, 170 aa, Homo sapiens
  SITE (118): Xaa equals any of the naturally occurring L-amino acids
AVSLIKSFSKNTKNCTRKKERKKERKKYILMWLFKKYIQGLAHLHAHRVIHRDIKGQNVLLTHNAEVKLVDFGVSAQVSRTNGRRNSFIGTPYWMAPEVIDCDEDPRRSYDYRSDVWXVGITAIEMAEGAPPLVTFNPWKLSSLFCGNLLPQSNPADGPVSSTISWKSVR

SEQ ID NO: 817 - protein, 117 aa, Homo sapiens
  SITE (76): Xaa equals any of the naturally occurring L-amino acids
  SITE (104): Xaa equals any of the naturally occurring L-amino acids
GRAHSLLVTSMGHIKLTDFGLSKVGLMSMTTNLYEGHIEKDAREFLDKQVCGTPEYIAPEVILRQGYGKPVDWWAXGIILYEFLVGCVPFFGDTPEGYLDKSSXMRSTGLRRMRHPT

SEQ ID NO: 818 - protein, 138 aa, Homo sapiens
  SITE (11): Xaa equals any of the naturally occurring L-amino acids
  SITE (69): Xaa equals any of the naturally occurring L-amino acids
  SITE (130): Xaa equals any of the naturally occurring L-amino acids
EHPFLVNLWYXFQDEEDMFMVVDLLLGGDLRYHLQQNVHFTEGTVKLYICELALALEYLQRYHIIHRDXKPDNILLDEHGHVHITDFNIATVVKGAERASSMAGTKPYMAPEVFQVYMDRGPGYSYPVDXRSLGITAY

SEQ ID NO: 819 - protein, 258 aa, Homo sapiens
  SITE (28): Xaa equals any of the naturally occurring L-amino acids
  SITE (228): Xaa equals any of the naturally occurring L-amino acids
CQEKTSPKGVENPAVQESNQKMLGPPLXWLKTLASKRNAVAFRSFNSHINASNNSEPSRMNMTSLDAMDISCAYSGSYPMAITPTQKRRSCMPHQTPNQIKSGTPYRTPKSVRRGVAPVDDGRILGTPDYLAPELLLGRAHGPAVDWWALGVCLFEFLTGIPPFNDETPQQVFQNILKRDIPWPEGEEKLSDNAQSAVEILLTIDDTKRAGMKELKRHPLFSDVDWEXLQHQTMPFIPRSQMMKQIPPILKPGILLST

SEQ ID NO: 820 - protein, 100 aa, Homo sapiens
  SITE (94): Xaa equals any of the naturally occurring L-amino acids
  SITE (100): Xaa equals any of the naturally occurring L-amino acids
ADAPKDPVPALPTHPPAQEQDCVVVITREVPHQTASDFVRDSAASHQAEPEAYERRVCFLLLQLCNGLEHLKEHGIIHRDLCLENLLLVHCTLXVGPARX

SEQ ID NO: 821 - protein, 265 aa, Homo sapiens
  SITE (5): Xaa equals any of the naturally occurring L-amino acids
  SITE (11): Xaa equals any of the naturally occurring L-amino acids
  SITE (191): Xaa equals any of the naturally occurring L-amino acids
  SITE (246): Xaa equals any of the naturally occurring L-amino acids
  SITE (251): Xaa equals any of the naturally occurring L-amino acids
  SITE (259): Xaa equals any of the naturally occurring L-amino acids
  SITE (262): Xaa equals any of the naturally occurring L-amino acids
  SITE (264): Xaa equals any of the naturally occurring L-amino acids
YKGCXLREHTXWLVMEYCLGSASDLLEVHKKPLQEVEIAAITHGALQGLAYLHSHTMIHRDIKAGNILLTEPGQVKLADFGSASMASPANSFVGTPYWMAPEVILAMDEGQYDGKVDVWSLGITCIELAERKPPLFNMNAMSALYHIAQNESPTLQSNEWSDYFRNFVDSCLQKIPQDRPTSEELLKHIFXLRERPETVLIDLIQRTKDAVRELDNLQYRKMKKLLFRRHINGPAVEAQEGRRGTXIMGVXRTGTGNSXWKXIXS

SEQ ID NO: 822 - protein, 302 aa, Homo sapiens
  SITE (292): Xaa equals any of the naturally occurring L-amino acids
  SITE (294): Xaa equals any of the naturally occurring L-amino acids
  SITE (295): Xaa equals any of the naturally occurring L-amino acids
  SITE (296): Xaa equals any of the naturally occurring L-amino acids
  SITE (300): Xaa equals any of the naturally occurring L-amino acids
GRVGGCAAERSCEGVAVIRGPGTRAGAEAQAAGRGVGSAGLSVPSSMSEGESQTVLSSGSDPKVESSSSAPGLTSVSPPVTSTTSAASPEEEEESEDESEILEESPCGRWQKRREEVNQRNVPGIDSAYLAMDTEEGVEVVWNEVQFSERKNYKLQEEKVRAVFDNLIQLEHLNIVKFHKYWADIKENKARVIFITEYMSSGSLKQFLKKTKKNHKTMNEKAWKRWCTQILSALSYLHSCDPPIIHGNLTCDTIFIQHNGLIKIGSVALIVGVSPYSQWLLDTINNHVKTCXEXXXNLHXFA

SEQ ID NO: 823 - protein, 129 aa, Homo sapiens
PASSGQEMQSTANYLWHTDDLLGQGATASVYKARNKKSGELVAVKVFNTTSYLRPREVQVREFEVLRKLNHQNIVKLFAVEETGGSRQKVLVMEYCSSGSLLSVLESPENAFGLPEDEFLVVLRCVVAA

SEQ ID NO: 824 - protein, 238 aa, Homo sapiens
  SITE (152): Xaa equals any of the naturally occurring L-amino acids
ELMSFLVSKPERIRRWVSEKFIVEGLRDLELFGEQPPGDTRRKTNDASSESIASFSKQEVMSSFLPEGGCYELLTVIGKGFEDLMTVNLARYKPTGEYVTVRRINLEACSNEMVTFLQGELHVSKLFNHPNIVPYRATFIADNELWVVTSFXAYGSAKDLICTHFMDGMNELAIAYILQGVLKALDYIHHMGYVHRSVKASHILISVDGKVYLSGLRKPAAALVLSPRAISVLPSLRA

SEQ ID NO: 825 - protein, 182 aa, Homo sapiens
  SITE (151): Xaa equals any of the naturally occurring L-amino acids
  SITE (161): Xaa equals any of the naturally occurring L-amino acids
  SITE (173): Xaa equals any of the naturally occurring L-amino acids
CEAIDMWSLGCVIAELFLGWPLYPGASEYDQIRYISQTQGLPAEYLLSAGTKTTRFFNRDPNLGYPLWRLKTPEEHELETGIKSKEARKYIFNCLDDMAQVNMSTDLEGTDMLAEKADRREYIDLLKKMLTIDADKRITPLKTLNHQFVTXTHLLDFPHSXHVKSWFQNMEIXKRRVHMYDQ

SEQ ID NO: 826 - protein, 436 aa, Homo sapiens
  SITE (24): Xaa equals any of the naturally occurring L-amino acids
  SITE (123): Xaa equals any of the naturally occurring L-amino acids
  SITE (267): Xaa equals any of the naturally occurring L-amino acids
  SITE (330): Xaa equals any of the naturally occurring L-amino acids
DIIKELPETVIDLLNKCLTFHPSXRPTPDELMKDKVFSEVSPLYTPFTKPASLFSSSLRCADLTLPEDISQLCKDINNDYLAERSIEEVYYLWCLAGGDLEKELVNKEIIRSKPPICTLPNFXFEDGESFGQGRDRSSLLDDTTVTLSLCQLRNRLKDVGGEAFYPLLEDDQSNLPHSNSNNELSAAATLPLIIREKDTEYQLNRIILFDRLLKAYPYKKNQIWKEARVDIPPLMRGLTWAALLGVEGAIHAKYDAIDKDTPIPTDXQIEVDIPRCHQYDELLSSPEGHAKFRRVLKAWVVSHPDLVYWQGLDSLCAPFLYLNFNNEALXYACMSAFIPKYLYNFFLKDNSHVIQEYLTVFSQMIAFHDPELSNHLNEIGFIPDLYAIPWFLTMFTHVFPLHKIFHLWDTLLLGNSSFPFCIGVGNSSAAAGPAFG

SEQ ID NO: 827 - protein, 142 aa, Homo sapiens
FKFFMEQHVENVIKTYQQKVNRRLQLEQEMAKAGLCEAEQEQMRKILYQKESNYNRLKRAKMDKSMFVKIKTLGIGAFGEVCLACKVDTHALYAMKTLRKKDVLNRNQVAHVKAERDILAEADNEWVANSTTPSKTKTACTL

SEQ ID NO: 828 - protein, 146 aa, Homo sapiens
GEAWQGVSEEAKELVRGLLTVDPAKRLKLEGLRGSSWLQDGSARSSPPLRTPDVLESSGPAVRSGLNATFMAFNRGKREGFFLKSVENAPLAKRRKQKLRRPPPPAGAPLHQPTRAEPPSPPKGPPAEPTAPCPPPNPHHCDPLPS

SEQ ID NO: 829 - protein, 320 aa, Homo sapiens
  SITE (1): Xaa equals any of the naturally occurring L-amino acids
  SITE (109): Xaa equals any of the naturally occurring L-amino acids
XGIEELSDPSGPKSYSITEKHYAQEDPRMLFVAAVDHSSSGDMSLLPSSDPKFQGLGVVESAVTANNTEESLFRICSPLSGANEYIASTDTLKTEEVLLFTDQTDDLAXEEPTSLFQRDSETKGESGLVLEGDKEIHQIFEDLDKKLALASRFYIPEGCIQRWAAEMVVALDALHREGIVCRDLNPNNILLNDRGHIQLTYFSRWSEVEDSCDSDAIERMYCAPEVGAITEETEACDWWSLGAVLFELLTGKTLVECHPAGINTHTTLNMPECVSEEARSLIQQLLQFNPLERLGAGVAGVEDIKSHPFFTPVDWAELMR

SEQ ID NO: 830 - protein, 135 aa, Homo sapiens
SPLAGAPSGKVYLGQKGGKLYAVKVVKKADMINKNMTHQVQAERDALALSKSPFIVHLYYSLQSANNVYLVMEYLIGGDVKSLLHIYGYFDEEMAVKYISEVALALDYLHRHGIIHRDLKPDNMLISNEGHIKLT

SEQ ID NO: 831 - protein, 229 aa, Homo sapiens
  SITE (102): Xaa equals any of the naturally occurring L-amino acids
  SITE (125): Xaa equals any of the naturally occurring L-amino acids
  SITE (126): Xaa equals any of the naturally occurring L-amino acids
PTRPEELWELRGHHYLHQESLKPAPVLVEKPLPEWPVPQFINLFLPEFPIRPIRGQQQLKILGLVAKGSFGTVLKVLDCTQKAVFAVKVVPKVKVLQRDTVXQCKEEVSIQRQINHPFVHSLGDXXQGKRHLFIMCSYCSTDLYSLWSAVGCFPEASIRLFAAELVLVLCYLHDLGIMHRDVKMENILLDERDTEISWVMRAHTVGPSYFGEAEGGKNLLWTREIGKVA

SEQ ID NO: 832 - protein, 219 aa, Homo sapiens
  SITE (74): Xaa equals any of the naturally occurring L-amino acids
  SITE (162): Xaa equals any of the naturally occurring L-amino acids
  SITE (163): Xaa equals any of the naturally occurring L-amino acids
  SITE (209): Xaa equals any of the naturally occurring L-amino acids
LARPDTDQQMGAVFVAPEVVGRQRYGRPVDCWAIGVIMYILLSGNPPFYEEVEEDDYENHDKNLFRKILAGDYXFDSPYWDDISQAAKDLVTRLMEVEQDQRITAEEAISHEWISGNAASDKNIKDGVCAQIEKNFARAKWKKAVRVTTLMKRLRAPEQSSXXAAQSASATDTATPGAADRKCPPQPQMEVPPQPLMAVSPQPPMEASXQPLMGSVTPA

SEQ ID NO: 833 - protein, 177 aa, Homo sapiens
REQKLELHRGGGRSRTSGSPGLQEFGTSWMAPEVIKSSLFSKGSDIWSYGVLLWELLTGEVPYRGIDGLAVAYGVAVNKLTLPIPSTCPEPFAKLMKECWQQDPHIRPSFALILEQLTAIEGAVMTEMPQESFHSMQDDWKLEIQQMFDELRTKEKDHKTNRGDWRLCRGLGCHLSE

SEQ ID NO: 834 - protein, 511 aa, Homo sapiens
  SITE (236): Xaa equals any of the naturally occurring L-amino acids
  SITE (244): Xaa equals any of the naturally occurring L-amino acids
  SITE (278): Xaa equals any of the naturally occurring L-amino acids
  SITE (330): Xaa equals any of the naturally occurring L-amino acids
  SITE (406): Xaa equals any of the naturally occurring L-amino acids
  SITE (421): Xaa equals any of the naturally occurring L-amino acids
  SITE (460): Xaa equals any of the naturally occurring L-amino acids
  SITE (470): Xaa equals any of the naturally occurring L-amino acids
QSMGVVLYVLVCGALPFDGPTLPILRQRVLEGRFRIPYFMSEDCEHLIRRMLVLDPSKRLTIAQIKEHKWMLIEVPVQRPVLYPQEQENEPSIGEFNEQVLRLMHSLGIDQQKTIESLQNKSYNHFAAIYFLLVERLKSHRSSFPVEQRLDGRQRRPSTIAEQTVAKAQTVGLPVTMHSPNMRLLRSALLPQASNVEAFSFPASGCQAEAAFMEEECVDTPKVNGCLLDPVPPVLXRKGCQSLXSNMMETSIDEGLETEGEAEEDPAHAFEAFQSTRXGQRRHTLSEVTNQLVVMPGAGKIFSMNDRPSLDSVDSEHDMASVHRDLNFLXDNPSLKDIMLANQPSPRMTSPFISLRPTNPAMQALSSQKREVHNRSPVSFREGRRASDTSLTQGIVAFRQHLQNLXRTKGILELNKVQLLXEQIGPEADPNLAPAAPQLQDLASSCPQEEVSQQQESVSXLPASVHPQLXHGRAWRPSTCSTDSRSPAFCQRPRTPVSFIAKNHRRRGREF

SEQ ID NO: 835 - protein, 102 aa, Homo sapiens
TCKRTMKDYDELLKYYELHETIGTGGFAKVKLACHILTGEMVAIKIMDKNTLGSDLPRIKTEIEALKNLRHQHICQLYHVLETANKIFMVLSTALEESCLTI

SEQ ID NO: 836 - protein, 157 aa, Homo sapiens
  SITE (22): Xaa equals any of the naturally occurring L-amino acids
  SITE (32): Xaa equals any of the naturally occurring L-amino acids
VTLTAAEALKLFKNQLSPYEQXGILGYAELWXLGLEAKKLDTAPEKFSKTSFDDEHGFYLKVLHDHIAYRYEVLETIGKGSFGQVAKCLDHKNNELVALKIIRNKKRFHQQALMELKILEALRKKDKDNTYNVVHMKDFFYFRNHSASPLSSWGSIV

SEQ ID NO: 837 - protein, 157 aa, Homo sapiens
  SITE (31): Xaa equals any of the naturally occurring L-amino acids
  SITE (33): Xaa equals any of the naturally occurring L-amino acids
KEMNPLPTQLSTGAISFLRSLLEPDPVKRPXIXQALANRWLNENYTGKVPCNVTYPNRISLEDLSPSVVLHMTEKLGYKNSDVINTVLSNRACHILAIYFLLNKKLERYLSGKSDIQDSLCYKTRLYQIEKYRAPKESYEASLDTWTRDLEFHAVQR

SEQ ID NO: 838 - protein, 121 aa, Homo sapiens
  SITE (76): Xaa equals any of the naturally occurring L-amino acids
  SITE (104): Xaa equals any of the naturally occurring L-amino acids
  SITE (118): Xaa equals any of the naturally occurring L-amino acids
GERRSAVQHGGNPSIHGPRRPFLIPAKASVERPWMYGHCVTLYCFVYGKCPFIDDFILALHRKIKNEPVVFPEEPXISEELKDLILKMLDKNPETRIGVPDIKXHPWVTKNGEEPSSXEDT

SEQ ID NO: 839 - protein, 146 aa, Homo sapiens
  SITE (144): Xaa equals any of the naturally occurring L-amino acids
RDLYTGLKAGLTLETRLQIALDVVEGIRFLHSQGLVHRDIKLKNVLLDKQNRAKITDLGFCKPEAMMSGSIVGTPIHMAPELFTGARPERLPVFDEECWQLMEACWDGDPLKRPLLGIVQPMLQGIMNRLCKSNSEQPNRGLDXST

SEQ ID NO: 840 - protein, 128 aa, Homo sapiens
  SITE (102): Xaa equals any of the naturally occurring L-amino acids
  SITE (103): Xaa equals any of the naturally occurring L-amino acids
  SITE (104): Xaa equals any of the naturally occurring L-amino acids
  SITE (108): Xaa equals any of the naturally occurring L-amino acids
  SITE (109): Xaa equals any of the naturally occurring L-amino acids
STESADDYNFVRAYECFQHKNHTCLVFEMLEQNLYDFLKQNKFSPLPLKYIRPVLQQVATALMKLKSLGLIHADLKPENIMLVDPSRQPYRVKVIDFGSASXXXKAVXXTYLQSRYYRALRSSWFTIL

SEQ ID NO: 841 - protein, 166 aa, Homo sapiens
  SITE (142): Xaa equals any of the naturally occurring L-amino acids
  SITE (150): Xaa equals any of the naturally occurring L-amino acids
  SITE (157): Xaa equals any of the naturally occurring L-amino acids
PIPSQPPLCLPSTEALFGQPPFASRSFSELEEKIRSNRVIELPLRPLLSRDCRDLLQRLLERDPSRRISFQDFFAHPWVDLEHMPSGESLGRATALVVQAVKKDQEGDSAAALSLYCKLWTSLYLPCTMKWMPSGRRQLRQXWGSTCPGXRSSRPSXSCFNQALLR

SEQ ID NO: 842 - protein, 127 aa, Homo sapiens
  SITE (89): Xaa equals any of the naturally occurring L-amino acids
  SITE (99): Xaa equals any of the naturally occurring L-amino acids
  SITE (113): Xaa equals any of the naturally occurring L-amino acids
EYPTLQKDFRRTTYANSSLIKYMEKHKVKPDSKVFLLLQKLLTMDPTKRITSEQALQDPYFQEDPLPTLDVFAGCQIPYPKRRNSLMEXDPGRKKVDKXSATAAEPSISSPQXLPQQGSSPFPQGGP

SEQ ID NO: 843 - protein, 294 aa, Homo sapiens
  SITE (61): Xaa equals any of the naturally occurring L-amino acids
  SITE (164): Xaa equals any of the naturally occurring L-amino acids
  SITE (181): Xaa equals any of the naturally occurring L-amino acids
EIFKICQVLGTPKKSDWPEGYQLASSMNFRFPQCVPINLKTLIPNASNEAIQLMTEMLNWXPKKRPTASQALKHPYFQVGQVLGPSSNHLESKQSLNKQLQPLESKPSLVEVEPKPLPDIIDQVVGQPQPKTSQQPLQPIQPPQNLSVQQPPKQQSQEKPPQTXFPSIVKNMPTKPNGTLXHKSGRRRWGQTIFKSGDSWEELEDYDFGASHSKKPSMGVFKEKRKKDSPFRLPEPVPSGSNHSTGENKSLPAVTSLKSDSELSTAPTSKQYYLKQSRYLPGQHDIILQGLADL

SEQ ID NO: 844 - protein, 409 aa, Homo sapiens
  SITE (11): Xaa equals any of the naturally occurring L-amino acids
  SITE (21): Xaa equals any of the naturally occurring L-amino acids
  SITE (27): Xaa equals any of the naturally occurring L-amino acids
APQALHFMLPXRMLCGIVADXNFTQEXAMTMITPSSKLTLTKGNKSWSSTAVAAALELVDPPGCRNSARARAARPRYSLLAEIGRGSYGVVYEAVAGRSGARVAVKKIRCDAPENVELALAEFWALTSLKRRHQNVVQFEECVLQRNGLAQRMSHGNKSSQLYLRLVETSLKGERILGYAEEPCYLWFVMEFCEGGDLNQYVLSRRPDPATNKSFMLQLTSAIAFLHKNHIVHRDLKPDNILITERSGTPILKVADFGLSKVCAGLAPRGKEGNQDNKNVNVNKYWLSSACGSDFYMAPEVWEGHYTAKADIFALGIIIWAMIERITFIDSETKKELLGTYIKQGTEIVPVGEALLENPKMELHIPQKRRTSMSEGIKQLLKDMLAANPQDRPDAFELETRMDQVTCAA

SEQ ID NO: 845 - protein, 170 aa, Homo sapiens
ADNNFTQETAMTMITPSSKLTLTKGNKSWSSTAVAAALELVDPPGCRNSARGNNVMLMPTGIIKLIDFGCARRLAWAGLNGTHSDMLKSMHGTPYWMAPEVINESGYGRKSDIWSIGCTVFEMATGKPPLASMDRMAAMFYIGAHRGLMPPLPDHFSENAADFVRMCLTR

SEQ ID NO: 846 - protein, 237 aa, Homo sapiens
  SITE (159): Xaa equals any of the naturally occurring L-amino acids
  SITE (160): Xaa equals any of the naturally occurring L-amino acids
AMLQATCGTPIYMAPEVISAHDYSQQCDIWSIGVVMYMLLRGEPPFLASSEEKLFELIRKGELHFENAVWNSISDCAKSVLKQLMKVDPAHRITAKELLDNQWLTGNKLSSVRPTNVLEMMKEWKNNPESVEENTTEEKNKPSTEEKLKSYQPWGNVPXXNYTSDEEEEKQSTAYEKQFPATSKDNFDMCSSSFTSSKLLPAEIKGEMEKTPVTPSQGTATKYPAKSGALSRTKKKL

SEQ ID NO: 847 - protein, 229 aa, Homo sapiens
  SITE (119): Xaa equals any of the naturally occurring L-amino acids
FIDIGHYVRDISAYEELVSKLNLLVEDELKQIAENIESINQNKAPSKYIGNYAILDHLGSGAFGCVYKVRKHSGQNLLAMKEVNLHNPAFGKDKKDRDSSVRNIVSELTIIKEQLYHPXIVRYYKTFLENDRLYIVMELIEGAPLGEHFSSLKEKHHHFTEERLWKIFIQLCLALRYLHKEKRIVHRDLTPNNIMLGDKDKVTVTDFGLAKQKQENSKLTSVVGTILYS

SEQ ID NO: 848 - protein, 305 aa, Homo sapiens
PLTGRKCPGWTHSGSRRSPRIAEEVPGFPKRAEASRQFSETADRLELLRRAVMAAARATTPADGEEPAPEAEALAAARERSSRFLSGLELVKQGAEARVFRGRFQGRAAVIKHRFPKGYRHPALEARLGRRRTVQEARALLRCRRAGISAPVVFFVDYASNCLYMEEIEGSVTVRDYIQSTMETEKTPQGLSNLAKTIGQVLARMHDEDLIHGDLTTSNMLLKPPLEQLNIVLIDFGLSFISALPEDKGVDLYVLEKAFLSTHPNTETVFEAFLKSYSTSSKKARPVLKKLDEVRLRGRKRSMVG

SEQ ID NO: 849 - protein, 267 aa, Homo sapiens
  SITE (248): Xaa equals any of the naturally occurring L-amino acids
  SITE (262): Xaa equals any of the naturally occurring L-amino acids
  SITE (263): Xaa equals any of the naturally occurring L-amino acids
  SITE (264): Xaa equals any of the naturally occurring L-amino acids
ARGEVRYVKEPYIQSRFYRAPEILLGLPFCEKVDVWSLGCVMAELHLGWPLYPGNNEYDQVRYICETQGLPKPHLLHAACKAHHFFKRNPHPDAANPWQLKSSADYLAETKVRPLERRKYMLKSLDQIETVNGGSVASRLTFPDREALAEHADLKSMVELIKRMLTWESHERISPSAALRHPFVSMQQLRSAHETTHYYQLSLRSYRLSLQVEGKPPTPVVAAEDGTPYYCLAEEKEAAGMGSVAGSXPFFREEKAPGMQRXXXPAG

SEQ ID NO: 850 - protein, 399 aa, Homo sapiens
AGPHNWRGQLLQGEGGHIQEVQGYRGHQGGGPAASAPGLRQQVPAARAVHPAGRATPAHRARLRVHRGVQRETVHRDGSGRHRPAASRAAQRAHPRSSGARPLCADRRRRALPARSSPGAPRPQVRKRAAEPGRAPRQAHRLRLRPPGPWLPRPEHHLLRLSRLRVTRGAPGHPLRPQEVRCVEHGRRALRHGHRVHALRRLGHRRPAPAPETRRALPRRPRAVRALQGPDRRAAAVQPVRQALRGPGSAQLLAARRGLRLEAGWFQPFLQPRALGQGGARARGALRGNMRSCRVLLHMRFFPSASLPFFPRGSPQLPLFGIHVPRDPGSWRRMRIRDSLRPGPERARPEGTEALRLRGTLSLCAEGVPSQPAVGARFPVGTCNKLAVPRKKKKKKKTR

SEQ ID NO: 851 - protein, 93 aa, Homo sapiens
YQKAEPALLAIMRKGVLKDPEIADLFYKDDPEELFIGLHEIGHGSFGAVYFATNAHTNEVVAIKKMSYSGKQTHEKWQDILKEVKFLRQLKAS

SEQ ID NO: 852 - protein, 130 aa, Homo sapiens
  SITE (9): Xaa equals any of the naturally occurring L-amino acids
  SITE (121): Xaa equals any of the naturally occurring L-amino acids
  SITE (126): Xaa equals any of the naturally occurring L-amino acids
KRPRGRRRXGMAGPGWGPPRLDGFILTERLGSGTYATVYKAYAKKDTREVVAIKCVAKKSLNKASVENLLTEIEILKGIRHPHIVQLKDFQWDSDNIYLIMEFCAGGDLSRFIHTRRFCLXRWRVXSCSN

SEQ ID NO: 853 - protein, 156 aa, Homo sapiens
QHEEQILDHLNPKTTQLLVAMGFQAENLSVAIKEKLFSYPMATYLVLEQTKQKKRSTIRPQTLPPGDPTCPLYIEVSTFPLSLKRAHSIQQKTVGAKSGQGLCPWESCFRPSSTTWPWPLLCPVCACSHGAQSGPTRRHQNDCPCVYSLAPSPHGG

SEQ ID NO: 854 - protein, 100 aa, Homo sapiens
  SITE (52): Xaa equals any of the naturally occurring L-amino acids
  SITE (95): Xaa equals any of the naturally occurring L-amino acids
ERYPKELNAIMESMLNKNPSLRPSAIEILKIPYLDEQLQNLMCRYSEMTLEXKNLDCQKEAAHIINAMQKRIHLQTLRALSEVQKMTPRERMRLXKLQAG

SEQ ID NO: 855 - protein, 260 aa, Homo sapiens
ELMSFLTNDASSESIASFSKQEVMSSFLPEGGCYELLTVIGKGFEDLMTVNLARYKPTGEYVTVRRINLEACSNEMVTFLQGELHVSKLFNHPNIVPYRATFIADNELWVVTSFMAYGSAKDLICTHFMDGMNELAIAYILQGVLKALDYIHHMGYVHRSVKASHILISVDGKVYLSGLRSNLSMISHGQRQRVVHDFPKYSVKVLPWLSPEVLQQNLQGYDAKSDIYSVGITACELANGHVPFKDMPATQGEDSTVKGI

SEQ ID NO: 856 - protein, 83 aa, Homo sapiens
  SITE (10): Xaa equals any of the naturally occurring L-amino acids
  SITE (14): Xaa equals any of the naturally occurring L-amino acids
  SITE (15): Xaa equals any of the naturally occurring L-amino acids
FFFFFTLLFXIPFXXYFISIVLYIQESFRIKYLVVQTLIFNSFLKNPFFNIRFYFLTRNYNKYKIEVLLLTSSSIANNLTIFL

SEQ ID NO: 857 - protein, 290 aa, Homo sapiens
KLWVFTSFMAYGSAKDLICTHFMDGMNELAIAYILQGVLKALDYIHHMGYVHRSVKASHILISVDGKVYLSGLRSNLSMISHGQRQRVVHDFPKYSVKVLPWLSPEVLQQNLQGYDAKSDIYSVGITACELANGHVPFKDMPATQMLLEKLNGTVPCLLDTSTIPAEELTMSPSRSVANSGLSDSLTTSTPRPSNGDSPSHPYHRTFSPHFHHFVEQCLQRNPDARPSASTLLNHSFFKQIKRRASEALPELLRPVTPITNFEGSQSQDHSGIFGLVTNLEELEVDDWEF

SEQ ID NO: 858 - protein, 246 aa, Homo sapiens
  SITE (228): Xaa equals any of the naturally occurring L-amino acids
PLHRQTPSPLCERTKPQKSLHLLRLAISRGPLAPSSLMSCVKLWPSGAPAPLVSIEELENQELVGKGGFGTVFRAQHRKWGYDVAVKIVNSKAISREVKAMASLDNEFVLRLEGVIEKVNWDQDPKPALVTKFMENGSLSGLLQSQCPRPWPLLCRLLKEVVLGMFYLHDQNPVLLHRDLKPSNVLLDPELHVSWQILACPHFREATVRDRVRGARGHPGLLGPRTVXNVNRKASTASDVLQLRGS

SEQ ID NO: 859 - protein, 113 aa, Homo sapiens
DEFVLRLEGVIEKVNWDQDPKPALVTKFMENGSLSGLLQSQCPRPWPLLCRLLKEVVLGMFYLHDQNPVLLHRDLKPSNVLLDPELHVKVSWSTPLSASRQGPRAALARPAGH

SEQ ID NO: 860 - protein, 103 aa, Homo sapiens
  SITE (13): Xaa equals any of the naturally occurring L-amino acids
  SITE (88): Xaa equals any of the naturally occurring L-amino acids
  SITE (95): Xaa equals any of the naturally occurring L-amino acids
PSWDPKSTALQGXWEHQPGAFSNPNAQPTDFDFLKVIGKGNYGKVLLAKRKSDGAFYAVKVLQKKVHLKEERSRTPSWQNAMLLLKKXRDPFLLXAALLLPKT

SEQ ID NO: 861 - protein, 142 aa, Homo sapiens
  SITE (130): Xaa equals any of the naturally occurring L-amino acids
  SITE (141): Xaa equals any of the naturally occurring L-amino acids
IVKLFEVIETEKTLYLVMEYASAGEVFDYLVSHGRMKEKEARAKFRQIVSAVHYCHQKNIVHRDLKAENLLLDAEANIKIADFGFSNEFTLGSKLDTFCGSPPYAARTVSGQEVPRPEVDIGPGNHLSPXSAVPAFTAQPXD

SEQ ID NO: 862 - protein, 190 aa, Homo sapiens
LDRLSCLDGTPPLSWHMRCKIAQGAANGINFLHENHHIHRDIKSANILLDEAFTAKISDFGLARASEKFAQTVMTSRIVGTTAYMAPEALRGEITPKSDIYSFGVVLLEIITGLPAVDEHREPQLLLDIKEEIEDEEKTIEDYIDKKMNDADSTSVEAMYSVASQCLHEKKNKRPDIKKVQQLLQEMTAS

SEQ ID NO: 863 - protein, 192 aa, Homo sapiens
WIQRIRHEEVVAETDNGVDALQLAREHMPDIVILDIGIPKLDGLEVICRLSSTKQAHPFKVLVLTSQAPGHFSMRCMQAGAAGYVCKQQDLTELLSAVKAVLCGYSYFPNQALNSVRSTMGNASEADMVERLSGREMMVLQQLARGKTNKEIADGMFLSNKTVSTYKTRLLLKLNARSLVDLIELAQRNGLV

SEQ ID NO: 864 - protein, 159 aa, Homo sapiens
  SITE (7): Xaa equals any of the naturally occurring L-amino acids
NYWIFRXAGVGSALQMLEPGLSSPINLSLPEPLTLIHVDGPLFERVLINLLENAVKYAGAQAEIGIDAHVEGENLQLDVWDNGPGLPPGQEQTIFDKFARGNKESAVPGVGLGLAICRAIVDVHGGTITAFNRPEGGACFRVTLPQQTAPELEEFHEDM

SEQ ID NO: 865 - protein, 245 aa, Homo sapiens
GTSPNKEAAAGSSDLDPSMILDTGEIIDTGSDYEDQGDDQLNVFGEDTMGGFMEDLRKCKIIFIIGGPGSGKGTQCEKLVEKYGFTHLSTGELLREELASESERSKLIRDIMERGDLVPSGIVLELLKEAMVASLGDTRGFLIDGYPREVKQGEEFGRRIGDPQLVICMDCSADTMTNRLLQRSRSSLPVDDTTKTIAKRLEAYYRASIPVIAYYETKTQLHKINAEGTPEDVFLQLCTAIDSIF

SEQ ID NO: 866 - protein, 386 aa, Homo sapiens
RKWSLIAKIITTGELAPQETTITEIKQKLMQIPDEEGIVIDGFPRDVAQALSFEDQICTPDLVVFLACANQRLKERLLKRAEQQGRPDDNVKATQRRLMNFKQNAAPLVKYFQEKGLIMTFDADRDEDEVFYDISMAVDNKLFPNKEAAAGSSDLDPSMILDTGEIIDTGSDYEDQGDDQLNVFGEDTMGGFMEDLRKCKIIFIIGGPGSGKGTQCEKLVEKYGFTHLSTGELLREELASESERSKLIRDIMERGDLVPSGIVLELLKEAMVASLGDTRGFLIDGYPREVKQGEEFGRRIGDPQLVICMDCSADTMTNRLLQRSRSSLPVDDTTKTIAKRLEAYYRASIPVIAYYETKTQLHKINAEGTPEDVFLQLCTAIDSIIF

SEQ ID NO: 867 - protein, 116 aa, Homo sapiens
  SITE (47): Xaa equals any of the naturally occurring L-amino acids
RYSAGTGPEFPGRPTRPPTRPDPRVRYNIEFNPPKTVGIDDLTGEPXIQREDDKPETVIKRLKAYEDQTKPVLEYYQKKGVLETFSGTETNKIWPYVYAFLQTKVPQRSQKASVTP

SEQ ID NO: 868 - protein, 113 aa, Homo sapiens
IQPTVSPRVFFLNVPFDSIMERLTLRRIDPVTGERYHLMYKPPPTMEIQARLLQNPKDAEEQVKLKMDLFYRNSADLEQLYGSAITLNGDQDPYTVFEYIESGIINPLPKKIP

SEQ ID NO: 869 - protein, 116 aa, Homo sapiens
  SITE (30): Xaa equals any of the naturally occurring L-amino acids
LMDFQENVAQALSFEDQICTPDLVVFLACXNQRLKERLLKRAEQQGRPDDNVKATQRRLMNFKQNAAPLVKYFQEKGLIMTFDADRDEDEVFYDISMAVDNKLFPNKEAAAGSSGP

SEQ ID NO: 870 - protein, 236 aa, Homo sapiens
  SITE (228): Xaa equals any of the naturally occurring L-amino acids
  SITE (234): Xaa equals any of the naturally occurring L-amino acids
QALRIQTLGITPRHVIVLSAPDTVLIERNLGKRIDPQTGEIYHTTFDWPPESEIQNRLMVPEDISELETAQKLLEYHRNIVRVIPSYPKILKVISADQPCVDVFYQALTYVQSNHRTNAPFTPRVLLLGPVGSGKSLQAALLAQKYRLVNVCCGQLLKEAVADRTTFGELIQPFFEKEMAVPDSLLMKVLSQRLDQQDCIQKGWVLHGVPRDLDQAHLLNRLGYNSQXGGFPEXAI

SEQ ID NO: 871 - protein, 96 aa, Homo sapiens
FFFFFFLAVGDGISLCNQAVLQWRNLSSLQPLPPGFKQSSCLGLLSSWDDRHTLPHSANFCIFSTDGVSPCWLGWSQFPDTVIHLLWPPKGLGLLV

SEQ ID NO: 872 - protein, 96 aa, Homo sapiens
  SITE (60): Xaa equals any of the naturally occurring L-amino acids
  SITE (71): Xaa equals any of the naturally occurring L-amino acids
PLCVNPFNWKKRETVPVIANFHSPQARYVAFTTHRFCHFWGIIFHQDPGTRHPHTSPGTXPFSQTWKRHLXLTNVEPLPHLDTSATILSIFQATPA

SEQ ID NO: 873 - protein, 186 aa, Homo sapiens
  SITE (4): Xaa equals any of the naturally occurring L-amino acids
  SITE (7): Xaa equals any of the naturally occurring L-amino acids
  SITE (166): Xaa equals any of the naturally occurring L-amino acids
  SITE (168): Xaa equals any of the naturally occurring L-amino acids
FSRXFQXLVAHGQPSQGQQGAVWARGGAQLGLQLPGIGPECQSLTIEASTGEALCPPQLRQHEEVLQVRGMAQLRHCLQVTQKLLKGPATAGNGLCSKIPAQPLTGEGDGSHWAPELPLQVSVQPLKVRVTARDLGWLAIWRSWADHGEGVELQGGWVSGQMQVVXGXVPSPSFPIPHTPSCTSPP

SEQ ID NO: 874 - protein, 94 aa, Homo sapiens
SLEKTAINKDRGKTSASILKVQAARSHLPMARYCHHLGRSGREGRAVSTRTHALLFQKTRRKVLTTTQLEYSVHQKNVNTPLRNWAGLHIAAST

SEQ ID NO: 875 - protein, 151 aa, Homo sapiens
  SITE (117): Xaa equals any of the naturally occurring L-amino acids
  SITE (127): Xaa equals any of the naturally occurring L-amino acids
IYFFFFLSSFRFTAKLSKSYREFPYIPFLTHAQPPSLSTAPTRVVHLSQMRNLHGHIIITRSPQFMCGFTLGAVHSMGVDKCMACIYYYSSKQTNFTALKIPYAPLIHLFLPKNPWXPLILLFSPKXCLFQNVVSLESYTLQPFRSASLTY

SEQ ID NO: 876 - protein, 61 aa, Homo sapiens
  SITE (57): Xaa equals any of the naturally occurring L-amino acids
ALLKNVNVMNDRLCKTKDLVPRRYKFLGTQGHESATDFQRGQLNNYIVYVRTRGRTXWVDP

SEQ ID NO: 877 - protein, 963 aa, Homo sapiens
EHASWHGGRIMSIKWARFHEVPHITVRFIGPKHGEEKEKEKDKIKEKEKDSKDKEKDKKTVNGHTFSSIPVVGPISCSQCMKPFTNKDAYTCANCSAFVHKGCRESLASCAKVKMKQPKGSLQAHDTSSLPTVIMRNKPSQPKERPRSAVLLVDETATTPIFANRRSQQSVSLSKSVSIQNITGVGNDENMSNTWNFLFHSTDSLNKISRVNESTESLTDEGTDMNEGQLLGDFEIEPKQLEAESWSRIIDSKFLKQQKKDVVKRQEVIYELMQTEFHHARTLKIMSGVYSQGMMADLLFEQQMVEKLFPCLDELISIHSQFFQRILERKKESLVDKSEKNFLIKRIGDVLVNQFSGENAERLKKTYGKFCGQHNQSVNYFKDLYAKDKRFQAFVKKKMSSSVVRRLGIPECILLVTQRITKYPVLFQRILQCTKDNEVEQEDLAQSLSLVKDVIGAVDSKVASYEKKVRLNEIYTKTDSKSIMRMKSGQMFAKEDLKRKKLVRDGSVFLKNAAGRLKEVQAVLLTDILVFLQEKDQKYIFASLDQKSTVISLKKLIVREVAHEEKGLFLISMGMTDPEMVEVHASSKEERNSWIQIIQDTINTLNRDEDEGIPSENEEEKKMLDTRARELKEQLHQKDQKILLLLEEKEMIFRDMAECSTPLPEDCSPTHSPRVLFRSNTEEALKGGPLMKSAINEVEILQGLVSGNLGGTLGPTVSSPIEQDVVSPVSLPRRAETFGGFDSHQMNASKGGEKEEGDDGQDLRRTESDSGLKKGGNANLVFMLKRNSEQVVQSVVHLYELLSALQGVVLQQDSYIEDQKLVLSERALTRSLSRPSSLIEQEKQRSLEKQRQDLANLQKQQAQYLEEKRRREREWKLVRGSCGSGRPSWPSARRRCSRGSRTWKRSGRSSSRRRAHTSMTWSDCVLPRNSLRGNRSSCAGRQSGSASGRQNGTCVRFPIHIPS

SEQ ID NO: 878 - protein, 555 aa, Homo sapiens
VIVARPEAAGSPPEEGGCTEGTPAKDHRAGRGHQVHKSWPLSISDSDSGLDPGPGAGDFKKFERTSSSGTMSSTEELVDPDGGAGASAFEQADLNGMTPELPVAVPSGPFRHEGLSKAARTHRLRKLRTPAKCRECNSYVYFQGAECEECCLACHKKCLETLAIQCGHKKLQGRLQLFGQDFSHAARSAPDGVPFIVKKCVCEIERRALRTKGIYRVNGVKTRVEKLCQAFENGKELVELSQASPHDISNVLKLYLRQLPEPLISFRLYHELVGLAKDSLKAEAEAKAASRGRQDGSESEAVAVALAGRLRELLRDLPPENRASLQYLLRHLRRIVEVEQDNKMTPGNLGIVFGPTLLRPRPTEATVSLSSLVDYPHQARVIETLIVHYGLVFEEEPEETPGGQDESSNQRAEVVVQVPYLEAGEAVVYPLQEAAADGCRESRVVSNDSDSDLEEASELLSSSEASALGHLSFLEQQQSEASLEVASGSHSGSEEQLEATAREDGDGDEDGPAQQLSGFNTNQSNNVLQAPLPPMRLRGGRMTLGSCRERQPEFV

SEQ ID NO: 879 - protein, 127 aa, Homo sapiens
YLTQIKCFVNSCSTLFFIINDKKITCTCSVQMKYFFKIYFFEMKFLLPRLECSGMISAHCNLRLLVQVILLPLSLSSWDYRHVPPCLANLFCIFVEIRFHHVGQAGLKLLTSGDLLISVPQSSGIKA

SEQ ID NO: 880 - protein, 82 aa, Homo sapiens
  SITE (78): Xaa equals any of the naturally occurring L-amino acids
  SITE (80): Xaa equals any of the naturally occurring L-amino acids
SRGTTVERQSLILIELIFKCVRYFRYYWIFSLFKIFRPGLVTYACNPNTLGGQGRWIARAQFRPATWGFEVGGSLDPXKXGF

SEQ ID NO: 881 - protein, 96 aa, Homo sapiens
  SITE (49): Xaa equals any of the naturally occurring L-amino acids
YVRRSPSDDSFRLTIKVRQLSEGFRDEQWISALAAPLLGDLLREVVWPXDVSTLDVDAMVVRETTHRFSRLSFHRAMVGRRLPLLKTASGLTWLAF

SEQ ID NO: 882 - protein, 120 aa, Homo sapiens
SNLGDKSEIVSKKKKGKKEKKSVGRIKGKEGKRPHRPRKKWSCHGSNGFLLSSPSSYLIVLYNYLSLPALSFLTSFFVLATMILKTQQEKNLSLSILILHSIIYSVVGAHKQSQKKLQNC

SEQ ID NO: 883 - protein, 821 aa, Homo sapiens
VLLPAASELAHVKQLACSIVDQKFPECGFYGLYDKILLFKHDPTSANLLQLVRSSGDIQEGDLVEVVLSASATFEDFQIRPHALTVHSYRAPAFCDHCGEMLFGLVRQGLKCDGCGLNYHKRCAFSIPNNCSGARKRRLSSTSLASGHSVRLGTSESLPCTAEELSRSTTELLPRRPPSSSSSSSASSYTGRPIELDKMLLSKVKVPHTFLIHSYTRPTVCQACKKLLKGLFRQGLQCKDCKFNCHKRCATRVPNDCLGEALINGDVPMEEATDFSEADKSALMDESEDSGVIPGSHSENALHASEEEEGEGGKAQSSLGYIPLMRVVQSVRHTTRKSSTTLREGWVVHYSNKDTLRKRHYWRLDCKCITLFQNNTTNRYYKEIPLSEILTVESAQNFSLVPPGTNPHCFEIVTANATYFVGEMPGGTPGGPSGQGAEAARGWETAIRQALMPVILQDAPSAPGHAPHRQASLSISVSNSQIQENVDIATVYQIFPDEVLGSGQFGVVYGGKHRKTGRDVAVKVIDKLRFPTKQESQLRNEVAILQSLRDPGIVNLECMFETPEKVFVVMEKLHGDMLEMILSSEKGRLPERLTKFLITQILVALRHLHFKNIVHCDLKPENVLLASADPFPQVKLCDFGFARIIGEKSFRRSVVGTPAYLAPEVLLNQGYNRSLDMWSVGVIMYVSLSGTFPFNEDEDINDQIQNAAFMYPASPWSHISAGAIDLINNLLQVKMRKRYSVDKSLSHPWLQEYQTWLDLRELEGKMGERYITHESDDARWEQFAAEHPLPGSGLPTDRDLGGACPPQDHDMQGLAERISVL

SEQ ID NO: 884 - protein, 78 aa, Homo sapiens [sequence omitted]

SEQ ID NO: 885 - protein, 68 aa, Homo sapiens
FCQHAPVQPYQLFTSSICSDCQHLSHAACHISGVSLCVDELSFRTLGEKSEWVIVPISTENAEVEQLA

SEQ ID NO: 886 - protein, 141 aa, Homo sapiens
KKILTLTCCYLKCLYYVDTSPSLWDVEFAKQLATVNEQPLQNGFEELIQWTKEGKLWEFPINNEAGFDDDGSEFHEHIFLEKHLESFPKQGPIRHFMELVTCGLSKNPYLSVKQKVEHIEWFRNYFNEKKDILKESNIQFN

SEQ ID NO: 887 - protein, 153 aa, Homo sapiens
TVQRGNAYLVNLTLTGHVWLVATTLDSSHLNVSPAEAGTLVSLIPHSSSGSRPTCAGVPGLNEPPDDGVTLVTGLLDALALLLVKAVLKEHSDVWLILIGVLQLLELQPEVDESHHGILLLLRLLGQLQNHLLALLDRLPQLLDVRGQEQTHR

SEQ ID NO: 888 - protein, 123 aa, Homo sapiens
GIDELKKQNSLQTPFLSFLFSFLFFLFLRQNLTPSPRLKCNGTILAHCNLRFPGSGDSPASACRVAGTTGAHHHAWLIFEFLVESGFHYVGQAGLERLTSSDPSASAFQSSGITGVSHRARPE

SEQ ID NO: 889 - protein, 123 aa, Homo sapiens
NSDRLFAPKMVGQRWDSNYKHSRSKKEKIEGEMELPVLVNFIIQPGKNILCDLRVHTCGLRALPFRSSFLFHERWHMFVAEQFHQPVSCLWYFGSLRVFFEILFKILSSLSPFQFKLAVFLFM

SEQ ID NO: 890 - protein, 65 aa, Homo sapiens
QSHGATGTHICWLGNKMVQTLGAIVWQFLITLNIYLQYDPEILFLHTYIRAMKTYTHKKFIQECS

SEQ ID NO: 891 - protein, 124 aa, Homo sapiens
  SITE (3): Xaa equals any of the naturally occurring L-amino acids
  SITE (123): Xaa equals any of the naturally occurring L-amino acids
GLXSWASSVRSRNLRIHQSQSDNYNFRMSASYLPALFILIFFPVICNIHNFKAHPYKPPTSCTFIMRNHKHTMSTSLPVASFSVLAFFSSSHFKGESSAVALRRTSTQRVKGVGSRPAKEKNXS

SEQ ID NO: 892 - protein, 210 aa, Homo sapiens
GQRGLPGTRGGCCAARPIPSTRGLGGEVGSGSGCEVAVRSQALRCSSGLCRWGLIVEHVVVVDVHEDGYWLSDDERQPHSCVAIVALEKAAHEPGQWDLSHHARERPEAEHSQRDAHQVLVEEGRGQEHPCPGHPLAAAPSKHGLVEVSDAPLVHRDVPVLPEVGDRLGVPPVPVELPVSKLHELSHGIQAGVEEPVEEDEPDEVIGDLV

SEQ ID NO: 893 - protein, 183 aa, Homo sapiens
RQGVFIVLIQPCHTWWQTVPSVPTFTSLHLPVILPPSPSRARCGVHKSANSRWEASTGAPFPGWSLTLKGNSLQGPLNSWDNYQEGDEKESGTGLLKCLLMFWIVSAPPSFSHYFGSGEINTQWGHAGFTLNLAVEDLASTHVATQQKLQMGQLQKARGRAQLYLCRVIVQKAVQRPRWLIIF

SEQ ID NO: 894 - protein, 427 aa, Homo sapiens
  SITE (78): Xaa equals any of the naturally occurring L-amino acids
DVTGLAEALTPLLPPWLCRSRLSVTLMPVQLSEHPEWNESMHSLRISVGGLPVLASMTKAADPRFRPRWKVILTFFVXAAILWLLCSHRPAPGRPPTHNAHNWRLGQAPANWYNDTYPLSPPQRTPAGIRYRIAVIADLDTESRAQEENTWFSYLKKGYLTLSDSGDKVAVEWDKDHGVLESHLAEKGRGMELSDLIVFNGKLYSVDDRTGVVYQIEGSKAVPWVILSDGDGTVEKGFKAEWLAVKDERLYVGGLGKEWTTTTGDVVNENPEWVKVVGYKGSVDHENWVSNYNALRAAAGIQPPGYLIHESACWSDTLQRWFFLPRRASQERYSEKDDERKGANLLLSASPDFGDIAVSHVGAVVPTHGFSSFKFIPNTDDQIIVALKSEEDSGRVASYIMAFTLDGRFLLPETKIGSVKYEGIEFI

SEQ ID NO: 895 - protein, 108 aa, Homo sapiens
  SITE (88): Xaa equals any of the naturally occurring L-amino acids
LALVRKEIFCCYKTPFLTKRYFEPTKSFFKLSDSSIVNQIRLVIAIFKCKSCSTRKETCLQFKTMTVSTHDLVYYYTRKRGFCKHCRXVSYSFFYRNVIPMVHFLFNK

SEQ ID NO: 896 - protein, 383 aa, Homo sapiens
ERPRIMDLAGLLKSQFLCHLVFCYVFIASGLIINTIQLFTLLLWPINKQLFRKINCRLSYCISSQLVMLLEWWSGTECTIFTDPRAYLKYGKENAIVVLNHKFEIDFLCGWSLSERFGLLGGSKVLAKKELAYVPIIGWMWYFTEMVFCSRKWEQDRKTVATSLQHLRDYPEKYFFLIHCEGTRFTEKKHEISMQVARAKGLPRLKHHLLPRTKGFAITVRSLRNVVSAVYDCTLNFRNNENPTLLGVLNGKKYHADLYVRRIPLEDIPEDDDECSAWLHKLYQEKDAFQEEYYRTGTFPETPMVPPRRPWTLVNWLFWASLVLYPFFQFLVSMIRSGSSLTLASFILVFFVASVGVRWMIGVTEIDKGSAYGNSDSKQKLND

SEQ ID NO: 897 - protein, 78 aa, Homo sapiens
ISGFLSTLFQQFTLHPYQRSLLKKSFALVFQRSPFPQQTLFKEKFHVFLVVFYYTWHRCYYFQKNPTGYLRTNPLAWG

SEQ ID NO: 898 - protein, 291 aa, Homo sapiens
SRSLDSPTSSPGAGTRQLVKASSTGTESSDDFEERDPDLGDGLENGLGSPFGKWTLSSAAQTHQLRRLRGPAKCRECEAFMVSGTECEECFLTCHKRCLETLLILCGHRRLPARTPLFGVDFLQLPRDFPEEVPFVVTKCTAEIEHRALDVQGIYRVSGSRVRVERLCQAFENGRALVELSGNSPHDVSSVLKRFLQELTEPVIPFHLYDAFISLAKTLHADPGDDPGTPSPSPEVIRSLKTLLVQLPDSNYNTLRHLVAHLFRVAARFMENKMSANNLGIVFGPTLLRPL

SEQ ID NO: 899 - protein, 475 aa, Homo sapiens
RCGRPLIAGAGICDRHAVEFVASNARSCVQWLIDQGVLFDTHIQPNGEESYHLTREGGHSHRRILHAADATGREVETTLVSKALNHPNIRVLERSNAVDLIVSDKIGLPGTRRVVGAWVWNRNKETVETCHAKAVVLATGGASKVYQYTTNPDISSGDGIAMAWRAGCRVANLEFNQFHPTALYHPQARNFLLTEALRGEGAYLKRPDGTRFMPDFDERGELAPRDIVARAIDHEMKRLGADCMFLDISHKPADFIRQHFPMIYEKLLGLGIDLTQEPVPIVPAAHYTCGGVMVDDHGRTDVEGLYAIGEVSYTGLHGANRMASNSLLECLVYGWSAAEDITRRMPYAHDISTLPPWDESRVENPDERVVIQHNWHELRLFMWDYVGIVRTTKRLERALRRITMLQQEIDEYYAHFRVSNNLLELRNLVQVAELIVRCAMMRKESRGLHFTLDYPELLTHSGPSILSPGNHYINR

SEQ ID NO: 900 - protein, 420 aa, Homo sapiens
WIPRSAGIRHEVVRRKFKHTFGEDLVVCQIGMSSYEFPPALKPPEDLVVLGKDASGQPIFNASAKHWTNFVITENANDAIGILNNSASFNKMSIEYKYEMMPNRTWRCRVFLQDHCLAEGYGTKKTSKHAAADEALKILQKTQPTYPSVKSSQCHTGSSPRGSGKKKDIKDLVVYENSSNPVCTLNDTAQFNRMTVEYVYERMTGLRWKCKVILESEVIAEAVGVKKTVKYEAAGEAVKTLKKTQPTVINNLKKGAVEDVISRNEIQGRSAEEAYKQQIKEDNIGNQLLRKMGWTGGGLGKSGEGIREPISVKEQHKREGLGLDVERVNKIAKRDIEQIIRNYARSESHTDLTFSRELTNDERKQIHQIAQKYGLKSKSHGVGHDRYLVVGRKRRKEDLLDQLKQEGQVGHYELVMPQAN

SEQ ID NO: 901 - protein, 97 aa, Homo sapiens [sequence omitted]

SEQ ID NO: 902 - protein, 87 aa, Homo sapiens
QPRDLHGNISCSLFSPGSAFLLDFDGCGFLAPSHGALPPVVRAPADLHSVLRSAIFNQAMWPSRAARGWTCSQPSTQNENCFPACSW

SEQ ID NO: 903 - protein, 149 aa, Homo sapiens
  SITE (108): Xaa equals any of the naturally occurring L-amino acids
  SITE (111): Xaa equals any of the naturally occurring L-amino acids
  SITE (122): Xaa equals any of the naturally occurring L-amino acids
  SITE (123): Xaa equals any of the naturally occurring L-amino acids
GHKFKARFFCSSVSFSSEAEIKTFIATSDCQKHGRFPGTERSLSVPYLPQPYALTHTLHSHCHTHTVIPTCSHSATHSLAPWHALEHMLTHTHTRVNTHARARNATRXPLXNRLWSPVLPVXXKPSSPLPSAAASPPQQLLALLSEHLF

SEQ ID NO: 904 - protein, 50 aa, Homo sapiens
HHGIKMVTLLFPTSRSCEVFMLNKEDHQNLMDDINGKKKEQGATDGILLH

SEQ ID NO: 905 - protein, 66 aa, Homo sapiens
MKTITYIYLFFSEKFYKLHLKFCNLNHILTFVKSQDIGRNEKHIELIFKDACCKDGEFLFLSSCKE

SEQ ID NO: 906 - protein, 132 aa, Homo sapiens
GRRWGAWLGHQANASYVPLETFLCSCVCYYPEGVGGRLSRVSSVHKLVTSDPGTWTSHDRSGSVSVGITGKENVHSNGKEGRRVFFFFFAVGTILHLEPRLKCASHRWKVHTLLSPPHSATFTWLFHWYLGI

SEQ ID NO: 907 - protein, 173 aa, Homo sapiens
  SITE (172): Xaa equals any of the naturally occurring L-amino acids
LILSKEYQHDLTKERMPLSWVNVPPPNLTLGTSILFPPRVLLGLFFLTKRRFPRLSSGIRVLQVFHGHPLSRSIVSWPKMMYSFWFPLTPPNPMAIQGEAFTFQCLHCLLHAFVLNVVYRTFQGLLSDFYPESLNRIFKTFHMLKNLQPGGSTSSRAAATAVELQLLFPLVXG

SEQ ID NO: 908 - protein, 92 aa, Homo sapiens
  SITE (26): Xaa equals any of the naturally occurring L-amino acids
  SITE (48): Xaa equals any of the naturally occurring L-amino acids
  SITE (65): Xaa equals any of the naturally occurring L-amino acids
FFFFFFPKFFPQVKKEMGGFFRSQWXGGLGAWVPLKNSLERISPGVVXAPLGALGPWFGLSNFGXVDFSRFLYKTPSMTVQKLVFNNYYKVI

SEQ ID NO: 909 - protein, 310 aa, Homo sapiens
  SITE (305): Xaa equals any of the naturally occurring L-amino acids
GCSCEVCGFSCHITCVNKAPTTCPVPPEQTKGPLGIDPQKGIGTAYEGHVRIPKPAGVKKGWQRALAIVCDFKLFLYDIAEGKASQPSVVISQVIDMRDEEFSVSSVLASDVIHASRKDIPCIFRVTASQLSASNNKCSILMLADTENEKNKWVGVLSELHKILKKNKFRDRSVYVPKEAYDSTLPLIKTTQAAAIIDHERIALGNEEGLFVVHVTKDEIIRVGDNKKIHQIELIPNDQLVAVISGRNRHVRLFPMSALDGRETDFYKLSETKGCQTITSGKVRHGALTCLCVAMKRQVLCYELXQSKTR

SEQ ID NO: 910 - protein, 517 aa, Homo sapiens
  SITE (198): Xaa equals any of the naturally occurring L-amino acids
  SITE (259): Xaa equals any of the naturally occurring L-amino acids
KACWQSNQGAVLQDNFGQLEENFLSSSCQSGYEEEAAGLTVDTESRELDSEFEDLASDVRAQNEFKDEAQSLSHSPKRVPTTLSIKPLGAISPVLNRKLAVGSHPLPPKIQSKDGNKPPPLKTSEITDPAQVSKPTQGSAFKPPVPPRPQAKVPLPSADAPNQAEPDVLVEKPEKVVPPPLVDKSAEKQAKNVDAIDXAAAPKQFLAKQEVAKDVTSETSCPTKDSSDDRQTWESSEILYRNKLGKWTRTRASCLFDIXACHRYLNIALWCRDPFKLGGLICLGHVSLKLEDVALGCLATSNTEYLSKLRLEAPSPKAIVTRTALRNLSMQKGFNDKFCYGDITIHFKYLKEGESDHHVVTNVEKEKEPHLVEEVSVLPKEEQFVGQMGLTENKHSFQDTQFQNPTWCDYCKKKVWTKAASQCMFCAYVCHKKCQEKCLAETSVCGATDRRIDRTLKNLRLEGQETLLGLPPRVDAEASKSVNKTTGLTRHIINTSSRLLNLRQVSKTRLSEQEPIS

SEQ ID NO: 911 - protein, 125 aa, Homo sapiens [sequence omitted]

SEQ ID NO: 912 - protein, 420 aa, Homo sapiens
  SITE (239): Xaa equals any of the naturally occurring L-amino acids
FGMRHAANMAPVEHVVADAGAFLRHAALQDIGKNIYTIREVVTEIRDKATRRRLAVLPYELRFKEPLPEYVRLVTEFSKKTGDYPSLSATDIQVLALTYQLEAEFVGVSHLKQEPQKVKVSSSIQHPETPLHISGFHLPYKPKPPQETEKGHSACEPENLEFSSFMFWRNPLPNIDHELQELLIDRGEDVPSEEEEEEENGFEDRKDDSDDDGGGWITPSNIKQIQQELEQCDVPEDVXVGCLTTDFAMQNVLLQMGLHVLAVNGMLIREARSYILRCHGCFKTTSDMSRVFCSHCGNKTLKKVSVTVSDDGTLHMHFSRNPKVLNPRGLRYSLPTPKGGKYAINPHLTEDQRFPQLRLSQKARQKTNVFAPDYIAGVSPFVENDISSRSATLQVRDSTLGAGRRRLNPNASRKKFVKKR

SEQ ID NO: 913 - protein, 157 aa, Homo sapiens [sequence omitted]

SEQ ID NO: 914 - protein, 83 aa, Homo sapiens
IEFCSLVAGNLVFSLWLTADLFVILFVPFHVECASAVPGGLLIAVSLGLLSASQDFILWACVRATWNTLLQLFLQVLANFIFC

SEQ ID NO: 915 - protein, 381 aa, Homo sapiens
ARARGSGSAAETMPEIRVTPLGAGQDVGRSCILVSIAGKNVMLDCGMHMGFNDDRRFPDFSYITQNGRLTDFLDCVIISHFHLDHCGALPYFSEMVGYDGPIYMTHPTQAICPILLEDYRKIAVDKKGEANFFTSQMIKDCMKKVVAVHLHQTVQVDDELEIKAYYAGHVLGAAMFQIKVGSESVVYTGDYNMTPDRHLGAAWIDKCRPNLLITESTYATTIRDSKRCRERDFLKKVHETVERGGKVLIPVFALGRAQELCILLETFWERMNLKVPIYFSTGLTEKANHYYKLFIPWTNQKIRKTFVQRNMFEFKHIKAFDRAFADNPGPMVVFATPGMLHAGQSLQIFRKWAGNEKNMVIMPGYCVQGTVGHKILSGQRK

SEQ ID NO: 916 - protein, 86 aa, Homo sapiens
VHRCGTHIYRQPTACLNKFHLFLNFWSIIMYMSSDTSFFHSTLLLTFTYIVTHSCRTTLCPCFRCVSCKQHMIGVCFNIQYFLGLV

SEQ ID NO: 917 - protein, 67 aa, Homo sapiens
  SITE (5): Xaa equals any of the naturally occurring L-amino acids
PTPLXPPSPPPTASDRGLATPSPSPCPVPRPLAALKPVRLHSFQEHVFKRASPCELCHQLIVGNSKQ

SEQ ID NO: 918 - protein, 57 aa, Homo sapiens
ILKYVYVHVFIIRSFFSLCVYKSALLMNAFLLFTSKGSLSPAWQLNKPIALYMQKKK

SEQ ID NO: 919 - protein, 155 aa, Homo sapiens
GRPTRPVKISNVALDSMHWQNDSVQIIASVSDLKSMDEFLLKKVNDLDNEDSKKDTLVDVVFKKALKEFRQNIFSFYSSALAMDDGKSIRYKDLYALFEQILEKTMRLEQRDSLGESPVRVWVNTFKVFLDEYMNEFKTSDCTATKVPKTEKKKK

SEQ ID NO: 920 - protein, 200 aa, Homo sapiens
TLSPESLGHCHLSAAGLPQAAWSASHSCKHRFSSWGQPQDLWLCPSPATNPPTECGFCHPGQKLKASFTFLLREGDLTPFPALAPGVLRRLVPDGRYGVFVLSPRGWSHLVPLKDRFLAVKGWHFPAVFCAFSFLAERELSMTCHPPDTSGQGPFSLQPGECFLQAAEGPGGAEALCCTPSPQLGHLTGAVPGPPGEQRT

SEQ ID NO: 921 - protein, 88 aa, Homo sapiens
EYLQCQQILNSSNPIICQVPPVVPGQKEAVRVSKKKTLFSRKYRKPAVSQYPWMLVNASSLSPSDVVSYSRTEKGMLASLGHHFLTRG

SEQ ID NO: 922 - protein, 123 aa, Homo sapiens
  SITE (1): Xaa equals any of the naturally occurring L-amino acids
  SITE (16): Xaa equals any of the naturally occurring L-amino acids
XPPVCWNSALRLREDXRRGVNDLPRALEQIHYILKPDGVFIGAMFGGDTLYELRCSLQLAETEREGGFSPHISPFTAVNDLGHLLGRAGFNTLTVDTDEIQVNYPGMFELMEDLQEQKSRMLT

SEQ ID NO: 923 - protein, 212 aa, Homo sapiens
NILKRTAQGSEDEDMATKAFNALKELVQECNASVQSMKRTEELIHLSKKIHFEGKIFPLISQARWLVRHGELVELAPLPAAPPAKLKLSSKAVYLHLFNDCLLLSRRKELGKFAVFVHAKMAELQVRDLSLKLQGIPGHVFLLQLLHGQHMKHQFLLRARTESEKQRWISALCPSSPQEDKEVISEGEDFPQVQCVRTYKALHPDGADLGED

SEQ ID NO: 924 - protein, 111 aa, Homo sapiens
  SITE (14): Xaa equals any of the naturally occurring L-amino acids
GVGGGAPPAVPGPXQGDLQSRGHGGIWLYQFRLIVIGDSTVGKSCLIRRFTEGRFAQVSDPTVGVGFFLPLGGDRARKTHQAPDLGIPRVKRGSDPFIRANYREFSRWVFS

SEQ ID NO: 925 - protein, 123 aa, Homo sapiens
  SITE (31): Xaa equals any of the naturally occurring L-amino acids
  SITE (89): Xaa equals any of the naturally occurring L-amino acids
WWDLIMLVKPQQQRESKESMEKLSSAKLVPXAADLKEYPEDVAPTVGFSKINLRQGKFEVTIFDLGGGIRIRGIWKNYYAESYGVIFVXDSSDEERMEETKEAMSEMLRHPRISGKPILVLGK

SEQ ID NO: 926 - protein, 166 aa, Homo sapiens
  SITE (128): Xaa equals any of the naturally occurring L-amino acids
  SITE (165): Xaa equals any of the naturally occurring L-amino acids
CTDCCRGCRFSQLLETALLITRHPSHVGIEKKAEGPSHQISIPETDTSASIPVASSCALRTNLKNQLVCKYLNHIMGLLDRLSVLLGLKKKEVHVLCLGLDNSGKTTIINKLKPSNAQSQNILPTIGXSIENSNHPVCHLQCLTVRSRKIQNLWDTIIRRQLLFXA

SEQ ID NO: 927 - protein, 241 aa, Homo sapiens
  SITE (198): Xaa equals any of the naturally occurring L-amino acids
  SITE (200): Xaa equals any of the naturally occurring L-amino acids
  SITE (207): Xaa equals any of the naturally occurring L-amino acids
  SITE (218): Xaa equals any of the naturally occurring L-amino acids
  SITE (231): Xaa equals any of the naturally occurring L-amino acids
FRCCWLFQELLARSQRRCFFFSGFGAVPDALGCRMSDLRITEAFLYMDYLCFRALCCKGPPPARPEYDLVCIGLTGSGKTSLLSKLCSESPDNVVSTTGFSIKAVPFQNAILNVKELGGADNIRKYWSRYYQGSQGVIFVLDSASSEDDLEAARNELHSALQHPQLCTLPFLILANHQDKPAACSVQEVWLISMTTLXLXCLDFCLXRWNLEKMHVIXNGAGYAAFQHETXVFIGKQKSLY

SEQ ID NO: 928 - protein, 150 aa, Homo sapiens
  SITE (11): Xaa equals any of the naturally occurring L-amino acids
  SITE (106): Xaa equals any of the naturally occurring L-amino acids
  SITE (107): Xaa equals any of the naturally occurring L-amino acids
  SITE (111): Xaa equals any of the naturally occurring L-amino acids
  SITE (120): Xaa equals any of the naturally occurring L-amino acids
  SITE (124): Xaa equals any of the naturally occurring L-amino acids
  SITE (131): Xaa equals any of the naturally occurring L-amino acids
ARGGKSGPRGXCVIPRDDPLVLYVYAAPQDMRAHTSIPLLGYQVTVGPQGDPRVFQLQQSGQLYTFKAETEELKGRWVKAMERAAVAGAPAGPTMGTCPTEPLPAXXLPTXPHPEPSSCXRLTXGLSDPLXQWCFQSFICFPGWSAKTWL

SEQ ID NO: 929 - protein, 363 aa, Homo sapiens
  SITE (108): Xaa equals any of the naturally occurring L-amino acids
  SITE (195): Xaa equals any of the naturally occurring L-amino acids
  SITE (308): Xaa equals any of the naturally occurring L-amino acids
  SITE (317): Xaa equals any of the naturally occurring L-amino acids
  SITE (320): Xaa equals any of the naturally occurring L-amino acids
  SITE (335): Xaa equals any of the naturally occurring L-amino acids
  SITE (346): Xaa equals any of the naturally occurring L-amino acids
GRGSLATRGLLYAQVFCTRLTDAGIPPEVIMGIFSNISSIHRFHGQFLLPELKTRITEEWDTNPRLGDILQKLAPFLKMYGEYVKNFDRAVGLVSTWTQRSPLFKDVXHSIQKQEVCGNLTLQHHMLEPVQRVPRYELLLKDYLKRLPQDAPDRKDAERSLELISTAANHSNAAIRKVEKMHKLLEVYEQLGGEXDIVNPANELIKEGQIQKLSAKNGTPQDRHLFLFNSMILYCVPKLRLMGQKFSVREKMDISGLQVQDIVKPNTAHTFIITGRKRSLELQTRSSRPPSRSTNRTAKPSRLLVAPXARMRDPSLXPDXALFTEAPALWEPVGXPPKAVSGAAGXGAQKIFLLRPDVTRRAE

SEQ ID NO: 930 - protein, 117 aa, Homo sapiens
KIGLTKKQKSKMNDVKLAVLGGEGTGKSALTVRFLTKRFIGEYASNFESIYKKHLCLERKQLNLEIYDPCSQTQKAKFSLTSELHWADGFVIVYDISDRSSFAFAKALIYRIRGATN

SEQ ID NO: 931 - protein, 74 aa, Homo sapiens
  SITE (17): Xaa equals any of the naturally occurring L-amino acids
GVEGVVWHRRHVGPEPXPPLRPWLSCPSPQPDSVKYLECSALTQRGLKTVFDEAIRAVLCPQPTRQQKRACSLL

SEQ ID NO: 932 - protein, 97 aa, Homo sapiens
  SITE (95): Xaa equals any of the naturally occurring L-amino acids
AVPASHHLAGSSCLQEYGLPFMETSAKTGLNVDLAFTAIAKELKQRSMKAPSEPRFRLHDYVKREGRGASCCRPLNLAELSPLEEAAQSLERLDXGF

SEQ ID NO: 933 - protein, 97 aa, Homo sapiens
  SITE (4): Xaa equals any of the naturally occurring L-amino acids
  SITE (6): Xaa equals any of the naturally occurring L-amino acids
  SITE (92): Xaa equals any of the naturally occurring L-amino acids
REGXQXQHQGLSFPPKTPADLARSPTESSQKNGGGKTSKCQINTAYCYTLLSLPCCILRRSKYVIYQPQGHQKPLGGKRLQRPGAVAELTTXPGSCA

SEQ ID NO: 934 - protein, 269 aa, Homo sapiens
  SITE (200): Xaa equals any of the naturally occurring L-amino acids
  SITE (217): Xaa equals any of the naturally occurring L-amino acids
  SITE (235): Xaa equals any of the naturally occurring L-amino acids
SGKMASLDRVKVLVLGDSGVGKSSLVHLLCQNQVLGNPSWTVGCSVDVRVHDYKEGTPEEKTYYIELWDVGGSVGSASSVKSTRAVFYNSVNGIIFVHDLTNKKSSQNLRRWSLEALNRDLVPTGVLVTNGDYDQEQFADNQIPLLVIGTKLDQIHETKRHEVLTRTAFLAEDFNPEEINLDCTNPRYLAAGSSNAVNSXGFLIGHREEILLREGNXIRGFLTRKDWAGPLKRFXARISILWKCATCNFSALAVNITSFTTLTAHVPME

SEQ ID NO: 935 - protein, 149 aa, Homo sapiens
  SITE (33): Xaa equals any of the naturally occurring L-amino acids
  SITE (138): Xaa equals any of the naturally occurring L-amino acids
  SITE (142): Xaa equals any of the naturally occurring L-amino acids
  SITE (145): Xaa equals any of the naturally occurring L-amino acids
  SITE (147): Xaa equals any of the naturally occurring L-amino acids
VPPRAEEITIPADVTPERVPTHIVDYSEAEQSXEQLHQEISQANVICIVYAVNNKHSIDKVTSRWIPLINERTDKDSRLPLILVGNKSDLVEYSSMETILPIMNQYTEIETCVECSAKNLKNISELFYYAQKAGLHPXRAPXLAXRXRR

SEQ ID NO: 936 - protein, 228 aa, Homo sapiens
  SITE (227): Xaa equals any of the naturally occurring L-amino acids
FQKRVLEYLAVRQLKNNLKGPILCFVGPPGVGKTSVGRSVAKTLGREFHRIALGGVCDQSDIRGHRRTYVGSMPGRIINGLKTVGVNNPVFLLDEVDKLGKSLQGDPAAALLEVLDPEQNHNFTDHYLNVAFDLSQVLFIATANTTATIPAALLDRMEIIQVPGYTQEEKIEIAHRHLIPKQLEQHGLTPQQIQIPQVTTLDIITRYTREAGVRSLDKNLGPFAELXP

SEQ ID NO: 937 - protein, 78 aa, Homo sapiens
HMLLRKSSPHPSFLFLVNFIYLSRFSFAPMVEIKVVLKASSEKRKRTQVFPTPESPIRSSLKSRSYVFFAIGRSGSGS

SEQ ID NO: 938 - protein, 150 aa, Homo sapiens
  SITE (71): Xaa equals any of the naturally occurring L-amino acids
  SITE (105): Xaa equals any of the naturally occurring L-amino acids
  SITE (109): Xaa equals any of the naturally occurring L-amino acids
GTRANSPDARTGKPRRQQGDPDRGSLGTSGRRAELCGQTRGPCPPPVSPAVPVGAMKLNERSVAHYALSDXPADHMGFLRTWGGPGTPPTPSGTGRRCWFVLKGXLLFXFESREGRAPLSLVVLEGCTVELAEAPVPEEFAFAICFDAPW

SEQ ID NO: 939 - protein, 138 aa, Homo sapiens
  SITE (8): Xaa equals any of the naturally occurring L-amino acids
  SITE (9): Xaa equals any of the naturally occurring L-amino acids
VHDLVDSXXPGDTVTITGIVKVSNAEEGSRNKNDKCMFLLYIEANSISNSKGQKTKSSEDGCKHGMLMEFSLKDLYAIQEIQAEENLFKLIVNSLCPVIFGHELVKAGLALALFGGSQKYADDKNRIPIRGDPHILVV

SEQ ID NO: 940 - protein, 423 aa, Homo sapiens
  SITE (3): Xaa equals any of the naturally occurring L-amino acids
  SITE (345): Xaa equals any of the naturally occurring L-amino acids
  SITE (392): Xaa equals any of the naturally occurring L-amino acids
  SITE (398): Xaa equals any of the naturally occurring L-amino acids
  SITE (405): Xaa equals any of the naturally occurring L-amino acids
  SITE (410): Xaa equals any of the naturally occurring L-amino acids
NRXRNSRVDPRVRKLGKSLQGDPAAALLEVLDPEQNHNFTDHYLNVAFDLSQVLFIATANTTATIPAALLDRMEIIQVPGYTQEEKIEIAHRHLIPKQLEQHGLTPQQIQIPQVTTLDIITRYTREAGVRSLDRKLGAICRAVAVKVAEGQHKEAKLDRSDVTEREGCREHILEDEKPESISDTTDLALPPEMPILIDFHALKDILGPPMYEMEVSQRLSQPGVAIGLAWTPLGGEIMFVEASRMDGEGQLTLTGQLGDVMKESAHLAISWLRSNAKKYQLTNAFGSFDLLDNTDIHLHFPAGAVTKDGPSAGVTIVTCLASLFSGRLVRSDVAMTGEITLRGLXLPVGGIKDKVLAAHRAGLKQVIIPRRNEKDLEGIPGNVRQDLSFVTXSCLDEXLNALLMXVYCKXRPGLLNTNWRSKS

SEQ ID NO: 941 - protein, 132 aa, Homo sapiens
  SITE (123): Xaa equals any of the naturally occurring L-amino acids
  SITE (131): Xaa equals any of the naturally occurring L-amino acids
AKRTKVPRDRTKNEGLRHLQQQAFSLPLLHGRRAEDCSDRFVKHCLEASLCERRALQVFYSTYRKHDHTAMYTRPHSLLITPPAGGSSWGPGAFCRLPALLPPSNADVKTHRALPAGSQEYTXPLNWETHXL

SEQ ID NO: 942 - protein, 99 aa, Homo sapiens
  SITE (78): Xaa equals any of the naturally occurring L-amino acids
  SITE (79): Xaa equals any of the naturally occurring L-amino acids
  SITE (90): Xaa equals any of the naturally occurring L-amino acids
  SITE (94): Xaa equals any of the naturally occurring L-amino acids
VAGSLAVSVADMTAPVVGSSGGVYALVSAHLANIVMNWSGMKCQFKLLRMAVALICMSMEFGRAVWLRFHPSAYPPCXXPSFVAHLGGVXVGIXWGLVV

SEQ ID NO: 943 - protein, 116 aa, Homo sapiens
  SITE (69): Xaa equals any of the naturally occurring L-amino acids
  SITE (110): Xaa equals any of the naturally occurring L-amino acids
QTRFKNPEEFGKVTLRVNSDGSVVRLKDVARVELGGENYNVIARINGKPAAGLGIKLATGANALDTAKXIKAKLAELQPFFPQMERFSTLMTTRHSSSFLFTRVKKRCFXAINAGV

SEQ ID NO: 944 - protein, 109 aa, Homo sapiens
  SITE (21): Xaa equals any of the naturally occurring L-amino acids
ELVKSTEFPTLSDKIHNLHMXFFVHKDTIDPKNSVSILKASLLCWATLLNHPDQVALGVLLNSQEEAIVLPFLLGQFTFSGVEGGGHFWRWKRSCSVRSLRNSVSAGEH

SEQ ID NO: 945 - protein, 147 aa, Homo sapiens
  SITE (8): Xaa equals any of the naturally occurring L-amino acids
FGRAAGTXNEEECWNGHSKARYLPEIMNDGLTNQINNPEVDVDITRPDTFIRQQIMALRVMTNKLKNAYNGNDVNFQDTSDESSGSGSGSGCMDDVCPTEFEVCHHRGPRSGSRPERGGLFCSPALATPCSPGLSPALSWALQRLCR

SEQ ID NO: 946 - protein, 166 aa, Homo sapiens
TYSQTTRSNTLPSDVGRKSVTLRKMKQEIKEIMSPTPVELHKVTLYKDSDMEDFGFSVADGLLEKGVYVKNIRPAGPGDLGGLKPYDRLLQVNHVRTRDFDCCLVVPLIAESGNKLDLVISRNPLASQKSIDQQSLPGDWSEQNSAFFQQPSHGGNLETREPTNTL

SEQ ID NO: 947 - protein, 154 aa, Homo sapiens
  SITE (140): Xaa equals any of the naturally occurring L-amino acids
  SITE (145): Xaa equals any of the naturally occurring L-amino acids
DNFCKAVSSANPLLRVFIQKREEAERGSLGAGSLCRRRRALALRDEGPRRRAHLDIGLPRDFRPVSSIIDVDLVPETHRRVRLHRHGCEKPLGFYIRDGASVRVTPHGLEKVPGIFISRMVTGGLAESTGLLAVNDEVLXVNGIXLPGRAGPSH

SEQ ID NO: 948 - protein, 158 aa, Homo sapiens
  SITE (13): Xaa equals any of the naturally occurring L-amino acids
  SITE (148): Xaa equals any of the naturally occurring L-amino acids
  SITE (149): Xaa equals any of the naturally occurring L-amino acids
  SITE (157): Xaa equals any of the naturally occurring L-amino acids
LGSSSNLQFKAEXFKIPSTPRYPRSVVGSERGSVSHSECSTPPQSPLNIDTLSSCSQSQTSASTLPRIAVNPASLGERRKDRPYVEEPRHVKVQKGSEPLGISIVSGEKGGIYVSKVTVGSIAHQAGLEYGDQLLEFNGINLRNRHGXXGAAHHRAXV

SEQ ID NO: 949 - protein, 220 aa, Homo sapiens
MELLTQLLQALWAQDFETLANPSMIGMLYFVLFVILFLENGLLPAAFLPGDSLLVLVGVLIAKGAMGYPQTILLLTVAASLGCWVSYIQGRWLGNTRTVQNWLSHLPAHYHQRAHHLFHKHGLSALLIGRFIAFVRTLLPTIAGLSGLNNARFQFFNWMSGLLWVLILTTLGYMLGKTPVFLKYEDQLMSCLMLLPVVLLVFGLAGSLVVLWKKKYGNRG

SEQ ID NO: 950 - protein, 165 aa, Homo sapiens
  SITE (15): Xaa equals any of the naturally occurring L-amino acids
  SITE (19): Xaa equals any of the naturally occurring L-amino acids
  SITE (75): Xaa equals any of the naturally occurring L-amino acids
LVLFIIPAQNHFRAXGAEXFTGPGLARLGRAVPLAVQLQAHRVVPHGVQQLGHLTRLQVVKVDGGTHNLVPLLDXPSAGRRGVLRHLLHKDAVVPLGDGQPVGATTLPVGQQQLPGCLLLLHLCRIPLRSECLAQEPAPPSSLPLSLSRRESRSQPRGLSPRARP

SEQ ID NO: 951 - protein, 212 aa, Homo sapiens
  SITE (5): Xaa equals any of the naturally occurring L-amino acids
  SITE (13): Xaa equals any of the naturally occurring L-amino acids
  SITE (35): Xaa equals any of the naturally occurring L-amino acids
  SITE (182): Xaa equals any of the naturally occurring L-amino acids
  SITE (207): Xaa equals any of the naturally occurring L-amino acids
  SITE (210): Xaa equals any of the naturally occurring L-amino acids
QKGIXGSRCWGKXGFSWGGSRRTGPAAMNRFNGLXKVCSERRYRQITIPRGKDGFGFTICCDSPVRVQAVDSGGPAERAGLQQLDTVLQLNERPVEHWKCVELAHEIRSCPSEIILLVWRMVPQVKPGPDGGVLRRASCKSTHDLQSPPNKREKNCTHGVQARPEQRHSCHLVCDSSDGLLXLSGGAVDLPVATRGPAHPALHCPRXQLXPN

SEQ ID NO: 952 - protein, 255 aa, Homo sapiens
WIPRAAGIRHEPHYRVEPSLEGALTKGSQEERRKLQGNMLLNSSMEDKMLKENPEEKLFIVHKAITDLSLQETSADEMTFREGHQWEKIPLSGSNQEIRRQKERITEQPLKEEEDEDRKNKGHQAAEIEWLGFRKPSQADMLHSKHDEEQKVWDEEIDDDDDDNCNNDEDEVRVIEFKKKHEEVSQFKEEGDASEDSPLSSASSQAVTPDEQPTLGKKSDISRNAYSRYNTISYRKIRKGNTKQRIDEFESMMHL

SEQ ID NO: 953 - protein, 167 aa, Homo sapiens
  SITE (78): Xaa equals any of the naturally occurring L-amino acids
  SITE (149): Xaa equals any of the naturally occurring L-amino acids
AALGEPVRLERDICRAIELLEKLQRSGEVPPQKLQALQRVLQSEFCNAVREVYEHVYETVDISSSPEVRANATAKATXAAFAASEGHSHPRVVELPKTEEGLGFNIMGGKEQNSPIYISRIIPGGIADRHGGLKRGDQLLSVNGVSVEXEHHEKAVELLKAAQGRLN

SEQ ID NO: 954 - protein, 232 aa, Homo sapiens
  SITE (1): Xaa equals any of the naturally occurring L-amino acids
  SITE (3): Xaa equals any of the naturally occurring L-amino acids
  SITE (9): Xaa equals any of the naturally occurring L-amino acids
  SITE (44): Xaa equals any of the naturally occurring L-amino acids
  SITE (45): Xaa equals any of the naturally occurring L-amino acids
XEXKAGAPXAVAAALELVDPPGCRNSARALSALQDAPEAAGEEXXQVQGDRRAGGGRADGRGRREPLSVPGSRTQAGLPRALAHGSATGRVEGFSSIQELYAQIAGAFEISPSEILYCTLNTPKIDMERLLGGQLGLEDFIFAHVKGIEKEVNVYKSEDSLGLTITDNGVGYAFIKRIKDGGVIDSVKTICVGDHIESINGENIVGWRHYDVAKKLKELKKEELLYYEVNRT

SEQ ID NO: 955 - protein, 179 aa, Homo sapiens
  SITE (13): Xaa equals any of the naturally occurring L-amino acids
  SITE (164): Xaa equals any of the naturally occurring L-amino acids
TTIALLYDVESEXAYDIRLKLTKEVLTIQKQDVVCVGGSHQGRNRRTVTLRRQPVGGLGLSIKGGSEHNVPVVISKIFEDQAADQTGMLFVGDAVLQVNGIHVENATHEEVVHLLRNAGDEVTITVEYLREAPAFLKLPLGPQGHPATTAVGPPLPSLTAVCIXTETPVPQPHRQLPRP

SEQ ID NO: 956 - protein, 214 aa, Homo sapiens
  SITE (183): Xaa equals any of the naturally occurring L-amino acids
  SITE (204): Xaa equals any of the naturally occurring L-amino acids
  SITE (209): Xaa equals any of the naturally occurring L-amino acids
GDQILQVNNYNISNVSHNYARAVLSQPCNTLHLTVLRERRFGNRAHNHSDSNSPREEIFQVALHKRDSGEQLGIKLVRRTDEPGVFILDLLEGGLAAQDGRLSSNDRVLAINGHDLKYGTPELAAQIIQASGERVNLTIARPGKPQPGNTIREAGNHSSSSQHHTPPPYYSRPSSHKDLTQCXTCQEKHITVKKEPHESLGMTXCLGAXESKEW

SEQ ID NO: 957 - protein, 168 aa, Homo sapiens
  SITE (162): Xaa equals any of the naturally occurring L-amino acids
WIPRAAGIRHEPSVDNHDGSSSEGIFVSKIVDSGPAAKEGGLQIHDRIIEVNGRDLSRATHDQAVEAFKTAKEPIVVQVLRRTPRTKMFTPPSESQLVDTGTQTDITFEHIMALTKMSSPSPPVLDPYLLPEEHPSAHEYYDPNDYIGDIHQEMDREELELXELDSTE

SEQ ID NO: 958 - protein, 94 aa, Homo sapiens
  SITE (2): Xaa equals any of the naturally occurring L-amino acids
  SITE (44): Xaa equals any of the naturally occurring L-amino acids
RXFQQGRSRALTDSWCVASRTSCPFTARMRSPTRRPLRAARPRXSTLEMNTPGSWTPNGWLEWSEPPTILSPRGPPALGRRISSTGYGPSNAAA

SEQ ID NO: 959 - protein, 696 aa, Homo sapiens
ESESIIFLRARDLLTWLNLKVLSQILCDLLIVGAWQGLLKGAWLVWALVADRRWPGRRQHTARRMKALLLLVLPWLSPANYIDNVGNLHFLYSELCKGASHYGLTKDRKRRSQDGCPDGCASLTATAPSPEVSAAATISLMTDEPGLDNPAYVSSAEDGQPAISPVDSGRSNRTRARPFERSTIRSRSFKKINRALSVLRRTKSGSAVANHADQGRENSENTTAPEVFPRLYHLIPDGEITSIKINRVDPSESLSIRLVGGSETPLVHIIIQHIYRDGVIARDGRLLPGDIILKVNGMDISNVPHNYAVRLLRQPCQVLWLTVMREQKFRSRNNGQAPDAYRPRDDSFHVILNKSSPEEQLGIKLVRKVDEPGVFIFNVLDGGVAYRHGQLEENDRVLAINGHDLRYGSPESAAHLIQASERRVHLVVSRQVRQRSPDIFQEAGWNSNGSWSPGPGERSNTPKPLHPTITCHEKVVNIQKDPGESLGMTVAGGASHREWDLPIYVISVEPGGVISRDGRIKTGDILLNVDGVELTEVSRSEAVALLKRTSSSIVLKALEVKEYEPQEDCSSPAALDSNHNMAPPSDWSPSWVMWLELPRCLYNCKDIVLRRNTAGSLGFCIVGGYEEYNGNKPFFIKSIVEGTPAYNDGRIRCGDILLAVNGRSTSGMIHACLARLLKELKGRITLTIVSWPGTFL

SEQ ID NO: 960 - protein, 159 aa, Homo sapiens
IVSERSLRSLWTAHWALPEMDSRIPYDDYPVVFLPAYENPPAWIPPHERVHHPDYNNELTQFLPRTITLKKPPGAQLGFNIRGGKASQLGIFISKVIPDSDAHRAGLQEGDQVLAVNDVDFQDIEHSKAVEILKTAREISMRVRFFPYNYHRQKERTVH

SEQ ID NO: 961 - protein, 323 aa, Homo sapiens
  SITE (254): Xaa equals any of the naturally occurring L-amino acids
YVSGRETDSAAAAAGEGRGAAPCLQGVLRISHVIPVPISRGPKSGPSHSGPGQSLTQDASPASPGNSISPPPVLYPNLAELENYMGLSLSSQEVQESLLQIPEGDSTAVSGPGPGQMVAPVTGYSLGVRRAEIKPGVREIHLCKDERGKTGLRLRKVDQGLFVQLVQANTPASLVGLRFGDQLLQIDGRDCAGWSSHKAHQVVKKASGDKIVVVVRDRPFQRTVTMHKDSMGHVGFVIKKGKIVSLVKGSSAAXNGLLTNHYVCEVDGQNVIGLKDKKIMEILATAGNVVTLTIIPSVIYEHMVKKLPPVLLHHTMDHSIPDA

SEQ ID NO: 962 - protein, 225 aa, Homo sapiens
  SITE (213): Xaa equals any of the naturally occurring L-amino acids
AVAGGARPCSTPSSPHRRCRRHRPRPLPRPPAAIMSASAVYVLDLKGKVLICRNYRGDVDMSEVEHFMPILMEKEEEGMLSPILAHGGVRFMWIKHNNLYLVATSKKNACVSLVFSFLYKVVQVFSEYFKELEEESIRDNFVIIYELLDELMDFGYPQTTDSKILQEYITQEGHKLETGAPRPPATVTNAVSWRSEGIKYRKNEVFLDVIESXNLLVSANGNVLR

SEQ ID NO: 963 - protein, 199 aa, Homo sapiens
  SITE (11): Xaa equals any of the naturally occurring L-amino acids
  SITE (28): Xaa equals any of the naturally occurring L-amino acids
  SITE (82): Xaa equals any of the naturally occurring L-amino acids
CVSVGSFINIXEIKEIVKRLQFVSKGCXSVEMTLRRNGLGQLGFHVNYEGIVADVEPYGYAWQAGLRQGSRLVEICKVAVAXLSHEQMIDLLRTSVTVKVVIIPPHDDCTPRRSCSETYRMPVMEYKMNEGVSYEFKFPFRNNNKWQRNASKGLIHLKSRPSAESHDLAAECWKRRWEDAFLQKEPPTSLEASPVTGAH

SEQ ID NO: 964 - protein, 163 aa, Homo sapiens
PRLNRCPRSTSPTPAFMPTWKGPHLQSLSLSQATVAAFTASEGHAHPRVVELPKTDEGLGFNIMGGKEQNSPIYISRVIPGGVADRHGGLKRGDQLLSVNGVSVEGEQHEKAVELLKAAQGSVKLVVRYTPRVLEEMEARFEKMRSARRRQQHQSYSSLESRG

SEQ ID NO: 965 - protein, 249 aa, Homo sapiens
  SITE (234): Xaa equals any of the naturally occurring L-amino acids
LLHPPLRRLPPALPPPPPPCCCSKLLPPLGLKGFQMEHFDASLSTYFKALLGPRDTRVKGWFLLDNYIPTFICSVIYLLIVWLGPKYMRNKQPFSCRGILVVYNLGLTLLSLYMFCELVTGVWEGKYNFFCQGTRTAGESDMKIIRVLWWYYFSKLIEFMDTFFFILRKNNHQITVLHVYHHASMLNIWWFVMNWVPCGHSYFGATLNSFIHVLMYSYYGLSSVPSMRPYLWWXGKGKVPLNFKGGQAW

SEQ ID NO: 966 - protein, 210 aa, Homo sapiens
GKYNFFCQGTRTAGESDMKIIRVLWWYYFSKLIEFMDTFFFILRKNNHQITVLHVYHHASMLNIWWFVMNWVPCGHSYFGATLNSFIHVLMYSYYGLSSVPSMRPYLWWKKYITQGQLLQFVLTIIQTSCGVIWPCTFPLGWLYFQIGYMISLIALFTNFYIQTYNKKGASRRKDHLKDHQNGSMAAVNGHTNSFSPLENNVKPRKLRKD

SEQ ID NO: 967 - protein, 314 aa, Homo sapiens
  SITE (7): Xaa equals any of the naturally occurring L-amino acids
  SITE (191): Xaa equals any of the naturally occurring L-amino acids
TRPRTRXRGSGAESLTGTGVGKMIHSLFLINCSGDIFLEKHWKSVVSQSVCDYFFEAQEKAADVENVPPVISTPHHYLISIYRDKLFFVSVIQTEVPPLFVIEFLHRVADTFQDYFGECSEAAIKDNVVIVYELLEEMLDNGFPLATESNILKELIKPPTILRSVVNSITGSSNVGDTLPTGQLSNIPWRXAGVKYTNNEAYFDVVEEIDAIIDKSGSTVFAEIQGVIDACIKLSGMPDLSLSFMNPRLLDDVSFHPCIRFKRWESERVLSFIPPDGNFRLISYRVSSQNLVAIPVYVNIVSALRRTVLAADLI

SEQ ID NO: 968 - protein, 273 aa, Homo sapiens
  SITE (1): Xaa equals any of the naturally occurring L-amino acids
  SITE (64): Xaa equals any of the naturally occurring L-amino acids
XLEHIPNFSLDDMVKLVEVPNDGGPLGIHVVPFSARGGRTLGLLVKRLEKGGKAEHENLFRENXCIVRINDGDLRNRRFEQAQHMFRQAMRTPIIWFHVVPAANKEQYEQLSQSEKNNYYSSRFSPDSQYIDNRSVNSAGLHTVQRAPRLNHPPEQIDSHSRLPHSAHPSGKPPSAPASAPQNVFSTTVSSGYNTKKIGKRLNIQLKKGTEGLGFSITSRDVTIGGSAPIYVKNILPRGAAIQDGRLKAGDRLIEVNGVGLVGKSQEEVVSLL

SEQ ID NO: 969 - protein, 442 aa, Homo sapiens
  SITE (2): Xaa equals any of the naturally occurring L-amino acids
  SITE (144): Xaa equals any of the naturally occurring L-amino acids
HXPRLPALPPRLLSPSAATMSASAVFILDVKGKPLISRNYKGDVAMSKIEHFMPLLVQREEEGALAPLLSHGQVHFLWIKHSNLYLVATTSKNANASLVYSFLYKTIEVFCEYFKELEEESIRDNFVIVYELLDELMDFGFPQXTDSKILQEYITQQSNKLETGKSRVPPTVTNAVSWRSEGIKYKKNEVFIDVIESVNLLVNANGSVLLSEIVGTIKLKVFLSGMPELRLGLNDRVLFELTGRSKNKSVELEDVKFHQCVRLSRFDNDRTISFIPPDGDFELMSYRLSTQVKPLIWIESVIEKFSHSRVEIMVKAKGQFKKQSVANGVEISVPVPSDADSPRFKTSVGSAKYVPERNVVIWSIKSFPGGKEYLMRAHFGLPSVEKEEVEGRPPIGVKFEIPYFTVSGIQVRYMKIIEKSGYQALPWVRYITQSGDYQLRTS

SEQ ID NO: 970 - protein, 439 aa, Homo sapiens
  SITE (211): Xaa equals any of the naturally occurring L-amino acids
  SITE (235): Xaa equals any of the naturally occurring L-amino acids
  SITE (397): Xaa equals any of the naturally occurring L-amino acids
  SITE (424): Xaa equals any of the naturally occurring L-amino acids
GKLVRLQVPVRNSRVDPRVRHQEMDREELELEEVDLYRMNSQDKLGLTVCYRTDDEDDIGIYISEIDPNSIAAKDGRIREGDRIIQINGIEVQNREEAVALLTSEENKNFSLLIARPELQLDEGWMDDDRNDFLDDLHMDMLEEQHHQAMQFTASVLQQKKHDEDGGTTDTATILSNQHEKDSGVGRTDESTRNDESSEQENNGDDATASXNPLAGQRKLTCSQDTLGSGDLPFXNESFISADCTDADYLGIPVDECERFRELLELKCQVKSATPYGLYYPSGPLDAGKSDPESVDKELELLNEELRSIELECLSIVRAHKMQQLKEQYRESWMLHNSGFRNYNTSIDVRRHELSDITELPEKSDKDSSSAYNTGESCRSTPLTLEISPDNSLRRAXEGISCPSTKGLWGPRKPTGQPPRICSXSRKIPKWAPLPIARP

SEQ ID NO: 971 - protein, 188 aa, Homo sapiens
  SITE (120): Xaa equals any of the naturally occurring L-amino acids
  SITE (130): Xaa equals any of the naturally occurring L-amino acids
  SITE (159): Xaa equals any of the naturally occurring L-amino acids
  SITE (160): Xaa equals any of the naturally occurring L-amino acids
  SITE (162): Xaa equals any of the naturally occurring L-amino acids
  SITE (178): Xaa equals any of the naturally occurring L-amino acids
IIERISSWKKSLSVIFAGSLFALFQNSIGNTTQSVQLKEKRGVVLLYILLGTIGTLVAVLAASALLYRHWIEIVLLYRTYQSKDQTLGDKKDFDAFVSYAKWSSFPSEATSSLSEEHLAXSLFPDVLENXYGYSLCLLERDVAPGGVYAEDIVSIIKRXXRXIFILSPNYVNGPSIFXTTSSSESCLG

SEQ ID NO: 972 - protein, 161 aa, Homo sapiens
WWVNHTEVTIPYLATDVTCVGPGAHKGQSVISLDLYTCELDLTNLILFSLSISVSLFLMVMMTASHLYFWDVWYIYHFCKAKIKGYQRLISPDCCYDAFIVYDTKDPAVTEWVLAELVAKLEDPREKHFNLCLEERDWLPGQPVLENLSQSIQLSKKTVFV

SEQ ID NO: 973 - protein, 407 aa, Homo sapiens
  SITE (32): Xaa equals any of the naturally occurring L-amino acids
QGQEATGKVLIKIHKDTSQVPTALGDASIAAXVLWTLPGAQRRGEFAPKGAPMTNICPPEERTGTRVKANLSEVLVSSVLGVNVTSTEVYGAFTCSIQNISFSSFTLQRAGPTSHVAAVLASLLVLLALLLAALLYVKCRLNVLLWYQDAYGEVEINDGKLYDAYVSYSDCPEDRKFVNFILKPQLERRRGYKLFLDDRDLLPRAEPSADLLVNLSRCRRLIVVLSDAFLSRAWCSHSFREGLCRLLELTRRPIFITFEGQRRDPAHPALRLLRQHRHLVTLLLWRPGSVTPSSDFWKEVQLALPRKVRYRPVEGDPQTQLQDDKDPMLILRGRVPEGRALDSEVDPDPEGDLGVRGPVFGEPSAPPHTSGVSLGESRSSEVDVSDLGSRNYSARTDFYCLVSKDDM

SEQ ID NO: 974 - protein, 182 aa, Homo sapiens
  SITE (139): Xaa equals any of the naturally occurring L-amino acids
  SITE (145): Xaa equals any of the naturally occurring L-amino acids
  SITE (148): Xaa equals any of the naturally occurring L-amino acids
  SITE (156): Xaa equals any of the naturally occurring L-amino acids
  SITE (160): Xaa equals any of the naturally occurring L-amino acids
  SITE (174): Xaa equals any of the naturally occurring L-amino acids
  SITE (176): Xaa equals any of the naturally occurring L-amino acids
  SITE (179): Xaa equals any of the naturally occurring L-amino acids
AAPAKPGGAGGSKKLVIKNFRDRPRLPDNYTQDTWRKLHEAVRAVQSSTSIRYNLEELYQAVENLCSHKVSPMLYKQLRQACEDHVQAQILPFREDSLDSVLFLKKINTCWQDHCRQMIMIRSIFLFLDRTYVLQNSTXALPSWXYWXLGTVLGTXIISXKMVSELKPFGGIPXVXRAXEEP

SEQ ID NO: 975 - protein, 187 aa, Homo sapiens
  SITE (78): Xaa equals any of the naturally occurring L-amino acids
VPELYFGAHVQEGNDDRPPRSWDAGVRTENAGRGVVEAWSGWPRAVPHPRDAGRVLCAGPRTWALAHFQCLLHVTLAXSACPQFVTPHLEKLQRKMVSSVPLQATSSIQILPVPCPNRAVRYTSSTPRKPSMRHTTSPSFLSQPSSHTVPQRRSWYTSTRPSCGPEPFTRRIIIGASTPLASPALSP

SEQ ID NO: 976 - protein, 83 aa, Homo sapiens
  SITE (11): Xaa equals any of the naturally occurring L-amino acids
  SITE (49): Xaa equals any of the naturally occurring L-amino acids
VIEAAETPFTXGVEVDVFGKLGRSPPNVQFTFQQPKPLSVEPQQGPQAXGTTLTIHGTHLDTGSQEDVRVTLNGVPCKVTNLG

SEQ ID NO: 977 - protein, 130 aa, Homo sapiens
  SITE (14): Xaa equals any of the naturally occurring L-amino acids
  SITE (82): Xaa equals any of the naturally occurring L-amino acids
QRWCGPLERRKPAXPEPQRRNLRGGSQRRRGGLKKMQSSLKLVDCIIEVHDARIPLSGRNPLFQETLGLKPHLLVLNKMDLXDLTEQQKIMQHLEGEGLKNVIFTNCVKDENVKQIIPMVTELIGRSHRY

SEQ ID NO: 978 - protein, 151 aa, Homo sapiens
  SITE (4): Xaa equals any of the naturally occurring L-amino acids
  SITE (73): Xaa equals any of the naturally occurring L-amino acids
  SITE (130): Xaa equals any of the naturally occurring L-amino acids
  SITE (148): Xaa equals any of the naturally occurring L-amino acids
HVVXTGPPNAGKSSLVNLLSRKPVSIVSPEPGTTRDVLETPVDLAGFPVLLSDTAGLREGVGPWSRRACGAPXERLEQADLILAMLDASDLASPSSCNFLATVVASVGAQSPSDSSQRLPPGAEQFGPAXPGGPSSGSDCPAMLCLFXGKG

SEQ ID NO: 979 - protein, 288 aa, Homo sapiens
  SITE (20): Xaa equals any of the naturally occurring L-amino acids
  SITE (40): Xaa equals any of the naturally occurring L-amino acids
  SITE (232): Xaa equals any of the naturally occurring L-amino acids
GFWGTIAALVEVRTHIRVGXVGLPNVGKSSLINSLKRSRXCSVGAVPGITKFMQEVYLDKFIRLLDAPGIVPGPNSEVGTILRNCVHVQKLADPVTPVETILQRCNLEEISNYYGVSGFQTTEHFLTAVAHRLGKKKKGGLYSQEQAAKAVLADWVSGKISFYIPPPATHTLPTHLSAEIVKEMTEVFDIEDTEQANEDTMECLATGESDELLGDTDPLEMEIKLLHSPMTXIADAIENKTTVYKIGDLTGYCTNPNRHQMGWAKRNVDHRPKSNSMVDVCSVDRRSV

SEQ ID NO: 980 - protein, 263 aa, Homo sapiens
  SITE (105): Xaa equals any of the naturally occurring L-amino acids
  SITE (110): Xaa equals any of the naturally occurring L-amino acids
  SITE (151): Xaa equals any of the naturally occurring L-amino acids
PSDDSSGYNAVYLSRRLNHIWGKPLLRQPAGSQVSKRRSIFIGSFIVAIMLIPSTRAPQCRGNGIAGSDSYIVRVKAVVMTRDDSSGGWFPQEGGGISRVGVCKXMHPEXNGRSGFLIHGERQKDKLVVLECYVRKDLVYTKANPTFHHWXVDNRKFGLTFQSPADARAFDRGVRKAIEDLIEGSTTSSSTIHNEAELGDDDVFTTATDSSSNSSQKREQPTRTISSPTSCEHRRIYTLGHLHDSYPTDHYHLDQPMPRPYRQ

SEQ ID NO: 981 - protein, 207 aa, Homo sapiens
  SITE (177): Xaa equals any of the naturally occurring L-amino acids
TTDEDDSEYEDCPEEEEDDWQTCSEEDGPKEEDCSQDWKESSTADSEARSRKTPQKRQIHNFSHLVSKQELLELFKELHTGRKVKDGQLTVGLVGYPNVGKSSTINTIMGNKKVSVSATPGHTKHFQTLYVEPGLCLCDCPGLVMPSFVSTKAEMTCSGILPIDQMRDHVPPVSLIXFLLWKHSSYYVHIRASGLFWAFEGFRFDEE

SEQ ID NO: 982 - protein, 275 aa, Homo sapiens
  SITE (22): Xaa equals any of the naturally occurring L-amino acids
  SITE (47): Xaa equals any of the naturally occurring L-amino acids
  SITE (101): Xaa equals any of the naturally occurring L-amino acids
RWATYGRTGGLPNVGKSSTINXIMGNKKVSVSATPGHTKHFQTLYVXPGLCLCDCPGLVMPSFVSTKAEMTCSGILPIDQMRDHVPPVSLVCQNIPRHVLXATYGINIITPREDEDPHRPPTSEELLTAYGYMRGFMTAHGQPDQPRSARYILKDYVSGKLLYCHPPPGRDPVTFQHQHQRLLENKMNSDEIKMQLGRNKKAKQIENIVDKTFFHQENVRALTKGVQAVMGYKPGSGVVTASTASSENGAGKPWKKHGNRNKKEKSRRLYKHLDM

SEQ ID NO: 983 - protein, 175 aa, Homo sapiens
  SITE (23): Xaa equals any of the naturally occurring L-amino acids
TFEPPFLLFLQGKPPGWVASLGXTRAVMSKIQVSERPLMFLLDTPGVLAPRIESVETGLKLALCGTVLDHLVGEETMADYLLYTLNKHQRFGYVQHYGLGSACDNVERVLKSVAVKLGKTQKVKVLTGTGNVNVIQPNYPAAARDFLQTFRRGLLGSVMLDLDVLRGHPPAETLP

SEQ ID NO: 984 - protein, 254 aa, Homo sapiens
  SITE (4): Xaa equals any of the naturally occurring L-amino acids
  SITE (231): Xaa equals any of the naturally occurring L-amino acids
  SITE (233): Xaa equals any of the naturally occurring L-amino acids
  SITE (234): Xaa equals any of the naturally occurring L-amino acids
  SITE (241): Xaa equals any of the naturally occurring L-amino acids
  SITE (245): Xaa equals any of the naturally occurring L-amino acids
  SITE (246): Xaa equals any of the naturally occurring L-amino acids
  SITE (247): Xaa equals any of the naturally occurring L-amino acids
  SITE (254): Xaa equals any of the naturally occurring L-amino acids
PRGXKKMQSSLKLVDCIIEVHDARIPLSGRNPLFQETLGLKPHLLVLNKMDLADLTEQQKIMQHLEGEGLKNVIFTNCVKDENVKQIIPMVTELIGRSHRYHRKENLEYCIMVIGVPNVGKSSLINSLRRQHLRKGKATRVGGEPGITRAVMSKIQVSERPLMFLLDTPGVLAPRIESVETGLKLALCGTVLDHLVGEETMADYLLYTLNKHQRFGYVQHYGLGSACDNVXRXXKKCGCEXGEDXXXEGAHGHX

SEQ ID NO: 985 - protein, 456 aa, Homo sapiens
  SITE (369): Xaa equals any of the naturally occurring L-amino acids
AIKIKLLSSEGLWSSDQHRLVGVQDSPPQGSLCCHFSAMATSEQSICQARASVMVYDDTSKKWVPIKPGQQGFSRINIYHNTASNTFRVVGVKLQDQQVVINYSIVKGLKYNQATPTFHQWRDARQVYGLNFASKEEATTFSNAMLFALNIMNSQEGGPSSQRQVQNGPSPDEMDIQRRQVMEQHQQQRQESLERRTSATGPILPPGHPSSAASAPVSCSGPPPPPPPPVPPPPTGATPPPPPPLPAGGAQGSSHDESSMSGLAAAIAGAKLRRVQRPEDASGGSSPSGTSKSDANRASSGGGGGGLMEEMNKLLAKRRKAASQSDKPAEKKEDESQMEDPSTSPSPGTRAASQPPNSSEAGRKPWERXNSVEKPVSSILSRTPSVAKSPEAKSPLQSQPHSRMKPAGSVNDMALDAFDLDRMKQEILEEVVRELHKVKEEIIDAIRQELSGISTT

SEQ ID NO: 986 - protein, 113 aa, Homo sapiens
  SITE (62): Xaa equals any of the naturally occurring L-amino acids
  SITE (77): Xaa equals any of the naturally occurring L-amino acids
  SITE (80): Xaa equals any of the naturally occurring L-amino acids
  SITE (90): Xaa equals any of the naturally occurring L-amino acids
  SITE (112): Xaa equals any of the naturally occurring L-amino acids
RVKAKKNAAPFRSEVCFGKEGLWKLLGGFQETCSKAIRVGVIGFPNVGKSSIINSLKQEQMXNVGVSMGLTRSMQVXPLXKQITIIDSPXLHRIFHLIPPLRFALRSPAKYXK

SEQ ID NO: 987 - protein, 293 aa, Homo sapiens
SAGTSEAGRSGAEEVSCGSVSGDGAAMRLTPRALCSAAQAAWRENFPLCGRDVARWFPGHMAKGLKKMQSSLKLVDCIIEVHDARIPLSGRNPLFQETLGLKPHLLVLNKMDLADLTEQQKIMQHLEGEGLKNVIFTNCVKDENVKQIIPMVTELIGRSHRYHRKENLEYCIMVIGVPNVGKSSLINSLRRQHLRKGKATRVGGEPGITRAVMSKIQVESSGARPSTLSRALQASGTCRPLCGFRLLTTLPSPPLSVPAEHPRGRHCPCPYSTVVIVFAPNLWGRHAVFPISR

SEQ ID NO: 988 - protein, 44 aa, Homo sapiens
LLRVDPKKISGFHLAFSLGSLWEKPATIREDTGGEMYEEIHVRN

SEQ ID NO: 989 - protein, 51 aa, Homo sapiens
  SITE (51): Xaa equals any of the naturally occurring L-amino acids
ETQPMTEVDLFVSTKRIKVLTADSQEAMMDHALHTISYTADIGCVLVLMAX

SEQ ID NO: 990 - protein, 218 aa, Homo sapiens
  SITE (145): Xaa equals any of the naturally occurring L-amino acids
PFTMGSSRLRVFDPHLERKDSAAALSDRELPLPTFDVPYFKYIDEEDEDDEWSSRSQSSTEDDSVDSLLSDRYVVVSGTPEKILEHLLNDLHLEEVQDKETETLLDDFLLTYTVFMTTDDLCQALLRHYSAKKYQGKEENSDVPXRKRKVLHLVSQWIALYKDWLPEDEHSKMFLKTIYRNVLDDVYEYPILEKELKEFQKILGMHRRHTVDEYSPQK

SEQ ID NO: 991 - protein, 144 aa, Homo sapiens
HQEVRGKMMSGHVEYQILVVTRLAAFKSAKHRPEDVVQFLVSKKYSEIEEFYQKLSSRYAAASLPPLPRKVLFVGESDIRERRAVFNEILRCVSKDAELAGSPELLEFLAPDPQGLQGSPAEIPLSWDGHRHPGRMMEEAFRLF

SEQ ID NO: 992 - protein, 260 aa, Homo sapiens
  SITE (48): Xaa equals any of the naturally occurring L-amino acids
  SITE (122): Xaa equals any of the naturally occurring L-amino acids
  SITE (159): Xaa equals any of the naturally occurring L-amino acids
SEKCWQNAAAASPGGDVNPIPLRAVRGVYRLLLPPVWLPPLAPALASXLAPVPQAPQGRQWPEEMVGSFQTLSQCGNEADSGQAGPYENWMLEPALATGEELPELTLLTTLLEGPGDKTQPXEEETLSQAPESEEEQKKKALERSMYVLSELVETETMXVDDLGHIVEGYMATMAAQGVPESLRGRDRIVFGNIPQIYEWHRDYFLQELQRCLTDPDWLAQLFIKHERRLHMYVVYCHWINRPLVTSPRLPMTLLQSLQL

SEQ ID NO: 993 - protein, 61 aa, Homo sapiens
KRRFSDFLGLHSKLASKYLHVGYIVPPAPEKSIVGMTKVKVGKEDSSSTEFVEKRRAALER

SEQ ID NO: 994 - protein, 222 aa, Homo sapiens
  SITE (170): Xaa equals any of the naturally occurring L-amino acids
VAWRGWPSIRILPVSHVSQAKGKRSDIWAPLTEEGIARIYQLIEYLHKNLRVEGLFRVPGNSVRQQILRDALNNGTDIDLESGEFHSNDVATLLKMFLGELPEPLLTHKHFNAHLKIADLMQFDDKGNKTNIPDKDRQIEALQLLFLILPPPNRNLLKLLLDLLYQTAKXQDKNKMSAYNLALMFAPHVLWPKNVTANDLQENITKLNSGMAFMIKHSQKLF

SEQ ID NO: 995 - protein, 138 aa, Homo sapiens
  SITE (125): Xaa equals any of the naturally occurring L-amino acids
RLDHTFHLELEAARLLRALVLAWDPGVRRHRPCAQGTVLLPTVFRGCQAQQLAVRLEPQGLLYAKLTLSEQQEAPATAEPRVFGLPLPLLVERERPPGQVPLIIQKCVGQIERRGLRVVGLYRLXGSAAVKERASGCL

SEQ ID NO: 996 - protein, 112 aa, Homo sapiens
  SITE (35): Xaa equals any of the naturally occurring L-amino acids
  SITE (45): Xaa equals any of the naturally occurring L-amino acids
  SITE (90): Xaa equals any of the naturally occurring L-amino acids
RALVELSGNSPHDVSSVLKRFLQELTEPVIPFHLXDAFISLAKTXHADPGDDPGTPSPSPEVIRSLKTLLVQLPDSNYNTCGTWWPICSXWLHDLWKTRCLPTTWALCLGRH

SEQ ID NO: 997 - protein, 118 aa, Homo sapiens
  SITE (35): Xaa equals any of the naturally occurring L-amino acids
  SITE (63): Xaa equals any of the naturally occurring L-amino acids
  SITE (71): Xaa equals any of the naturally occurring L-amino acids
  SITE (78): Xaa equals any of the naturally occurring L-amino acids
  SITE (79): Xaa equals any of the naturally occurring L-amino acids
  SITE (99): Xaa equals any of the naturally occurring L-amino acids
KGLKHPHRYVLDAAQTHIYMLMKKDSYARYLKSPXYKDMLAKAIEPQETTKKSSTLPFYAASXALQPKPCXPEDSWKXXPRPEKQPTLWDITQPGQHMXSQPPSDRVTTGTCMPPFSF

SEQ ID NO: 998 - protein, 134 aa, Homo sapiens
  SITE (67): Xaa equals any of the naturally occurring L-amino acids
  SITE (87): Xaa equals any of the naturally occurring L-amino acids
LQSALLVPASFSQSASFVASRENYNKLFLRLSSCKMRPIGHDGYHPTSVAEWLDSIELGDYTKAFLXNGYTSMDLLKKIWEVELINXLKINLIGHRKRILASLGRQAARRSPTEAPSVHHPQGDARRRRNGKLL

SEQ ID NO: 999 - protein, 227 aa, Homo sapiens
  SITE (67): Xaa equals any of the naturally occurring L-amino acids
  SITE (152): Xaa equals any of the naturally occurring L-amino acids
  SITE (195): Xaa equals any of the naturally occurring L-amino acids
  SITE (200): Xaa equals any of the naturally occurring L-amino acids
  SITE (226): Xaa equals any of the naturally occurring L-amino acids
YRYYPVDGYSLLKRFPLHPLTGPRCPVQTVGQWLESIGLPQYENHLMANGFDNVQFMGSNVMEDQDXLEIGILNSGHRQRILQAIQLLPKMRPIGHDGYHPTSVAEWLDSIELGDYTKAFLINGYTSMDLLKKIWEVELINVLKINLIGHRXRILGISGRQAARRSPTEAPSVHHPQGTQWVITLLLQLSPSLRXKHFTXLGGFPRTFPSHYSWQGRWQGREEGIXK

SEQ ID NO: 1000 - protein, 138 aa, Homo sapiens
  SITE (29): Xaa equals any of the naturally occurring L-amino acids
  SITE (50): Xaa equals any of the naturally occurring L-amino acids
  SITE (133): Xaa equals any of the naturally occurring L-amino acids
HLLQAGAHAHAGEGASGYKHFDWLYARLXRSSRSSPCPTCPRSRPPPFRXDFISKRRKGLIWWMNHMASHPVLAQCDVFQHFLTCPSSTDEKAWKQGKRKAEKDEMVGANFFLTLSTPPAAALDCRSGEQDRXVSMLS

SEQ ID NO: 1001 - protein, 181 aa, Homo sapiens
  SITE (123): Xaa equals any of the naturally occurring L-amino acids
  SITE (141): Xaa equals any of the naturally occurring L-amino acids
  SITE (146): Xaa equals any of the naturally occurring L-amino acids
  SITE (156): Xaa equals any of the naturally occurring L-amino acids
  SITE (159): Xaa equals any of the naturally occurring L-amino acids
  SITE (164): Xaa equals any of the naturally occurring L-amino acids
  SITE (177): Xaa equals any of the naturally occurring L-amino acids
SHEEAPGEGPIIKEISDLMLARFDGPAREELQQVAAQFCSYQSIALELIKTKQRKESRFQLFMQEAESHPQCRRLQLRDLIISEMQRLTKYPLLLESIIKHTEGGTSEHEKLCRARDQCREIXKYVNEAVKQTENRHRLRXLPETXGCHRLERASXPLXADSRXGSYNQKMIHEGPXTGSS

SEQ ID NO: 1002 - protein, 111 aa, Homo sapiens
NQHGLAHLEKASARGQYSLLLLGMVSLCALILILWRVVYRSVTRPLAEQTQALQRLLDGDIDSPFPETAGVRELDTISLAVVLQRRDWENPGVTQLNRLAAHPPFASWRNS

SEQ ID NO: 1003 - protein, 165 aa, Homo sapiens
KLHNGTIQRKLKYERMVSRSLGANPDDLKDPIKISIPRYVLCGQGKDAHFEFEVKITVLDETWTVFRRYSRFREMHKTLKLKYAELAALEFPPKKLFGNKDERVIAERRSHLEKYLRDFFSVMLQSATSPLHINKVGLTLSKHTICEFSPFFKKGVFDYSSHGTG

SEQ ID NO: 1004 - protein, 215 aa, Homo sapiens
VGIYEQYLSEKASPRVTVDDYLVAKLADTLNHEDPTPEIFDDIQRKVYELMLRDERFYPSFRQNALYVRMLAELDMLKDPSFRGSDDGDGESFNGSPTGSINLSLDDLSNVSSDDSVQLHAYISDTGVCNDHGKTYALYAITVHRRNLNSEEMWKTYRRYSDFHDFHMRITEQFESLSSILKLPGKKTFNNMDRDFLEKRKKDLNAYLQLLLAPE

SEQ ID NO: 1005 - protein, 399 aa, Homo sapiens
RPRTRGSGSGGAQQRELERMAEVLVTGEQLRLRLHEEKVIKDRRHHLKTYPNCFVAKELIDWLIEHKEASDRETAIKLMQKLADRGIIHHVCDEHKEFKDVKLFYRFRKDDGTFPLDNEVKAFMRGQRLYEKLMSPENTLLQPREEEGVKYERTFMASEFLDWLVQEGEATTRKEAEQLCHRLMEHGIIQHVSSKHPFVDSNLLYQFRMNFRRRRRLMELLNEKSPSSQETHDSPFCLRKQSHDNRKSTSFMSVSPSKEIKIVSAVRRSSMSSCGSSGYFSSSPTLSSSPPVLCNPKSVLKRPVTSEELLTPGAPYARKTFTIVGDAVGWGFVVRGSKPCHIQAVDPSGPAAAAGMKVCQFVVSVNGLNVLHVDYRTVSNLILTGPRTIVMEVMEELEC

SEQ ID NO: 1006 - protein, 213 aa, Homo sapiens
  SITE (118): Xaa equals any of the naturally occurring L-amino acids
RHLPLDNEVKAFMRGQRLYEKLMSPENTLLQPREEEGVKYERTFMASEFLDWLVQEGEATTRKEAEQLCHRLMEHGIIQHVSSKHPFVDSNLLYQFRMNFRRRRRLMELLNEKSPSSXETHDSPFCLRKQSHDNRKSTSFMSVSPSKEIKIVSAVRRSSMSSCGSSGYFSSSPTLSSSPPVLCNPKSVLKRPVTSEELLTPGAPYARKTFTVG

SEQ ID NO: 1007 - protein, 230 aa, Homo sapiens
  SITE (2): Xaa equals any of the naturally occurring L-amino acids
  SITE (3): Xaa equals any of the naturally occurring L-amino acids
  SITE (20): Xaa equals any of the naturally occurring L-amino acids
  SITE (206): Xaa equals any of the naturally occurring L-amino acids
  SITE (222): Xaa equals any of the naturally occurring L-amino acids
  SITE (227): Xaa equals any of the naturally occurring L-amino acids
KXXPSTAVAAALELVDPPGXRNSARAACCIPGRRELLRKFQVDVKLDPATAHPSLLLTADLRSVQDGEPWRDVPNNPERFDTWPCILGLQSFSSGRHYWEVLVGEGAEWGLGVCQDTLPRKGETTPSPENGVWALWLLKGNEYMVLASPSVPLLQLESPRCIGIFLDYEAGEISFYNVTDGSYIYTFNQLFSGLLRPYFFICDATXLILPPTTIAGSGNWAXRDHLXSCF

SEQ ID NO: 1008 - protein, 152 aa, Homo sapiens
  SITE (64): Xaa equals any of the naturally occurring L-amino acids
  SITE (70): Xaa equals any of the naturally occurring L-amino acids
  SITE (72): Xaa equals any of the naturally occurring L-amino acids
  SITE (117): Xaa equals any of the naturally occurring L-amino acids
  SITE (123): Xaa equals any of the naturally occurring L-amino acids
  SITE (139): Xaa equals any of the naturally occurring L-amino acids
  SITE (144): Xaa equals any of the naturally occurring L-amino acids
  SITE (152): Xaa equals any of the naturally occurring L-amino acids
FFNFLRNVSLRSSENKMDSSNLAVIFAPNLLQTSEGHEKMSSNTEKKLRLQAAVVQTLIDYASXIGRVPXFXLEKIPAMLGIDGLCATPSLEGFEEGEYETPGEYKRKRRQSVGDFXSGALNXFKPNRTPSITPQEERXAQLSXSPWFLHQX

SEQ ID NO: 1009 - protein, 311 aa, Homo sapiens
NLLHGFQKKMKLEVVDKRNPMFIRVATVADTDDHRVKVHFDGWNNCYDYWIDADSPDIHPVGWCSKTGHPLQPPLSPLELMEASEHGGCSTPGCKGIGHFKRARHLGPHSAANCPYSEINLNKDRIFPDRLSGEMPPASPSFPRNKRTDANESSSSPEIRDQHADDVKEDFEERTESEMRTSHEARGAREEPTVQQAQRRSAVFLSFKSPIPCLPLRWEQQSKLLPTVAGIPASKVSKWSTDEVSEFIQSLPGCEEHGKVFKDEQIDGEAFLLMTQTDIVKIMSIKLGPALKIFNSILMFKAAEKNSHNEL

SEQ ID NO: 1010 - protein, 105 aa, Homo sapiens
  SITE (1): Xaa equals any of the naturally occurring L-amino acids
  SITE (11): Xaa equals any of the naturally occurring L-amino acids
  SITE (13): Xaa equals any of the naturally occurring L-amino acids
  SITE (54): Xaa equals any of the naturally occurring L-amino acids
XLKGPLALWPXGXSFLAKGACPCSPCSPLVAKPVLPQGAFQGCLKILFIVPRSXSSSEHVQGHKGTQGRRPPGMARSKFSPKTQARLELFILLKMLSRDTACRSP

SEQ ID NO: 1011 - protein, 386 aa, Homo sapiens
  SITE (127): Xaa equals any of the naturally occurring L-amino acids
EQNIGDIFLKYSKDLVKTYPPFVNFFEMSKETIIKCEKQKPRFHAFLKINQAKPECGRQSLVELLIRPVQRLPSVALLLNDLKKHTADENPDKSTLEKAIGSLKEVMTHINEDKRKTEAQKQIFDVXYEVDGCPANLLSSHRSLVQRVETISLGEHPCDRGEQVTLFLFNDCLEIARKRHKVIGTFRSPHGQTRPPASLKHIHLMPLSQIKKVLDIRETEDCHNAFALLVRPPTEQANVLLSFQMTSDELPKENWLKMLCRHVANTICKADAENLIYTADPESFEVNTKDMDSTLSRASRAIKKTSKKVTRAFSFSKTPKRALRRALMTSHGSVEGRSPSSNDKHVMSRLSSTSSLAGIPSPSLVSLPSFFERRSHTLSRSTTHLI

SEQ ID NO: 1012 - protein, 146 aa, Homo sapiens
  SITE (116): Xaa equals any of the naturally occurring L-amino acids
  SITE (124): Xaa equals any of the naturally occurring L-amino acids
YVKGFDNAMELVKNMTERIPQFKSVVEEIQKQKICGSLTLQHHMLEPVQRIPRYEMLLKDYLRKLPPDSLDWNDAKKSLEIISTAASHSNSAIRKMENLKKLLEIYEMLGEEEDIXNPSNELIXEGQILKLAARNTSAQERYLFLF

SEQ ID NO: 1013 - protein, 332 aa, Homo sapiens
  SITE (174): Xaa equals any of the naturally occurring L-amino acids
  SITE (179): Xaa equals any of the naturally occurring L-amino acids
  SITE (194): Xaa equals any of the naturally occurring L-amino acids
  SITE (196): Xaa equals any of the naturally occurring L-amino acids
  SITE (200): Xaa equals any of the naturally occurring L-amino acids
  SITE (254): Xaa equals any of the naturally occurring L-amino acids
  SITE (324): Xaa equals any of the naturally occurring L-amino acids
TCWARKRFSRKPSTVCKLLPANPRPQHGARRLCPPTLSILLRKAGGIRKPLASLHLSPVSSALRMESGRGSSTPPGPIAALGMPDTGPGSSSLGKLQALPVGPRAHCGDPVSLAAAGDGSPDIGPTGELSGSLKIPNRDSGIDSPSSSVAGENFPCEEGLEAGPSPTVLGAHAXMALDXQVPKVTPQEEADSDXGXEPDXENTPQKADKDAGLAQHSGPQKLLHIAQELLHTEETYVKRLHLLDQVFCTRLTDXGIPPEVIMGIFSNISSIHRFHGQFLLPELKTRITEEWDTNPRASGTSCRSWPHFLKMYRRVCSRTLTEPXGWVKHVDP

SEQ ID NO: 1014 - protein, 254 aa, Homo sapiens
  SITE (178): Xaa equals any of the naturally occurring L-amino acids
LCEPRGAGCHASCSSASAPSRPRYVRCGGEGGRHWGARSLLPGPQLETPGWTQGPGGKYGRPRVGVIAGTRSPTLSPSLNPGSAPPSGPGLDIDGLYRISGNLATIQKLRYKVDHDERLDLDDGRWEDVHVITGALKLFFRELPEPLFPFSHFRQFIAAIKLQDQARRSRCVRDLVRXLPAPNHDTLRMLFQHLCRVIEHGEQNRMSVQSVAIVFGPTLLRPEVEETSMPMTMVFQNQVVELILQQCADIFPPH

SEQ ID NO: 1015 - protein, 131 aa, Homo sapiens
  SITE (53): Xaa equals any of the naturally occurring L-amino acids
QSGLQHEGIFRVSGSQVEVNDIKNAFERGEDPLAGDQNDHDMDSIAGVLKLYXRGLEHPLFPKDIFHDLMACVTMDNLQERALHIRKVLLVLPKTTLIIMRYLFAFLNHLSQFSEENMMDPYNLAICFRGP

SEQ ID NO: 1016 - protein, 88 aa, Homo sapiens
LVGLQVVITVFDHRGVEAVKTAVKPHTLGHDVLQLTSGLVGAIVVAEAIHHLLILELVLVGNMVDDAILQQGLAQVDSFFRLADFTNF

SEQ ID NO: 1017 - protein, 146 aa, Homo sapiens
  SITE (134): Xaa equals any of the naturally occurring L-amino acids
  SITE (140): Xaa equals any of the naturally occurring L-amino acids
  SITE (142): Xaa equals any of the naturally occurring L-amino acids
ALLEIYEKDEKIQKHLQDSLADLKSLYNEWGCTNYINLGSFLIKPVQRVMRYPLLLMELLNSTPESHPDKVPLTNAVLAVKEINVNINEYKRRKDLVLKYRKGDEDSLMEKISKLNIHSIIKKSNRVSSHLKHXTGFAPXIXDESI

SEQ ID NO: 1018 - protein, 202 aa, Homo sapiens
  SITE (8): Xaa equals any of the naturally occurring L-amino acids
  SITE (15): Xaa equals any of the naturally occurring L-amino acids
  SITE (20): Xaa equals any of the naturally occurring L-amino acids
  SITE (184): Xaa equals any of the naturally occurring L-amino acids
  SITE (194): Xaa equals any of the naturally occurring L-amino acids
  SITE (198): Xaa equals any of the naturally occurring L-amino acids
CIVPCGCXPCGCSGXIGPLXPKQGVKSDDSISKIIYTGAKLLIFSICEQMGFPTRSPSAWKRKRNWRVESQQKSTCFSEDLVAEQLTYMDAQLFKKVVPHHCLGCIWSRRDKKENKHLAPTIRATISQFNTLTKCVVSTILGGKELKTQQRAKIIEKWINIAHECRLLKNFSSLRAIVSALQSXSIYRLKKTWXAVPXGPNA

SEQ ID NO: 1019 - protein, 168 aa, Homo sapiens
DLGQIVEGYMATMAAQGVPESLRGRDRIVFGNIQQIYEWHRDYFLQELQRCLKDPDWLAQLFIKHERRLHMYVVYCQNKPKSEHVVSEFGDSYFEELRQQLGHRLQLNDLLIKPVQRIMKYQLLLKDFLKYYNRAGMDTADLEQAVEVMCFVPKRCNDMMTLGKIAGI

SEQ ID NO: 1020 - protein, 374 aa, Homo sapiens
  SITE (64): Xaa equals any of the naturally occurring L-amino acids
  SITE (98): Xaa equals any of the naturally occurring L-amino acids
  SITE (121): Xaa equals any of the naturally occurring L-amino acids
  SITE (140): Xaa equals any of the naturally occurring L-amino acids
  SITE (300): Xaa equals any of the naturally occurring L-amino acids
  SITE (314): Xaa equals any of the naturally occurring L-amino acids
KQGRLCVGVGMATMAAQGVPESLRGRDRIVFGNILQIYEWHRDYFLQELQRCLKDPDWLAQLFXKHELRQQLGHRLQLNDLLIKPVQRIMKYQLLLKXFLKYYNRAGMDTADLEQAVEVMXFVPKRCNDMMTLGRLRGFXGKLTAQGKLLGQDTFWVTEPEAGGLLSSRGRERRVFLFEQIIIFSEALGGGVRGGTQPGYVYKNSIKVSCLGLEGNLQGDPCRFALTSRGPEGGIQRYVLQAADPAISQAWIKHVAQILESQRDFLNALQSPIEYQRRESQTNSLGRPRGPGVGSPGRIXLGDQAQGSTHTPIXGSLPSLLLSPKGEVARALLPLDKQALGDIPQAPHDSPPVSPTPKTPPCQARLAKLDEDEL

SEQ ID NO: 1021 - protein, 209 aa, Homo sapiens
  SITE (148): Xaa equals any of the naturally occurring L-amino acids
  SITE (150): Xaa equals any of the naturally occurring L-amino acids
  SITE (153): Xaa equals any of the naturally occurring L-amino acids
  SITE (154): Xaa equals any of the naturally occurring L-amino acids
RGQWQSASPLCATCGPALLRAPTRAAMTRSLFKGNFWSADILSTIGYDNIIQHLNNGRKNCKEFEDFLKERAAIEERYGKDLLNLSRKKPCGQSEINTLKRALEVFKQQVDNVAQCHIQLAQSLREEARKMEEFREKQKLQRKKTELXMXAIXXQKSLQFKKTMDAKKNYEQKCRDKDEAEQAVSRSANLVNPKQQEKLFVNWQLQRPQ

SEQ ID NO: 1022 - protein, 149 aa, Homo sapiens
  SITE (120): Xaa equals any of the naturally occurring L-amino acids
  SITE (132): Xaa equals any of the naturally occurring L-amino acids
  SITE (136): Xaa equals any of the naturally occurring L-amino acids
  SITE (141): Xaa equals any of the naturally occurring L-amino acids
GVADRLAGAEMQPPPRKVKPAQEVKLRFLEQLSILQTWQQREADLLEDIRSYSKQRAAIEREYGQALQKLAGPFLKREGHRSGEMDSRTVFGAWRCLLDATVAGGQTRLQASDRYRDLAXGTGRTPRSKCLXKEQXTSRGXKLEVCSLS

SEQ ID NO: 1023 - protein, 142 aa, Homo sapiens
RCGLYPEFNQVSFWVVREILTAQTLKIRAEILSHFVKIAKKLLELNNLHSLMSVVSALQSAPIFRLTKTWALLNRKDKTTFEKLDYLMSKEDNYKRTREYIRSLKMVPSIPYLGIYLLDLIYIDSAYPASGVSWKMNKDPIR

SEQ ID NO: 1024 - protein, 257 aa, Homo sapiens
  SITE (225): Xaa equals any of the naturally occurring L-amino acids
  SITE (227): Xaa equals any of the naturally occurring L-amino acids
VCEIERRALRTKGIYRVNGVKTRVEKLCQAFENGKELVELSQASPHDISNVLKLYLRQLPEPLISFRLYHELVGLAKDSLKAEAEAKAASRGRQDGSESEAVAVALAGRLRELLRDLPPENRASLQYLLRHLRRIVEVEQDNKMTPGNLGIVFGPTLLRPRPTEATVSLSSLVDYPHQARVIETLIVHYGLVFEEEPEETPGGQDESSNQRAEVVVQVPYLEAGXAXVYPLQEAAADGFRESRVVSNDSDSDLEEAS

SEQ ID NO: 1025 - protein, 234 aa, Homo sapiens
  SITE (5): Xaa equals any of the naturally occurring L-amino acids
  SITE (10): Xaa equals any of the naturally occurring L-amino acids
GSRSXPGPCXPRRIVEVEQDNKMTPGNLGIVFGPTLLRPRPTEATVSLSSLVDYPHQARVIETLIVHYGLVFEEEPEETPGGQDESSNQRAEVVVQVPYLEAGEAVVYPLQEAAADGCRESRVVSNDSDSDLEEASELLSSSEASALGHLSFLEQQQSEASLEVASGSHSGSEEQLEATAREDGDGDEDGPAQQLSGFNTNQSNNVLQAPLPPMRLRGGRMTLGSCRERQPEFV

SEQ ID NO: 1026 - protein, 228 aa, Homo sapiens
LRLRLHEEKVIKDRRHHLKTYPNCFVAKELIDWLIEHKEASDRETAIKLMQKLADRGIIHHVCDEHKEFKDVKLFYRFRKDDGTFPLDNEVKAFMRGQRLYEKLMSPENTLLQPREEEGVKYERTFMASEFLDWLVQEGEATTRKEAEQLCHRLMEHGIIQHVSSKHPFVDSNLLYQFRMNFRRRRRLMELLNEKSPSSQETHDSPFCLRKQSHDNRKSTSFMSMSCM

SEQ ID NO: 1027 - protein, 415 aa, Homo sapiens
PHGPKTMEEGGSTGSAGSDSSTSGSGGAQQRELERMAEVLVTGEQLRLRLHEEKVIKDRRHHLKTYPNCFVAKELIDWLIEHKEASDRETAIKLMQKLADRGIIHHVCDEHKEFKDVKLFYRFRKDDGTFPLDNEVKAFMRGQRLYEKLMSPENTLLQPREEEGVKYERTFMASEFLDWLVQEGEATTRKEAEQLCHRLMEHGIIQHVSSKHPFVDSNLLYQFRMNFRRRRRLMELLNEKSPSSQETHDSPFCLRKQSHDNRKSTSFMSVSPSKEIKIVSAVRRSSMSSCGSSGYFSSSPTLSSSPPVLCNPKSVLKRPVTSEELLTPGAPYARKTFTIVGDAVGWGFVVRGSKPCHIQAVDPSGPAAAAGMKVCQFVVSVNGLNVLHVDYRTVSNLILTGPRTIVMEVMEELEC

SEQ ID NO: 1028 - protein, 109 aa, Homo sapiens
  SITE (22): Xaa equals any of the naturally occurring L-amino acids
  SITE (86): Xaa equals any of the naturally occurring L-amino acids
  SITE (104): Xaa equals any of the naturally occurring L-amino acids
  SITE (105): Xaa equals any of the naturally occurring L-amino acids
DSAAVCLSEDLYPDINVITGIXKDYLRELPTPLITQPLYKVVLEAMARDPPNRVPPTTEGTRGLLSCLPDVERATLTLLLDHLRLXSSFHAYNRMTPQKPFWGXXPGFG

SEQ ID NO: 1029 - protein, 429 aa, Homo sapiens
  SITE (416): Xaa equals any of the naturally occurring L-amino acids
QVLVLVERRRTLYIQGERRLDFMGWLGAIQKAAASMGDTLSEQQLGDSDIPVIVYRCVDYITQCGLTSEGIYRKCGQTSKTQRLLESLRQDARSVHLKEGEQHVDDVSSALKRFLRDLPDGLFTRAQRLTWLEASEIEDEEEKVSRYRELLVRLPPVNRATVKALISHLYCVQCFSDTNQMNVHNLAIVFGPTLFQTDGQDYKAGRVVEDLINHYVVVFSVDEEELRKQREEITAIVKMRVAGTASGTQHAGDFICTVYLEEKKAETEQHIKVPASMTAEELTLEILDRRNVGIREKDYWTCFEVNEREEAERPLHFAEKVLPILHGLGTDSHLVVKKHQAMEAMLLYLASRVGDTKHGMMKFREDRSLLGLGLPSGGFHDRYFILNSSCLRLYKEVRSQRPWSGAPETSHRPEKXWLLRVSKSNWEWK

SEQ ID NO: 1030 - protein, 260 aa, Homo sapiens
  SITE (163): Xaa equals any of the naturally occurring L-amino acids
  SITE (173): Xaa equals any of the naturally occurring L-amino acids
  SITE (210): Xaa equals any of the naturally occurring L-amino acids
  SITE (256): Xaa equals any of the naturally occurring L-amino acids
  SITE (259): Xaa equals any of the naturally occurring L-amino acids
  SITE (260): Xaa equals any of the naturally occurring L-amino acids
GKFFLTEFWLRQRRRRPERAMDALKSAGRALIRSPSLAKQSWGGGGRHRKLPENWTDTRETLLEGMLFSLKYLGMTLVEQPKGEELSAAAIKRIVATAKASGKKLQKVTLKVSPRGIILTDNLTNQLIENVSIYRISYCTADKMHDKVFAYIAQSQHNQSLEXHAFLCTKRKXAQAVTLTVAQAFKVAFEFWQVSKEEKEKRDKASQEGXDVLGARQDCNPSLKSWSHWELLDLEETVKARCSKVQGQHHQLGRVXGPXX

SEQ ID NO: 1031 - protein, 194 aa, Homo sapiens
TANCSPLWLLPPADVTLDPETAHPNLVLSEDRKSVKFVETRLRDLPDTPRRFTFYPCVLATEGFTSGRHYWEVEVGDKTHWAVGVCRDSVSRKGELTPLPETGYWRVRLWNGDKYAATTTPFTPLHIKVKPKRVGIFLDYEAGTLSFYNVTDRSHIYTFTDTFTEKLWPLFYPGIRAGRKNAAPLTIRPPTDWE

SEQ ID NO: 1032 - protein, 208 aa, Homo sapiens
PGRIPRAAGFGTIRSTTCVYKGKWLYEVLISSQGLMQIGWCTISCRFNQEEGVGDTHNSYAYDGNRVRKWNVTTTNYGKAWAAGDIVSCLIDLDDGTLSFCLNGVSLGTAFENLSRGLGMAYFPAISLSFKESVAFNFGSRPLRYHFVKMAVDCSEALGEAGMRGSLPQGCHGLVAGPGCCRVSGGPCRVSKKTFLAAAWLVGCPCLH

SEQ ID NO: 1033 - protein, 266 aa, Homo sapiens
GNWKTWWRTRVRTCILPQRVIDVSGMWDQRLVRLALLQHLRAFYGIKVKGVRGQCDRRRHETAATEIGGKIFGVPFNALPHSAVPEYGHIPSFLVDACTSLEDHIHTEGLFRKSGSVIRLKALKNKVDHGEGCLSSAPPCDIAGLLKQFFRELPEPILPADLHEALLKAQQLGTEEKNKAILLLSCLLADHTVHVLRYFFNFLRNVSLRSSENKMDSSNLAVIFAPNLLQTSEGHEKMSSNAEKKVRLQAAVVQTLIDYASDIGKM

SEQ ID NO: 1034 - protein, 238 aa, Homo sapiens
  SITE (53): Xaa equals any of the naturally occurring L-amino acids
ELDDPVTSARLLPRWREAAELPQKNQRLEKYKDVIGCLPRVNRRTLATLIGHXYRVQKCAALNQMCTRNLALLFAPSVFQTDGRGEHEVRVLQELIDGYISVFDIDSDQVAQIDLEVSLITTWKDVQLSQAGDLIMEVYIEQQLPDNCVTLKVSPTLTAEELTNQVLEMRGTAAGMDLWVTFEIREHGELERPLHPKEKVLEQALQWCQLPEPCSASLLLKKVPLGPSWLAFFTGIPT

SEQ ID NO: 1035 - protein, 141 aa, Homo sapiens
  SITE (124): Xaa equals any of the naturally occurring L-amino acids
AAAAGRPGMAFMEKPPAGKVLLDDTVPLTAAIEASQSLQSHTEYIIRVQRGISVENSWQIVRRYSDFDLLNNSLQIAGLSLPLPPKKLIGNMDREFIAERQKGLQNYLNVITTNHILSNCDWLXSFRIQTTIPQTILRLPC

SEQ ID NO: 1036 - protein, 178 aa, Homo sapiens
  SITE (106): Xaa equals any of the naturally occurring L-amino acids
  SITE (107): Xaa equals any of the naturally occurring L-amino acids
  SITE (109): Xaa equals any of the naturally occurring L-amino acids
  SITE (111): Xaa equals any of the naturally occurring L-amino acids
  SITE (113): Xaa equals any of the naturally occurring L-amino acids
  SITE (115): Xaa equals any of the naturally occurring L-amino acids
  SITE (118): Xaa equals any of the naturally occurring L-amino acids
  SITE (141): Xaa equals any of the naturally occurring L-amino acids
  SITE (177): Xaa equals any of the naturally occurring L-amino acids
KFLARLAEEQEVNKMTPSNIAIVLGPNLLWPPEKEGDQAQLDAASVSSIQVVGVVEALIQSADTLFPGDINFNVSGLFSAVTLQDTVSDRLASEELPSTAVPTPAXXPXPXPXPXPAXGPALASAATKERTESEVPPRPAXPKVTRSPPETAAPVEDMARRTKRPAPAGPPCRPPGXR

SEQ ID NO: 1037 - protein, 167 aa, Homo sapiens
AIISGMNMSPVSRLKKTWGQSEDGQVFHPRAPDGPNGNFCNYRTALRGAAHRSLTAHSSREKIVIPFFSLLIKDIYFLNEGCANRLPNGHVNFEKFLELAKQVGEFITWKQVECPFEQDASITHYLYTAPIFSEDGLYLASYESESPENQTEKERWKALRSSILGKT

SEQ ID NO: 1038 - protein, 154 aa, Homo sapiens
  SITE (50): Xaa equals any of the naturally occurring L-amino acids
  SITE (150): Xaa equals any of the naturally occurring L-amino acids
GSTHASGEVGCYVASRPLTKDSNYFEVSIVDSGVRGTIAVGLVPQYYSLXHQPGWLPDSVAYHADDGKLYNGRAKGRQFGSKCNSGDRIGCGIEPVSFDVQTAQIFFTKNGKRVGSTIMPMSPDGLFPAVGMHSLGEEVRLHSTLSWAVXTTAS

SEQ ID NO: 1039 - protein, 336 aa, Homo sapiens
  SITE (132): Xaa equals any of the naturally occurring L-amino acids
  SITE (312): Xaa equals any of the naturally occurring L-amino acids
  SITE (319): Xaa equals any of the naturally occurring L-amino acids
  SITE (332): Xaa equals any of the naturally occurring L-amino acids
VDPSKCPASELPEHQARLRNSCEEPPRLTIHCLFCTSWFPAELGIVFSSWREACKERGSEVLGPRLVCASLFLRLLCPAILAPSLFGLAPDHPAPGPARTLTLIAKVIQNLANRAPFGEKEAYMGFMNSFLXEHGPAMQCFLDQVAMVDVDAAPSGYQGSGDLALQLAVLHAQLCTIFAELDQTTRDTLEPLPTILRAIEEGQPVLVSVPMRLPLPPAQVHSSLSAGRSPASWPPGTSPSTPLSSPRASLCAVSPLRELGPATAGRRAAPAAAPAGAAHAECPGPASCPPPPICGALAATQRLPEHGTSAPXPALDPGXRFAASEASVTLAXPNWN

SEQ ID NO: 1040 - protein, 332 aa, Homo sapiens
  SITE (72): Xaa equals any of the naturally occurring L-amino acids
  SITE (81): Xaa equals any of the naturally occurring L-amino acids
  SITE (89): Xaa equals any of the naturally occurring L-amino acids
  SITE (91): Xaa equals any of the naturally occurring L-amino acids
  SITE (106): Xaa equals any of the naturally occurring L-amino acids
  SITE (270): Xaa equals any of the naturally occurring L-amino acids
  SITE (275): Xaa equals any of the naturally occurring L-amino acids
  SITE (280): Xaa equals any of the naturally occurring L-amino acids
  SITE (283): Xaa equals any of the naturally occurring L-amino acids
  SITE (307): Xaa equals any of the naturally occurring L-amino acids
  SITE (313): Xaa equals any of the naturally occurring L-amino acids
  SITE (321): Xaa equals any of the naturally occurring L-amino acids
  SITE (329): Xaa equals any of the naturally occurring L-amino acids
AEGEPRPSRPLPFDDSHPLPQVYGVSLATHLQELGREIALPIEACVMMLLSEGMKEEGLFRLAAGASVLKRXKQTMASDPXSLEEFCSXPXAVAGALKSYLRELPXPLMTFDLYDDWMRAASLKEPGARLQALQEVCSRLPPENLSNLRYLMKFLARLAEEQEVNKMTPSNIAIVLGPNLLWPPEKEGDQAQLDAASVSSIQVVGVVEALIQSADTLFPGDINFNVSGLFSAVTLQDTVSDRLASEELPSTAVPTPATTPAPAPAPAPAXAPALXSAATXERXESEVPPRPASPKVTRSPPETAAPXEDMARXEMKLGLWXGEGRGTRXVGP

SEQ ID NO: 1041 - protein, 341 aa, Homo sapiens
  SITE (145): Xaa equals any of the naturally occurring L-amino acids
KVRLQVPVRNSRVDPRVRRIPLIFQKLISRIEERGLETEGLLRIPGAAIRIKNLCQELEAKFYEGTFNWESVKQHDAASLLKLFIRELPQPLLSVEYLKAFQAVQNLPTKKQQLQALNLLVILLPDANRDTLKALLEFLQRVIDXKEKNKMTVMNVAMVMAPNLFMCHALGLKSSEQREFVMAAGTANTMHLLIKYQKLLWTIPKFIVNQVRKQNTENHKKDKRAMKKLLKKMAYDREKYEKQDKSTNDADVPQGVIRVQAPHLSKVSMAIQLTEELKASDVLARFLSQESGVAQTLKKGEVFLYEIGGNIGERCLDDDTYMKDLYQLNPNAEWVIKSKPL

SEQ ID NO: 1042 - protein, 176 aa, Homo sapiens
  SITE (158): Xaa equals any of the naturally occurring L-amino acids
MCMVIFAPLFAIFAFATCGGYSGGLRLSVDCVNKTESNLSIDIAFAYPFRLHQVTFEVPTCEGKERQKLALIGDSSSSAEFFVTVAVFAFLYSLAATVVYIFFQNKYRENNRGPLIDFIVTVVFSFLWLVGSSAWAKGLSDVKVATDPKEVLLLMSAXKQAIQQMHGLSTALLCQA

SEQ ID NO: 1043 - protein, 179 aa, Homo sapiens
  SITE (141): Xaa equals any of the naturally occurring L-amino acids
  SITE (151): Xaa equals any of the naturally occurring L-amino acids
  SITE (155): Xaa equals any of the naturally occurring L-amino acids
IFLCTYRAFTTTQQVLDLLFKRYGRCDALTASSRYGCILPYSDEDGGPQDQLKNAISSILGTWLDQYSEDFCQPPDFPCLKQLVAYVQLNMPGSDLERRAHLLLAQLEHSEPIEAEPEALSPVPALKPTPELELTLTPARXPSQCRLQPRXQNQXQHNFKFKTKITPHRSGIPQGPKQL

SEQ ID NO: 1044 - protein, 372 aa, Homo sapiens
  SITE (43): Xaa equals any of the naturally occurring L-amino acids
  SITE (62): Xaa equals any of the naturally occurring L-amino acids
GTSLLGDPLGKAVATMEGEGDYRSHSLHFPGGGKVGSAQHDQXCPRGAQVRKNWGPSWVVLXVTAWCSTESHRRTAPSSGWGPGVSRPESSVDLRGAALAHGRHLSSRRNVLHIRTIPGHEFLLQSDHETELRAWHRALRTVIERLDRENPLELRLSGSGPAELSAGEDEEEESELVSKPLLRLSSRRSSIRGPEGTEQNRVRNKLKRLIAKRPPLQSLQERGLLRDQVFGCQLESLCQREGDTVPSFLRLCIAAVDKRGLDVDGIYRVSGNLAVVQKLRFLVDRERAVTSDGRYVFPEQPGQEGRLDLDSTEWDDIHVVTGALKLFLRELPQPLVPPLLLPHFRAALALSESGAVPLSDTRINRLNAKAQP

SEQ ID NO: 1045 - protein, 84 aa, Homo sapiens
  SITE (72): Xaa equals any of the naturally occurring L-amino acids
  SITE (84): Xaa equals any of the naturally occurring L-amino acids
SQFGIRMAKQLNLPENTDDWTKEDVNQWLESHKIDQKHREILTEQDVNGAVLKWLKKEHLVDMGITHGPAIXIEDYSKNCGNSX

SEQ ID NO: 1046 - protein, 141 aa, Homo sapiens
  SITE (69): Xaa equals any of the naturally occurring L-amino acids
VQRAPAQGPGSQGSPRVPDEAGAHRSPGTVPGDLSQTSEDQSLSDFEISNRALINVWIPSVFLRGKAAXAFHVYQVYIRIKDDEWNIYRRYTEFRSLHHKLQNKYPQVRAYNFPPKKAIGNKDAKFVEERRKQLQNYLRTS

SEQ ID NO: 1047 - protein, 212 aa, Homo sapiens
  SITE (1): Xaa equals any of the naturally occurring L-amino acids
XTPEESWVVFRRYTDFSRLNDKLKEMFPGFRLALPPKRWFKDNYNADFLEDRQLGLQAFLQNLVAHKDIANCLAVREFLCLDDPPGPFDSLEESRAFCETLEETNYRLQKELLEKQKEMESLKKLLSEKQLHIDTLENRIRTLSLEPEESLDVSETEGEQILKVESSALEVDQDVLDEESRADNKPCLSFSEPENAVSEIEVAEVAYDAEED

SEQ ID NO: 1048 - protein, 288 aa, Homo sapiens
  SITE (74): Xaa equals any of the naturally occurring L-amino acids
  SITE (102): Xaa equals any of the naturally occurring L-amino acids
  SITE (282): Xaa equals any of the naturally occurring L-amino acids
RKMLETCGDAENQLALELSQHEVFVEKEIVDPLYGIAEVEIPNIQKQRKQLARLVLDWDSVRARWNQAHKSSGXNFQGLPSKIDTLKEEMDEAGNKVEQCKXQLAADMYNFMAKEGEYGKFFVTLLEAQADYHRKALAVLEKTLPEMRAHQDKWAEKPAFGTPLEEHLKRSGREIALPIEACVMLLLETGMKEEGLFRIGAGASKLKKLKAALDCSTSHLDEFYSDPHAVAGALKSYLRELPEPLMTFNLYEEWTQVASVQDQDKKLQDLWRTCQKLPPQNXVNFRYV

SEQ ID NO: 1049 - protein, 330 aa, Homo sapiens
  SITE (23): Xaa equals any of the naturally occurring L-amino acids
DNGATRAQPSMPGQAVPCQEDTXPADAGVVGGQSWNRAWEPARGAASWDTWRNKAVVPPRRSGEPMVSMQAAEEIRILAVITIQAGVRGYLARRRIRLWHRGAMVIQATWRGYRVRRNLAHLCRATTTIQSAWRGYSTRRDQARHWQMLHPVTWVELGSRAGVMSDRSWFQDGRARTVSDHRCFQSCQAHACSVCHSLSSRIGSPPSVVMLVGSSPRTCHTCGRTQPTRVVQGMGQGTEGPGAVSWASAYQLAALSPRQPHRQDKAATAIQSAWRGFKIRQQMRQQQMAAKIVQATWRGHHTRSCLKNTEALLGPADPSASSRHMHWPGI

SEQ ID NO: 1050 - protein, 310 aa, Homo sapiens
  SITE (27): Xaa equals any of the naturally occurring L-amino acids
  SITE (29): Xaa equals any of the naturally occurring L-amino acids
  SITE (38): Xaa equals any of the naturally occurring L-amino acids
  SITE (44): Xaa equals any of the naturally occurring L-amino acids
  SITE (82): Xaa equals any of the naturally occurring L-amino acids
  SITE (89): Xaa equals any of the naturally occurring L-amino acids
  SITE (113): Xaa equals any of the naturally occurring L-amino acids
AIAMLLCHGKPTRIGGVETKNWTVPRXLXEFQNLHRKXSECVPXLKKVQLPSLSKLPFKSIDQKFMEKSKNQLNKFLQNLLXDERLCQXEALYAFLSPSPDYLKVIDVQGKKXSFSLSSFLERLPRDFFSHQEEETEEDSDLSDYGDDVDGRKDALAEPCFMLIGEIFELRGMFKWVRRTLIALVQVTFGRTINKQIRDTVSWIFSEQMLVYYINIFRDAFWPNGKLAPPTTIRSKEQSQETKQRAQQKLLENIPDMLQSLVGQQNARHGIIKIFNALQETRANKHLLYALMELLLIELCPELRVHLDQL

SEQ ID NO: 1051 - protein, 278 aa, Homo sapiens
  SITE (1): Xaa equals any of the naturally occurring L-amino acids
  SITE (6): Xaa equals any of the naturally occurring L-amino acids
  SITE (17): Xaa equals any of the naturally occurring L-amino acids
  SITE (250): Xaa equals any of the naturally occurring L-amino acids
XERYAXRYRSGIPGSTXAMDPLPAAAVGAAAEAEADEEADPPASDLPTPQAIEPQAIVQQVPAPSRMQMPQGNPLLLSHTLQELLARDTVQVELIPEKKGLFLKHVEYEVSSQRFKSSVYRRYNDFVVFQEMLLHKFPYRMVPALPPKRMLGADREFIEARRRALKRFVNLVARHPLFSEDVVLKLFLSFSGSDVQNKLKESAQCVGDEFLNCKLATRAKDFLPADIQAQFAISRELIRNIYNSFHKLRXRAERIACAGHRQCGRSSHIREGAKCNRV

SEQ ID NO: 1052 - protein, 173 aa, Homo sapiens
ACPQLALSRLAGAAMEVYIPSFRYEESDLERGYTVFKIEVLMNGRKHFVEKRYSEFHALHKKLKKCIKTPEIPSKHVRNWVPKVLEQRRQGLETYLQAVILENEELPKLFLDFLNVRHLPSLPKAESCGSFDETESEESSKLSHQPVLLFLRDPYVLPAASGNQTCHLLTALY

SEQ ID NO: 1053 - protein, 126 aa, Homo sapiens
  SITE (78): Xaa equals any of the naturally occurring L-amino acids
  SITE (115): Xaa equals any of the naturally occurring L-amino acids
ALEPALPAQAKEELAAAMVRVLRATGRAQALVTDLGTAELARCGGREALLFRENTLATKAIDEYMKLVAQDYLQETLXQVVRRLCASTEDCEVDPSKCPASELPEHQARLRNSCXEVFETIIHSYE

SEQ ID NO: 1054 - protein, 584 aa, Homo sapiens
  SITE (50): Xaa equals any of the naturally occurring L-amino acids
  SITE (331): Xaa equals any of the naturally occurring L-amino acids
  SITE (545): Xaa equals any of the naturally occurring L-amino acids
NPKSGGNQGAKIIQSFLWYLNPRQVFDLSQGGPKEALEMYRKVHNLRILXCGGDGTVGWILSTLDQLRLKPPPPVAILPLGTGNDLARTLNWGGGYTDEPVSKILSHVEEGNVVQLDRWDLHAEPNPEAGPEDRDEGATDRLPLDVFNNYFSLGFDAHVTLEFHESREANPEKFNSRFRNKMFYAGTAFSDFLMGSSKDLAKHIRVVCDGMDLTPKIQDLKPQCVVFLNIPRYCAGTMPWGHPGEHHDFEPQRHDDGYLEVIGFTMTSLAALQVGGHGERLTQCREVVLTTSKAIPVQVDGEPCKLAASRIRIALRNQATMVQKAKRRSAXPLHSDQQPVPEQLRIQVSRVSMHDYEALHYDKEQLKEASVPLGTVVVPGDSDLELCRAHIERLQQEPDGAGAKSPTCQKLSPKWCFLDATTASRFYRIDRAQEHLNYVTEIAQDEIYILDPELLGASARPDLPTPTSPLPTSPCSPTPRSLQGDAAPPQGEELIEAAKRNDFCKLQELHRAGGDLMHRDEQSRTLLHHASALAARMWSATCWTXPPQRSLMRWRKTGRPVCTKQRPWASAPSATTSWRPGPRS

SEQ ID NO: 1055 - protein, 99 aa, Homo sapiens
  SITE (2): Xaa equals any of the naturally occurring L-amino acids
  SITE (4): Xaa equals any of the naturally occurring L-amino acids
  SITE (52): Xaa equals any of the naturally occurring L-amino acids
LXEXVSVRKRPRHSRSVISSPRISSRTSSLSNIKEKRIVIPKAKISISKEGXKSPGNQEKRVKLKGKINIRAQLHLRSAPSRPFHPVEKSGRPGSVPTS

SEQ ID NO: 1056 - protein, 213 aa, Homo sapiens
  SITE (2): Xaa equals any of the naturally occurring L-amino acids
  SITE (9): Xaa equals any of the naturally occurring L-amino acids
  SITE (17): Xaa equals any of the naturally occurring L-amino acids
  SITE (79): Xaa equals any of the naturally occurring L-amino acids
  SITE (80): Xaa equals any of the naturally occurring L-amino acids
  SITE (86): Xaa equals any of the naturally occurring L-amino acids
YXRIDWPNXLVFIVKTXSRTFYLVAKTEQEMQVWVHSISQVCNLGHLEDGADSMESLSYTPSSLQPSSASSLLTAHAAXXSLPRDXPNTNAVATEETRSESELLFLPDYLVLSNCETGRLHHTSLPTRCDSWSNSDRSLEQASFDDVFVDCLQPLPSSHLVHPSCHGSGAQEVPSSRPQAALIWSREINGPPRGPLVFFTIAGKFLKFHHSGR

SEQ ID NO: 1057 - protein, 153 aa, Homo sapiens
LTSGFLSGYGISVWVISWQRGAGSMGGKKGAGRGWLQGGGRVREALHGICTILQVAKVADLTDAVHPHLHFLLSFGHQVECTGSSLDNEHEIILKFLPNKAGAHMLPHCTLAEVYHPDGLAGVLVPVVLQDIGVAAHAASPEDKPALAPGVAL

SEQ ID NO: 1058 - protein, 416 aa, Homo sapiens
  SITE (292): Xaa equals any of the naturally occurring L-amino acids
RVSYSHGLRKELLKSIWYAFTALDVEKSGKVSKSQLKVLSHNLYTVLHIPHDPVALEEHFRDDDDGPVSSQGYMPYLNKYILDKVEEGAFVKEHFDELCWTLTAKKNYRADSNGNSMLSNQDAFRLWCLFNFLSEDKYPLIMVPDEVEYLLKKVLSSMSLEVSLGELEELLAQEAQVAQTTGGLSVWQFLELFNSGRCLRGVGRDTLSMAIHEVYQELIQDVLKQGYLWKRGHLRRNWAERWFQLQPSCLCYFGSEECKEKRGIIPLDAHCCVEVLPDRDGKRCMFCVKTAXRTYEMSASDTRQRQEWTAAIQMAIRLQAEGKTSLHKDLKQKRREQREQRERRRAARKRSCCGCSSCRRRRSGSCRSWSCCRRRTAGRAAAAGGGGTAPQPAPRAAAGARGPTARGGAGPGLHAG

SEQ ID NO: 1059 - protein, 166 aa, Homo sapiens
  SITE (141): Xaa equals any of the naturally occurring L-amino acids
  SITE (162): Xaa equals any of the naturally occurring L-amino acids
  SITE (163): Xaa equals any of the naturally occurring L-amino acids
MSSSYESYDEEEEDGKGKKTRHQWPSEEASMDLVKDAKICAFLLRKKRFGQWTKLLCVIKDTKLLCYKSSKDQQPQMELPLQGCNITYIPKDSKKKKHELKITQQGTDPLVLAVQSKEQAEQWLKVIKEAYSGCSGPVDSXCPPPPSSPVHKAELEKNCLRXXQLK

SEQ ID NO: 1060 - protein, 244 aa, Homo sapiens
  SITE (2): Xaa equals any of the naturally occurring L-amino acids
  SITE (190): Xaa equals any of the naturally occurring L-amino acids
  SITE (195): Xaa equals any of the naturally occurring L-amino acids
SXDKVPPDSALESPFEEMALVRGGWLWRQSSILRRWKRNWFALWLDGTLGYYHDETAQDEEDRVLIHFNVRDIKIGPECHDVQPPEGRSRDGLLTVNLREGGRLHLCAETKDDALAWKTALLEANSTPVRVYSPYQDYYEVVPPNAHEATYVRSYYGPPYAGPGVTHVIVREDPCYSAGAPLAMGMLAGXPLGGXGLAHVVALLVLSPGTRSTDPCAWIARLLFLLDPILYHPSPVPLWPYPLH

SEQ ID NO: 1061 - protein, 205 aa, Homo sapiens
  SITE (20): Xaa equals any of the naturally occurring L-amino acids
  SITE (39): Xaa equals any of the naturally occurring L-amino acids
ARAAWPGVDAVAEPRGAGRXWRTAGPRRTRMEEEGVKEXGEKPRGAQMVDKAGWIKKSSGGLLGFWKDRYLLLCQAQLLVYENEDDQKCVETVELGSYEKCQDLRALLKRKHRFILLRSPGNKVSDIKFQAPTGEEKESWIKALNEGINRGKNKAFDEVKVDKSCALEHVTRDRVRGGQRRRPPTRVHLKEVASAASDGLLRLGS

SEQ ID NO: 1062 - protein, 118 aa, Homo sapiens
  SITE (101): Xaa equals any of the naturally occurring L-amino acids
WEPFPSEQQPCPASVLSSQQGKSISLIMEENNDSTENPQQGQGRQNAIKCGWLRKQGGFVKTWHTRWFVLKGDQLYYFKDEDETKPLEYLTTSGDSVWLVXSWGRYHRYLVGRSRGAF

SEQ ID NO: 1063 - protein, 250 aa, Homo sapiens
KMVDRLANSEANTRRISIVENCFGAAGQPLTIPGRVLIGEGVLTKLCRKKPKARQFFLFNDILVYGNIVIQKKKYNKQHIIPLENVTIDSIKDEGDLRNGWLIKTPTKSFAVYAATATEKSEWMNHINKCVTDLLSKSGKTPSNEHAAVWVPDSEATVCMRCQKAKFTPVNRRHHCRKCGFVVCGPCSEKRFLLPSQSSKPVRICDFCYDLLSAGDMATCQPARSDSYSQSLKSPLNDMSDDDDDDDSSD

SEQ ID NO: 1064 - protein, 354 aa, Homo sapiens
  SITE (6): Xaa equals any of the naturally occurring L-amino acids
  SITE (17): Xaa equals any of the naturally occurring L-amino acids
  SITE (30): Xaa equals any of the naturally occurring L-amino acids
  SITE (34): Xaa equals any of the naturally occurring L-amino acids
  SITE (38): Xaa equals any of the naturally occurring L-amino acids
  SITE (40): Xaa equals any of the naturally occurring L-amino acids
  SITE (41): Xaa equals any of the naturally occurring L-amino acids
  SITE (145): Xaa equals any of the naturally occurring L-amino acids
  SITE (151): Xaa equals any of the naturally occurring L-amino acids
  SITE (165): Xaa equals any of the naturally occurring L-amino acids
  SITE (166): Xaa equals any of the naturally occurring L-amino acids
  SITE (204): Xaa equals any of the naturally occurring L-amino acids
  SITE (214): Xaa equals any of the naturally occurring L-amino acids
  SITE (245): Xaa equals any of the naturally occurring L-amino acids
  SITE (251): Xaa equals any of the naturally occurring L-amino acids
  SITE (342): Xaa equals any of the naturally occurring L-amino acids
  SITE (354): Xaa equals any of the naturally occurring L-amino acids
SATSSXTTCACTPPEPXPTTTEDEGLPAAXPIPXRRSXLXXTCFTTPSTAAPDPVLPPLPAKRHLAELSVPPVPPRTGPPRLLVSLPTKEEESLLPSLSSPPQPQSEEPLSTLPQGPPQPPSPPPCPPEIPPKPVRLFPEFDDSXYDEVPXEGPGAPARVMTKKXXPPPSRVPRAVRVASLLSEGEELSGDDQGDEEEDDHAYXGVPNGGWHTXSLSLSLPSTIAAPHPMDGPPGGSTPVTPVIXAGWLDXNPPQGSYIYQKRWVRLDTDHLRYFDSNKDAYSKRFISVACISHVAAIGDQKFEVITNNRTFAFRAESDVERKEWMQALQQAMAEQRARARXSSAYLLGVPGSX

SEQ ID NO: 1065 - protein, 240 aa, Homo sapiens
EELTLEILDRRNVGIREKDYWTCFEVNEREEAERPLHFAEKVLPILHGLGTDSHLVVKKHQAMEAMLLYLASRVGDTKHGMMKFREDRSLLGLGLPSGGFHDRYFILNSSCLRLYKEVRSHRPEKEWPIKSLKVYLGVKKKLRPPTCWGFTVVHETEKHEKQQWYLCCDTQMELREWFATFLFVQHDGLVWPSEPSRVSRAVPEVRLGSVSLIPLRGSENEMRRSVAAFTADPLSLLRNV

SEQ ID NO: 1066 - protein, 94 aa, Homo sapiens
  SITE (32): Xaa equals any of the naturally occurring L-amino acids
SNPPKSSSLSLASSASTISSLSSLSPKKPTRXVNKIHAFGKRGNALRRDPNLPVHIRGWLHKQDSSGLRLWKRRWFVLSGHCLFYYKDSRERVS

SEQ ID NO: 1067 - protein, 68 aa, Homo sapiens
  SITE (54): Xaa equals any of the naturally occurring L-amino acids
KFEIWYNAREEVYIVQAPTPEIKAAWVNEIRKVLTSQLQACREASQHRALEQSXSLPLPAPTSTSPSR

SEQ ID NO: 1068 - protein, 133 aa, Homo sapiens
  SITE (30): Xaa equals any of the naturally occurring L-amino acids
  SITE (46): Xaa equals any of the naturally occurring L-amino acids
  SITE (67): Xaa equals any of the naturally occurring L-amino acids
GKRGDSPDPPSCSQARSLTRYLPIRKEDFXLKTHIESSGHGVDTCXHVVLSSKVCRGYLVKMGGKIXSWKKRWFVFDRLKRTLSYYVDKHETKLKGVIYFQAIEEVYYDHLRSAAKSPNPALTFCVKTHDRLY

SEQ ID NO: 1069 - protein, 302 aa, Homo sapiens
  SITE (257): Xaa equals any of the naturally occurring L-amino acids
  SITE (263): Xaa equals any of the naturally occurring L-amino acids
  SITE (270): Xaa equals any of the naturally occurring L-amino acids
  SITE (277): Xaa equals any of the naturally occurring L-amino acids
  SITE (278): Xaa equals any of the naturally occurring L-amino acids
NSAEVDSIPKSLSDSLSPSLSSGTLSTSTSISSQISTTTFESAITPSESSGYDSGDIESLVDREKELATKCLQLLTHTFNREFSQVHGSVSDCKLSDISPIGRDPSESSFSSATLTPSSTCPSLVDSRSNSLDQKTPEANSRASSPCPEFEQFQIVPAVETPYLARAGKNEFLNLVPDIEEIRPSSVVSKKGYLHFKEPLYSNWAKHFVVVRRPYVFIYNSDKDPVERGIINLSTAQVEYSEDQQAMVKTPNTFAVXTKHRGXLLQALNXKDMNDWXXAFNPLLAGTIRSKLSRRCPSQSKY

SEQ ID NO: 1070 - protein, 254 aa, Homo sapiens
  SITE (244): Xaa equals any of the naturally occurring L-amino acids
  SITE (248): Xaa equals any of the naturally occurring L-amino acids
PTRPPTRPPTRPSRRGIAVASWCSPRWFAGEEMAFVKSGWLLRQSTILKRWKKNWFDLWSDGHLIYYDDQTRQNIEDKVHMPMDCINIRTGQECRDTQPPDGKSKDCMLQIVCRDGKTISLCAESTDDCLAWKFTLQDSRTNTAYVGSAVMTDETSVVSSPPPYTAYAAPAPEQAYGYGPYGGAYPPGTQVVYAANGQAYAVPYQYPYAGLYGQQPANQVIIRERYRDNDSDLALGMLAGAATXMALXSLFWVF

SEQ ID NO: 1071 - protein, 558 aa, Homo sapiens
  SITE (125): Xaa equals any of the naturally occurring L-amino acids
DLFSDVLEEGELDMEKSQEEMDQALAESSEEQEDALNISSMSLLAPLAQTVGVVSPESLVSTPRLELKDTSRSDESPKPGKFQRTRVPRAESGDSLGSEDRDLLYSIDAYRSQRFKETERPSIKXVIVRKEDVTSKLDEKNNAFPCQVNIKQKMQELNNEINMQQTVIYQASQALNCCVDEEHGKGSLEEAEAERLLLIATGKRTLLIDELNKLKNEGPQRKNKASPQSEFMPSKGSVTLSEIRLPLKADFVCSTVQKPDAANYYYLIILKAGAENMVATPLASTSNSLNGDALTFTTTFTLQDVSNDFEINIEVYSLVQKKDPSGLDKKKKTSKSKAITPKRLLTSITTKSNIHSSVMASPGGLSAVRTSNFALVGSYTLSLSSVGNTKFVLDKVPFLSSLEGHIYLKIKCQVNSSVEERGFLTIFEDVSGFGAWHRRWCVLSGNCISYWTYPDDEKRKNPIGRINLANCTSRQIEPANREFCARRNTFELITVRPQREDDRETLVSQCRDTLCVTKNWLSADTKEERDLWMQKLNQVLVDIRLWQPDACYKPIGKP

SEQ ID NO: 1072 - protein, 122 aa, Homo sapiens
  SITE (49): Xaa equals any of the naturally occurring L-amino acids
  SITE (66): Xaa equals any of the naturally occurring L-amino acids
  SITE (82): Xaa equals any of the naturally occurring L-amino acids
CSSSEMPYVDRQNRICGFLDIEENENSGKFLRRYFILDTREDSFVWYMXNPQNLPSGSSRVGAIKXTYISKVSDATKLRPKXEFCFVMNAGMRKYFLQANDPAGPSGMGKCVKQSYKNFSTK

SEQ ID NO: 1073 - protein, 348 aa, Homo sapiens
ADAWADAWVNDTVVPTSPSADSTVLLAPSVQDSGSLHNSSSGESTYCMPQNAGDLPSPDGDYDYDQDDYEDGAITSGSSVTFSNSYGSQWSPDYRCSVGTYNSSGAYRFSSEGAQSSFEDSEEDFDSRFDTDDELSYRRDSVYSCVTLPYFHSFLYMKGGLMNSWKRRWCVLKDETFLWFRSKQEALKQGWLHKKGGGSSTLSRRNWKKRWFVLRQSKLMYFENDSEEKLKGTVEVRTAKEIIDNTTKENGIDIIMADRTFHLIAESPEDASQWFSVLSQVHASTDQEIQEMHDEQANPQNAVGTLDVGLIDSVCASDSPDRPNSFVIITANRVLHCNADTPERCTTG

SEQ ID NO: 1074 - protein, 128 aa, Homo sapiens
DPRVRWSWEPFPSEQQPCPASVLSSQQGKSISLIMEENNDSTENPQQGQGRQNAIKCGWLRKQGGFVKTWHTRWFVLKGDQLYYSKMKMKPSPWVLFFCLEIKFSEHPCNEENPGKFLFEVVPGKIFS

SEQ ID NO: 1075 - protein, 143 aa, Homo sapiens
HASDHLFFFAFSYCWSWEPFPSEQQPCPASVLSSQQGKSISLIMEENNDSTENPQQGQGRQNAIKCGWLRKQGGFVKTWHTRWFVLKGDQLYYFKDEDETKPLGTIFLPGNKVSEHPCNEENPGKFLFEVVPGRRSRSDDSKS

SEQ ID NO: 1076 - protein, 131 aa, Homo sapiens
PGSHTILRRSQSYIPTSGCRASTGPPLIKSGYCVKQGNVRKSWKRRFFALDDFTICYFKCEQDREPLRTIFLKDVLKTHECLVKSGDLLMRDNLFEIITSSRTFYVQADSPEDMHSWIKEIGAAVQALKCH

SEQ ID NO: 1077 - protein, 155 aa, Homo sapiens
  SITE (140): Xaa equals any of the naturally occurring L-amino acids
  SITE (144): Xaa equals any of the naturally occurring L-amino acids
RWAAVPCRRALLLCNGMRYKLLQEGDIQVCVIRHPRTFLSKILTSKFLRRWEPHHLTLADNSLASATPTGYMENSVSYSAIEDVQLLSWENAPKYCLQLTIPGGTVLLQAANSYLRDQWFHSLQWKKKIYKYKKVLSNPXRWEXVLKEIRTLVDI

SEQ ID NO: 1078 - protein, 208 aa, Homo sapiens; identical to SEQ ID NO: 652

SEQ ID NO: 1079 - protein, 159 aa, Homo sapiens
  SITE (58): Xaa equals any of the naturally occurring L-amino acids
  SITE (65): Xaa equals any of the naturally occurring L-amino acids
  SITE (66): Xaa equals any of the naturally occurring L-amino acids
  SITE (73): Xaa equals any of the naturally occurring L-amino acids
TDHAPLGLILLENCQVEPHLKAAEPYAFTILTPGVEGTGGRAYKLAAETQEELETWLXALAGASXXRLAGLLXPLPPHQNPILGAVPGNWQEPISSPEDSGFLATVSTPSSFQELHEHFGKEIRVLHVVHRELQAASDNGDSRSQAKMEQELNQCLMSD

SEQ ID NO: 1080 - protein, 512 aa, Homo sapiens; identical to SEQ ID NO: 654
  SITE (406): Xaa equals any of the naturally occurring L-amino acids
  SITE (410): Xaa equals any of the naturally occurring L-amino acids
  SITE (411): Xaa equals any of the naturally occurring L-amino acids
  SITE (471): Xaa equals any of the naturally occurring L-amino acids
  SITE (496): Xaa equals any of the naturally occurring L-amino acids

SEQ ID NO: 1081 - protein, 286 aa, Homo sapiens
  SITE (200): Xaa equals any of the naturally occurring L-amino acids
RSGRVGFLHRSSSFPTPERALFASPSPDPSPRGLGASSGAAEGAGAGLLLGCRASMSDNQSWNSSGSEEDPETESGPPVERCGVLSKWTNYIHGWQDRWVVLKNNALSYYKSEDETEYGCRGSICLSKAVITPHDFDECRFDISVNDSVWYLRAQDPDHRQQWIDAIEQHKTESGYGSESSLRRHGSMVSLVSGASGYSXTSTSSFKKGHSLREKLAEMETFRDILCRQVDTLQKYFDACADAVSKDELQRDKVVEDDEDDFPTTRSDGDFLHSTNGNKEKLFPHV

SEQ ID NO: 1082 - protein, 191 aa, Homo sapiens
  SITE (47): Xaa equals any of the naturally occurring L-amino acids
  SITE (62): Xaa equals any of the naturally occurring L-amino acids
  SITE (64): Xaa equals any of the naturally occurring L-amino acids
  SITE (128): Xaa equals any of the naturally occurring L-amino acids
  SITE (132): Xaa equals any of the naturally occurring L-amino acids
  SITE (151): Xaa equals any of the naturally occurring L-amino acids
  SITE (190): Xaa equals any of the naturally occurring L-amino acids
FGDKLPGGDRDRMTANHESYLLMASTQNDMEDWVKSIRRVIWGPFGXATQMYTRWHHFLSCXSXNFQKPVIPYAKYEDFLSCAKLLSKEEEAGVKELAKQVKSLPVVNYNLLKYICRFLDEVQSYSGXNKMXVQNLATVFGPNILRPKVEXPLTIMEGTVVVQQLMSVMISKHDCLFPKDAELQKQAPRXE

SEQ ID NO: 1083 - protein, 178 aa, Homo sapiens
ELEHKLNQAPEKWQQLWERVTVDLKEEPRTDRSQRHLSRSPGIVSTNLPSYQKRSLLHLPDSSMGEEQNSSISPSNGVERRAATLYSQYTSKNDENRSFEGTLYKRGALLKGWKPRWFVLDVTKHQLRYYDSGEDTSCKGHIDLAEVEMVIPAGPSMGAPKHTSDKAFFDLKTSKRVL

SEQ ID NO: 1084 - protein, 301 aa, Homo sapiens; identical to SEQ ID NO: 660

SEQ ID NO: 1085 - protein, 109 aa, Homo sapiens
  SITE (15): Xaa equals any of the naturally occurring L-amino acids
LTGSSRSSPVPSLLXFNSMILYCVPKLRLMGQKFSVREKMDISGLQVQDIVKPNTAHTFIITGRKRSLELQTRTEEEKKEWIQIIQATIEKHKQNSETFKAFGGAFSQV

SEQ ID NO: 1086 - protein, 132 aa, Homo sapiens
  SITE (100): Xaa equals any of the naturally occurring L-amino acids
FADHVETAGHNIDTCYHVSITEKTCRGFLIKMGGKIKTWKKRWFVFDRNKRTFSYYADKHETKLKGVIYFQAIEEVYYDHLKNANKSPNPLLTFSVKTHXRIYYMVAPSPEAMRIWMDVIVTGAEGYTHFLL

SEQ ID NO: 1087 - protein, 364 aa, Homo sapiens
  SITE (25): Xaa equals any of the naturally occurring L-amino acids
  SITE (81): Xaa equals any of the naturally occurring L-amino acids
SWEVVEGLRGEMNYTQEPPVQKGFXLKKRKWPLKGWHKRFFYLDKGILKYAKSQTDIEREKLHGCIDVGLSVMSVKKSSKXIDLDTEEHIYHLKVKSEEVFDEWVSKLRHHRMYRQNEIAMFPHEVNHFFSGSTITDSSSGVFDSISSRKRTVISKQNLFQTGSNVSFSCGGETRVPLWLQSFRGHGKMLQRPGALSCLPGRNEPAPAKHGTSCIGHTRAPAINAIQVPKPFSGPVRLHSSNPNLSTLDFGEEKNYSDGSETSSEFSKMQEDLCHIAHKVYFTLRSAFNIMSAEREKLKQLMEQDASSSPSAQVIGLKNALSSALAQNTDLKERLRRIHAESLLLDSPAVAKSGDNLGRGKLQR

SEQ ID NO: 1088 - protein, 238 aa, Homo sapiens
  SITE (7): Xaa equals any of the naturally occurring L-amino acids
  SITE (137): Xaa equals any of the naturally occurring L-amino acids
  SITE (147): Xaa equals any of the naturally occurring L-amino acids
  SITE (238): Xaa equals any of the naturally occurring L-amino acids
QKLTELXRDLVGIENLIAPGREFIREGCLHKLTKKGLQQRMFFLFSDMLLYTSKGVAGTSHFRIRGLLPLQGMLVEESDNEWSVPHCFTIYAAQKTIVVAASTRLEKEKWMLDLNSAIQAAKSGGDTAPALPGRTVXLVPPDPPTRXLWSRSQKMMLGVSAAPWRGMAAPGQHHNARVLGTGTPACPGQDHSAAVENQAFRISAKKVQKQVMGWQKLWVVFTNFCFVLLTKLIRDDYX

SEQ ID NO: 1089 - protein, 383 aa, Homo sapiens
  SITE (266): Xaa equals any of the naturally occurring L-amino acids
RGPGLLRCGLEGWARGRRRSRQLETMVDHLANTEINSQRIAAVESCFGASGQPLALPGRVLLGEGVLTKECRKKAKPRIFFLFNDILVYGSIVLNKRKYRSQHIIPLEEVTLELLPETLQAKNRWMIKTAKKSFVVSAASATERQEWISHIEECVRRQLRATGRPPSTEHAAPWIPDKATDICMRCTQTRFSALTRRHHCRKCGFVVCAECSRQRFLLPRLSPKPVRVCSLCYRELAAQQRQEEAEEQGAGSPGQPAHLARPICGXPVEMTMTPTRTRRAAGTATGPAAWSSTPRGWPGLPSTADPRPAEHLSPSQLHCPGPQEGSSRSCPGLRDPIPWWQVQRWGVALSGLPVPFCWTLCPYGFTAGNAFPFRKPQNTHRSW

SEQ ID NO: 1090 - protein, 93 aa, Homo sapiens
MASIMEGPLSKWTNVMKGWQYRWFVLDYNAGLLSYYTSKDKMMRGSRRGCVRLRGAVIGIDDEDDSTFTITVDQKTFHFRPVMLMSERSGSMP

SEQ ID NO: 1091 - protein, 91 aa, Homo sapiens
WLWSTAEINKFSVRISLGGGPDDAKEIMRHSFFSGVNWQDVYDKKLVPPFKPQVTSETDTRYFDEEFTAQTITITPPEKYDEDGMDCMDNE

SEQ ID NO: 1092 - protein, 71 aa, Homo sapiens
KLKNKLTLDSWLRVEVFFKLWRKHFCKSLMTHFRCSKNKHPFHVCLEKEITEAFLTNTLWLKMFSRIGQWG

SEQ ID NO: 1093 - protein, 202 aa, Homo sapiens
RSEDLIQRLICSRERRLGQNGIEDFKKHAFFEGLNWENIRNLEAPYIPDVSSPSDTSNFDVDDDVLRNTEILPPGSHTGFSGLHLPFIGFTFTTESCFSDRGSLKSIMQSNTLTKDEDVQRDLEHSLQMEAYERRIRRLEQEKLELSRKLQESTQTVQSLHGSSRALSNSNRDKEIKKLNEEIERLKNKIADSNRASRGGAR

SEQ ID NO: 1094 - protein, 134 aa, Homo sapiens
  SITE (39): Xaa equals any of the naturally occurring L-amino acids
PDVSSPSDTSNFDVDDDVLRNTEILPPGSHTGFSGLHLXFIGFTFTTESCFSDRGSLKSIMQSNTLTKDEDVQRDLEHSLQMEAYERRIRRLEQEKLELSRKLQESTQTRAVPPRVISGPPAIQTRDKEIKKLK

SEQ ID NO: 1095 - protein, 171 aa, Homo sapiens
  SITE (129): Xaa equals any of the naturally occurring L-amino acids
  SITE (155): Xaa equals any of the naturally occurring L-amino acids
  SITE (159): Xaa equals any of the naturally occurring L-amino acids
  SITE (162): Xaa equals any of the naturally occurring L-amino acids
  SITE (167): Xaa equals any of the naturally occurring L-amino acids
SYHLLVAGRVSQSWAALPPVACWGCCEGSFASQLLRVVSVLLHPSCPSLPELPLWGAGGLLLSDISPAWRPLGDPGALKVLSTLEGVLGVGSEAHDCPVCPPLQLSPPFKPQVTSETDTRYFDEEFTAXMITITPPDQGEGPLPAPATPFSLHTXRGLXCSXFLASXVLKI

SEQ ID NO: 1096 - protein, 151 aa, Homo sapiens
  SITE (106): Xaa equals any of the naturally occurring L-amino acids
GKLVRLQVPVRNSRVDPRVRFLACFSVVQPSSFQNITEKWLPEIRTHNPQAPVLLVGTQADLRDDVNVLIQLDQGGREGPVPQPQAQGLAEKIRACCYLECSALTXKNLKEVFDSAILSAIEHKARLEKKLNAKGVRTLSRCRWKKFFCFV

SEQ ID NO: 1097 - protein, 191 aa, Homo sapiens
  SITE (5): Xaa equals any of the naturally occurring L-amino acids
GKGCXVVVCGLLSVGKTAILEQLLYGNHTIGMEDCETMEDVYMASVETDRGVKEQLHLYDTRGLQEGVELPKHYFSFADGFVLVYSVNNLESFQRVELLKKEIDKFKDKKEVAIVVLGNKIDLSEQRQVDAEVAQQWAKSEKVRLWEVTVTDRKTLIEPFTLLASKLSQPQSKSSFPLPGRKNKGNSNSEN

SEQ ID NO: 1098 - protein, 194 aa, Homo sapiens
  SITE (142): Xaa equals any of the naturally occurring L-amino acids
  SITE (159): Xaa equals any of the naturally occurring L-amino acids
  SITE (172): Xaa equals any of the naturally occurring L-amino acids
  SITE (178): Xaa equals any of the naturally occurring L-amino acids
GGRGLPLPISGRAAGGRGGGQDVAAADYVAGAPGAPEPEPEPEPTVGAECYRRALQLRAGPRVKLQLWDTAGHERFRCITRSFYRNVVGVLLVFDVTNRKSFEHIQDWHQEVMATQGPDKVIFLLVGHKSDLQSTRCVSAQXGRGASCLPWAWPFVGDXGLKTTAMWDWAFXHPSLMXIPAGPGSRGGHSSLEE

SEQ ID NO: 1099 - protein, 194 aa, Homo sapiens
KLSMGKSCKVVVCGQASVGKTSILEQLLYGNHVVGSEMIETQEDIYVGSIETDRGVREQVRFYDTRGLRDGAELPRHCFSCTDGYVLVYSTDSRESFQRVELLKKEIDKSKDKKEVTIVVLGNKCDLQEQRRVDPDVAQHWAKSEKVKLWEVSVADRRSLLEPFVYLASKMTQPQSKSAFPLSRKNKGSGSLDG

SEQ ID NO: 1100 - protein, 307 aa, Homo sapiens
PTRPGNPVQGAPPSWTSPRKILREHRSSHRCHCYCRYCCRRVCTSRPASVPAGASVDRPRPLSRCVRTPVPGPDAPLPPGKLPSHQQPPSATMATAPYNYSYIFKYIIIGDMGVGKSCLLHQFTEKKFMADCPHTIGVEFGTRIIEVSGQKIKLQIWDTAGQERFRAVTRSYYRGAAGALMVYDITRRSTYNHLSSWLTDARNLTNPNTVIILIGNKADLEAQRDVTYEEAKQFAEENGLLFLEASAKTGENVEDAFLEAAKKIYQNIQDGSLDLNAAESGVQHKPSAPQGGRLTSEPQPQREGCGC

SEQ ID NO: 1101 - protein, 133 aa, Homo sapiens
IEWLERSEVSGYRSRADPEPRGRDTMTYAYLFKYIIIGDTGVGKSCLLLQFTDKRFQPVHDLTIGVEFGARMVNIDGKQIKLQIWDTAGQESFRSITRSYYRGAAGALLVYDITRRETFNHLTSWLEGCPAAL

SEQ ID NO: 1102 - protein, 225 aa, Homo sapiens
QQESPAAGAARMNCKEGTDSSCGCRGNDEKKMLKCVVVGDGAVGKTCLLMSYANDAFPEEYVPTVFDHYAVTVTVGGKQHLLGLYDTAGQEDYNQLRPLSYPNTDVFLICFSVVNPASYHNVQEEWVPELKDCMPHVPYVLIGTQIDLRDDPKTLARLLYMKEKPLTYEHGVKLAKAIGAQCYLECSALTQKGLKAVFDEAILTIFHPKKKKKRCSEGHSCCSII

SEQ ID NO: 1103 - protein, 175 aa, Homo sapiens
  SITE (120): Xaa equals any of the naturally occurring L-amino acids
  SITE (139): Xaa equals any of the naturally occurring L-amino acids
  SITE (149): Xaa equals any of the naturally occurring L-amino acids
  SITE (169): Xaa equals any of the naturally occurring L-amino acids
ELVKVRLMREYKVVVLGSGGVGKSALTVQFVTGTFIEKYDPTIEDFYRKEIEVDSSPSVLEILDTAGTEQFASMRDLYIKNGQGFILVYSLVNQQSFQDIKPMRDQIVRVKRYEKVPLIXVGNKVDLEPEREVMSSEGXALAQEWGCPXMETSAKSKSMVDELFAEIVXQMNYSS

SEQ ID NO: 1104 - protein, 208 aa, Homo sapiens
SGPGSMSGQRVDVKVVMLGKEYVGKTSLVERYVHDRFLVGPYQNTIGAAFVAKVMSVGDRTVTLGIWDTAGSERYEAMSRIYYRGAKAAIVCYDLTDSSSFERAKFWVKELRSLEEGCQIYLCGTKSDLLEEDRRRRRVDFHDVQDYADNIKAQLFETSSKTGQSVDELFQKVAEDYVSVAAFQVMTEDKGVDLGQKPNPYFYSCCHH

SEQ ID NO: 1105 - protein, 127 aa, Homo sapiens
  SITE (98): Xaa equals any of the naturally occurring L-amino acids
YGESKDWNQKDLLSALVLTTVNCLPTPIMAKSAEVKLAIFGRAGVGKSALVVRFLTKRFIWEYDPTLESTYRHQATIDDEVVSMEILDTAGQEDTIQXEGHMRWGEGFVLGLRHYLTEEVFEGSACT

SEQ ID NO: 1106 - protein, 222 aa, Homo sapiens
  SITE (67): Xaa equals any of the naturally occurring L-amino acids
  SITE (210): Xaa equals any of the naturally occurring L-amino acids
TGTPGAVATRDGEAPERSPPCSPSYDLTGKVMLLGDTGVGKTCFLIQFKDGAFLSGTFIATVGIDFXNKVVTVDGVRVKLQIWDTAGQERFRSVTHAYYRDAQALLLLYDITNKSSFDNIRAWLTEIHEYAQRDVVIMLLGNKADMSSERVIRSEDGETLAREYGVPFLETSAKTGMNVELAFLAIAKELKYRAGHQADEPSFQIRDYVXSQKKRSSCCSFM

SEQ ID NO: 1107 - protein, 228 aa, Homo sapiens
  SITE (216): Xaa equals any of the naturally occurring L-amino acids
AALHGHKDFHPRVTCACQEHRTGTVGFKISKVIVVGDLSVGKTCLINRFCKDTFDKNYKATIGVDFEMERFEVLGIPFSLQLWDTAGQERFKCIASTYYRGAQAIIIVFNLNDVASLEHTKQWLADALKENDPSSVLLFLTPAQYALMEKDALQVAQEMKAEYWAVSSLTGENVREFFFRVAALTFEANVLAELEKSGARRIGDVVRINSDDSNLXLTASKKKPTCCP

SEQ ID NO: 1108 - protein, 114 aa, Homo sapiens
  SITE (26): Xaa equals any of the naturally occurring L-amino acids
  SITE (36): Xaa equals any of the naturally occurring L-amino acids
NWLKELRKMLGNEICLCIVGNKIDLXKERHVSIQEXESYAESVGAKHYHTSAKQNKGIEELFLDLCKRMIETAQVDERAKGNGSSQPGTARRGVQIIDDEPQAQTSGGGCCSSG

SEQ ID NO: 1109 - protein, 146 aa, Homo sapiens; identical to SEQ ID NO: 689
  SITE (89): Xaa equals any of the naturally occurring L-amino acids
  SITE (133): Xaa equals any of the naturally occurring L-amino acids
  SITE (141): Xaa equals any of the naturally occurring L-amino acids

SEQ ID NO: 1110 - protein, 224 aa, Homo sapiens
CPARRRQCCGLRAMDAPGALAQTAAPGPGRKELKIVIVGDGGCGKTSLLMVYSQGSFPEHYAPSVFEKYTASVTVGSKEVTLNLYDTAGQEDYDRLRPLSYQNTHLVLICYDVMNPTSYDNVLIKWFPEVTHFCRGIPMVLIGCKTDLRKDKEQLRKLRAAQLEPITYMQGLSACEQIRAALYLECSAKFRENVEDVFREAAKVALSALKKAQRQKKRRLCLLL

SEQ ID NO: 1111 - protein, 135 aa, Homo sapiens
  SITE (8): Xaa equals any of the naturally occurring L-amino acids
LTTAFFEXPMGFLLMFDLTSQQSFLNVRNWMSQLQANAYCENPDIVLIGNKADLPDQREVNERQARELADKYGIPYFETSAATGQNVEKAVETLLDLIMKRMEQCVEKTQIPDTVNGGNSGNLDGEKPPEKKCIC

SEQ ID NO: 1112 - protein, 222 aa, Homo sapiens
SLPVGIPDFGSIWSDFLFKFLVIGSAGTGKSCLLHQFIENKFKQDSNHTIGVEFGSRVVNVGGKTVKLQIWDTAGQERFRSVTRSYYRGAAGALLVYDITSRETYNSLAAWLTDARTLASPNIVVILCGNKKDLDPEREVTFLEASRFAQENELMFLETSALTGENVEEAFLKCARTILNKIDSGELDPERMGSGIQYGDASLRQLRQPRSAQAVAPQPCGC

SEQ ID NO: 1113 - protein, 252 aa, Homo sapiens
  SITE (145): Xaa equals any of the naturally occurring L-amino acids
SPRIRVGTETISAPKMLEEDMEVAIKMVVVGNGAVGKSSMIQRYCKGIFTKDYKKTIGVDFLERQIQVNDEDVRLMLWDTAGQEEFDAITKAYYRGAQACVLVFSTTDRESFEAVSSWREKVVAEVGDIPTVLVQNKIDLLDDSXIKNEEAEALAKRLKLRFYRTSVKEDLNVNEVFKYLAEKYLQKLKQQIAEDPELTHSSSNKIGVFNTSGGSHSGQNSGTLNGGDVINLRPNKQRTKKNRNPFSSCSIP

SEQ ID NO: 1114 - protein, 159 aa, Homo sapiens
  SITE (29): Xaa equals any of the naturally occurring L-amino acids
  SITE (34): Xaa equals any of the naturally occurring L-amino acids
  SITE (46): Xaa equals any of the naturally occurring L-amino acids
  SITE (73): Xaa equals any of the naturally occurring L-amino acids
  SITE (159): Xaa equals any of the naturally occurring L-amino acids
RGDLSPPLVGVGEDFYRKEIEVDSSPSVXEILDXAGTEQFASMRDXYIKNGQGFILVYSLVNQQSFQDIKPMXDQIVRVKRYEKVPLILVGNKVDLEPEREVMSSEGRALAQEWGCPFMETSAKSKSMVDELFAEIVRQMNYSSLPEKQDQCCTTCVGX

SEQ ID NO: 1115 - protein, 209 aa, Homo sapiens
QREDHLPGRQRSGQIQTHGEISHGWLSATAAVHVRPDPVQAHSHGRWKTILVDFWDTAGQERFQSMHASYYHKAHACIMVFDVQRKVTYRNLSTWYTELREFRPEIPCIVVANKIDADINVTQKSFNFAKKFSLPLYFVSAADGTNVVKLFNDAIRLAVSYKQNSQDFMDEIFQELENFSLEQEEEDVPDQEQSSSIETPSEEVASPHS

SEQ ID NO: 1116 - protein, 106 aa, Homo sapiens
EVLPLKNILDEIKKPKNVTLILVGNKADLDHSRQVSTEEGEKLATELACAFYECSACTGEGNITEIFYELCREVRRRRMVQGKTRRRSSTTHVKQAINKMLTKISS

SEQ ID NO: 1117 - protein, 131 aa, Homo sapiens
EAEQSRLGATERAAAAAMNPEYDYLFKLLLIGDSGVGKSCLLLRFADDTYTESYISTIGVDFKIRTIELDGKTIKLQIWDTAGQERFRTITPHLLLAHLPAALSPGSVRVPKGGHSGPVARQGGGLLCCCL

SEQ ID NO: 1118 - protein, 184 aa, Homo sapiens
  SITE (169): Xaa equals any of the naturally occurring L-amino acids
LALPKSLSCAEPRLRFPGQARHVWPAARMQAPHKEHLYKLLVIGDLGVGKTSIIKRYVHQNFSSHYRATIGVDFALKVLHWDPETVVRLQLWDIAGQERFGNMTRVYYREAMGAFIVFDVTRPATFEAVAKWKNDLDSKLSLPNGKPVSVVLLANKCDQGKDVLHEQWXQDGPVLQGARFRRMV

SEQ ID NO: 1119 - protein, 197 aa, Homo sapiens
  SITE (187): Xaa equals any of the naturally occurring L-amino acids
  SITE (191): Xaa equals any of the naturally occurring L-amino acids
SSGLHAPGSLTRIRPRRLLRAPCKAAGRMNILAPVRRDRVLAELPQCLRKEAALHGHKDFHPRVTCACQEHRTGTVGFKISKVIVVGDLSVGKTCLINRFCKDTFDKNYKATIGVDFEMERFEVLGIPFSLQLWDTAGQERFKCIASTYYRGAQAIIIVFNLNDVASLEHTKQWLADALKENDPFSXLLFXEVPRRI

SEQ ID NO: 1120 - protein, 188 aa, Homo sapiens
  SITE (139): Xaa equals any of the naturally occurring L-amino acids
  SITE (151): Xaa equals any of the naturally occurring L-amino acids
  SITE (161): Xaa equals any of the naturally occurring L-amino acids
  SITE (164): Xaa equals any of the naturally occurring L-amino acids
  SITE (188): Xaa equals any of the naturally occurring L-amino acids
RWQRRSRAEPAARPQFPAPLAPVMAKQYDVLFRLLLIGDSGVGKTCLLCRFTDNEFHSSHISTIGVDFKMKTIEVDGIKVRIQIWDTAGQERYQTITKQYYRRAQGIFLVYDISSERSYQHIMKWVSDVDEYAPEGVQXILIGNKADEEQXRQVGREQGQXLAXEYGMDFYETSACTNLNIKESFTRX

SEQ ID NO: 1121 - protein, 222 aa, Homo sapiens
IVTKTHWVLLVTNSFPSGAAKMSGKSLLLKVILLGDGGVGKSSLMNRYVTNKFDSQAFHTIGVEFLNRDLEVDGRFVTLQIWDTAGQERFKSLRTPFYRGADCCLLTFSVDDRQSFENLGNWQKEFIYYADVKDPEHFPFVVLGNKVDKEDRQVTTEEAQTWCMENGDYPYLETSAKDDTNVTVAFEEAVRQVLAVEEQLEHCMLGHTIDLNSGSKAGSSCC

SEQ ID NO: 1122 - protein, 100 aa, Homo sapiens
YAWYFDFCPDSQSTDQAASCQETVIHVKAHFDYDPSDDPYVPCRELGLSFQKGDILHVISQEDPNWWQAYREGDEDNQPLAGLVPGKTQYGRKYIILKEH

SEQ ID NO: 1123 - protein, 228 aa, Homo sapiens
  SITE (7): Xaa equals any of the naturally occurring L-amino acids
  SITE (10): Xaa equals any of the naturally occurring L-amino acids
  SITE (26): Xaa equals any of the naturally occurring L-amino acids
  SITE (29): Xaa equals any of the naturally occurring L-amino acids
KAQKLFXTAXAAALELVDPPGCRNKXMNXKIHSLALLVNLGIYGVAQAQEPTDTPVSHDDTIVVTAAEQNLQAPGVSTITADEIRKNPVARDVSKIIRTMPGVNLTGNSTSGQRGNNRQIDIRGMGPENTLILIDGKPVSSRNSVRQGWRGERDTRGDTSWVPPEMIERIEVLRGPAAARYGNGAAGGVVNIITKKGSGEWHGSWDAYFNAPEHKEEGATKRTNFSLT

SEQ ID NO: 1124 - protein, 126 aa, Homo sapiens
  SITE (68): Xaa equals any of the naturally occurring L-amino acids
  SITE (74): Xaa equals any of the naturally occurring L-amino acids
  SITE (97): Xaa equals any of the naturally occurring L-amino acids
PGGSEANSGPKPYPRLPAWEKGEPERRGRSATGRAKEPLSRATETGEARGQDGSGRRGPQKRGVRVLXPSTAEXVPARSPSETLAYQHLPVRIFVAXFDYDPVSMSPNPDAGEEELPFREGQILKV

SEQ ID NO: 1125 - protein, 280 aa, Homo sapiens
ADAWADAWADAWVSPVSRQSIRNSQKHSPTSEPTPPGDALPPVSSPHTHRGYQPTPAMAKYVKILYDFTARNANELSVLKDEVLEVLEDGRQWWKLRSRSGQAGYVPCNILGEARPEDAGAPFEQAGQKYWGPASPTHKLPPSFPGNKDELMQHMDEVNDELIRKISNIRAQPQRHFRVERSQPVSQPLTYESGPDEVRAWLEAKAFSPRIVENLGILTGPQLFSLNKEELKKVCGEEGVRVYSQLTMQKAFLEKQQSGSELEELMNKFHSMNQRRGEDS

SEQ ID NO: 1126 - protein, 142 aa, Homo sapiens
  SITE (119): Xaa equals any of the naturally occurring L-amino acids
  SITE (132): Xaa equals any of the naturally occurring L-amino acids
DSPSPEEDKEEHISLAHRGVDASKKTSKTVTISQVSDNFVREIKKEMKKDPLTNKAPEKPLHEVPSGNSLLSSETILRTNKRGERRRRRCQVAFSYLPQNDDELELKVGDIIEVVGEVXEGWWEGVLNGKTXMFPSTSSRTC

SEQ ID NO: 1127 - protein, 88 aa, Homo sapiens
  SITE (59): Xaa equals any of the naturally occurring L-amino acids
GTGEQYVVVANYQKQESSEISLSVGQVVDIIEKNESGWWFVSTAEEQGWVPATCLEARXGCRMSFLCSLKKRRSTQSSTRTQLGTRMK

SEQ ID NO: 1128 - protein, 134 aa, Homo sapiens; identical to SEQ ID NO: 724

SEQ ID NO: 1129 - protein, 150 aa, Homo sapiens
  SITE (125): Xaa equals any of the naturally occurring L-amino acids
  SITE (138): Xaa equals any of the naturally occurring L-amino acids
TQETYSPTKASNLLRSSGTVYPKRPEKPVPPPPPIAKINGEVSSISSKFETEPVSKLKLDSEQLPLRPKSVDFDSLTVRTSKETDVVNFDDIASSENLLHLTANRPKMPGRRLPGRFNGGHSPTXSPEKILKLPKEEXSANLKPSEKKKK

SEQ ID NO: 1130 - protein, 50 aa, Homo sapiens
EEERKAEEKQRETASVLVNYRALYPFEARNHDEMSFNSGDIIQVGNEFFF

SEQ ID NO: 1131 - protein, 174 aa, Homo sapiens
  SITE (57): Xaa equals any of the naturally occurring L-amino acids
GEALRVGTRGCRRDLPDPQARIFIQKKDLEEDESVTAAHLKSRGRSPRKIDQFCNSXNMVHGSVTFRDVAIDFSQEEWECLQPDQRTLYRDVMLENYSHLISLGSSISKPDVITLLEQEKEPWMVVRKETSRRYPDLELKYGPEKVSPENDTSEVNLPKQVIKQISTKKKKKKL

SEQ ID NO: 1132 - protein, 62 aa, Homo sapiens
  SITE (49): Xaa equals any of the naturally occurring L-amino acids
  SITE (55): Xaa equals any of the naturally occurring L-amino acids
  SITE (62): Xaa equals any of the naturally occurring L-amino acids
RHFETNNSRLLVSLFTPLVRALYDAHHTLSWMCDDASDCCQKKKKKKKXPGGARXPIPPKGX

SEQ ID NO: 1133 - protein, 55 aa, Homo sapiens
ATLFTFFISAKEYCRTLFAYEGTNEDELTFKEGEIIHLISKVRCFCFSVNCLIYL

SEQ ID NO: 1134 - protein, 87 aa, Homo sapiens
  SITE (44): Xaa equals any of the naturally occurring L-amino acids
GQPRRGSALPAWRCGAAALATFPAPALPGLMYRALYAFRSAEPXALAFAAGETFLVLERRARTGGWPRGRSGETGYVPPAYLRRLQV

SEQ ID NO: 1135 - protein, 134 aa, Homo sapiens
  SITE (84): Xaa equals any of the naturally occurring L-amino acids
  SITE (128): Xaa equals any of the naturally occurring L-amino acids
FLRPHSPAILTLFLRRGSHRLGSTSHFPQEKTHNHDPQPGDPNSRPSSPKPAQPALKMQVLYEFEARNPRELTVVQGEKLEVLXHSKRWWLVKNEAGRSGYIPSNILEPLQPGTPGTQGQSPSRVLPXLDYPEP

SEQ ID NO: 1136 - protein, 118 aa, Homo sapiens
  SITE (94): Xaa equals any of the naturally occurring L-amino acids
  SITE (117): Xaa equals any of the naturally occurring L-amino acids
AQLVLTGGTGSHGVFLVRQSETRRGEYVLTFNFQGKAKHLRLSLNEEGQCRVQHLWFQSIFDMLEHFRVHPIPLESGGSSDVVLVSYVPSSQRXRVSRAGLQGRRCPCTQEVRTDHXP

SEQ ID NO: 1137 - protein, 199 aa, Homo sapiens
  SITE (92): Xaa equals any of the naturally occurring L-amino acids
  SITE (167): Xaa equals any of the naturally occurring L-amino acids
  SITE (168): Xaa equals any of the naturally occurring L-amino acids
  SITE (181): Xaa equals any of the naturally occurring L-amino acids
GTSGFRRSPGCRRRQRGKHDCCGPKCPALGSRGAAGEPEAGSDYVKFSKEKYILDSSPEKLHKELEEELKLSSTDLRSHAWYHGRIPREVSXTLVQRNGDFLIRDSLTSLGDYVLTCRWRNQALHFKINKVVVKAGESYTHIQYLFEQESFDHVPALVRYHVGQPQXXSEQSGAIIYCPVXRTFPCANFEASYGLGTGE

SEQ ID NO: 1138 - protein, 522 aa, Homo sapiens
  SITE (158): Xaa equals any of the naturally occurring L-amino acids
STLPRSPRDAPCSASSELSGPSTPLHTSSPVQGKESTRRQDTRSPTSAPTQRLSPGEALPPVSQAGTGKAPELPSGSGPEPLAPSPVSPTFPPSSPSDWPQERSPGGHSDGASPRSPVPTTLPGLRHAPWQGPRGPPDSPDGSPLTPVPSQMPWLVAXPEPPQSSPTPAFPLAASYDTNGLSQPPLPEKRHLPGPGQQPGPWGPEQASSPARGISHHVTFAPLLSDNVPQTPEPPTQESQSNVKFVQDTSKFWYKPHLSRDQAIALLKDKDPGAFLIRDSHSFQGAYGLALKVATPPPSAQPWKGDPVEQLVRHFLIETGPKGVKIKGCPSEPYFGSLSALVSQHSISPISLPCCLRIPSKDPLEETPEAPVPTNMSTAADLLRQGAACSVLYLTSVETESLTGPQAVARASSAALSCSPRPTPAVVHFKVSAQGITLTDNQRKLFFRRHYPVNSITFSSTDPQDRRWTNPDGTTSKIFGFVAKKPGSPWENVCHLFAELDPDQPAGAIVTFITKVLLGQRK

SEQ ID NO: 1139 - protein, 109 aa, Homo sapiens
  SITE (105): Xaa equals any of the naturally occurring L-amino acids
EEAGLGGGSFFGLSLSLLQWLLQPAQRSTISIPFPNVLPDFSKASEAASPLPDSPGDKLVIVKFVQDTSKFWYKADISREQAIAMLKDKEPGSFIVRDSHSFRGXYGWP

SEQ ID NO: 1140 - protein, 90 aa, Homo sapiens
MQSISFASGGDPDTTDYVAYVAKDPVNQRACHILECHNGMAQDVISTIGQAFELRFKQYLKNPSLNTSCESEEVHIDSHAEEGGPGTQFA

SEQ ID NO: 1141 - protein, 158 aa, Homo sapiens
  SITE (113): Xaa equals any of the naturally occurring L-amino acids
  SITE (146): Xaa equals any of the naturally occurring L-amino acids
  SITE (151): Xaa equals any of the naturally occurring L-amino acids
MWRFSFYLYVFTYGVRFLKKTPWLWNTRHCWYNYPYQPLTTDLHYYYILELSFYWSLMFSQFTDIKRKDFGIMFLHHLVSIFLITFSYVNNMARVGTLVLCLHDSADALLEAXKMANYAKFQKMCDLLFVMFAVVFITTRLGIFPXWPLLXCPDGSAV

SEQ ID NO: 1142 - protein, 159 aa, Homo sapiens
VLWPVLRSDAFSGLTALPRSILLFGPRGTGKTLLGRCIASQLGATFFKIAGSGLVAKWLGEAEKIIHASFLVARCRQPSVIFVSDIDMLLSSQVNEEHSPVSRMRTEFLMQLDTVLTSAEDQIVVICATSKPEEIDESLRRYFMKRLLIPFLTAQRGTR

SEQ ID NO: 1143 - protein, 98 aa, Homo sapiens
GVGKTAIAEGLAWRIVQGDVPEVMADCTIYSLDIGSLLAGTKYRGDFEKRFKALLKQLEQDTNSILFIDEIHTIIGAGAASGGQVDAANLIKPLLRRP

SEQ ID NO: 1144 - protein, 76 aa, Homo sapiens
GDLRCDCYTGADLSALVREASICALRQEMARQKSGNEKGELKVSHKHFEEAFKKVRSSISKKDQIMYERLQESLSR

SEQ ID NO: 1145 - protein, 56 aa, Homo sapiens
  SITE (6): Xaa equals any of the naturally occurring L-amino acids
  SITE (50): Xaa equals any of the naturally occurring L-amino acids
  SITE (51): Xaa equals any of the naturally occurring L-amino acids
FGTARXAILKANLRKSPVAKDVDLEFLAKMTNGFSGADLTEICQRACKLXXRESIL

SEQ ID NO: 1146 - protein, 156 aa, Homo sapiens
  SITE (139): Xaa equals any of the naturally occurring L-amino acids
GLAWRIVQGDVPEVMADCTIYSLDIGSLLAGTKYRGDFEKRFKALLKQLEQDTNSILFIDEIHTIIGAGAASGGQVDAANLIKPLLSSGKIRVIGSTTYQEFSNIFEKDRALARRFQKIDITEPSIEETVQIINGLKPXYEAHHDVRYTAKRCVRR

SEQ ID NO: 1147 - protein, 139 aa, Homo sapiens
  SITE (4): Xaa equals any of the naturally occurring L-amino acids
  SITE (24): Xaa equals any of the naturally occurring L-amino acids
  SITE (35): Xaa equals any of the naturally occurring L-amino acids
  SITE (94): Xaa equals any of the naturally occurring L-amino acids
  SITE (99): Xaa equals any of the naturally occurring L-amino acids
  SITE (101): Xaa equals any of the naturally occurring L-amino acids
  SITE (113): Xaa equals any of the naturally occurring L-amino acids
  SITE (118): Xaa equals any of the naturally occurring L-amino acids
  SITE (130): Xaa equals any of the naturally occurring L-amino acids
  SITE (131): Xaa equals any of the naturally occurring L-amino acids
  SITE (138): Xaa equals any of the naturally occurring L-amino acids
KFKXARQPFKVTYDMIGGLSSQLXAIREIIELPLXQPELFKSYGIPAPRGVLLYGPPGTGKTMIARAVANEVGAYVSVINGPEIISKFYGETEXKLRQXFXEATLRHPIINFXGELGXTLVRKERGPRMXXEKELWLXS

SEQ ID NO: 1148 - protein, 123 aa, Homo sapiens
  SITE (91): Xaa equals any of the naturally occurring L-amino acids
  SITE (104): Xaa equals any of the naturally occurring L-amino acids
HELASNQPEQFDWAINDRINEMVHFDLPGQEERERLVRMYFDKYVLKPATEGKQRLKLAQFDYGRKCSEVARLTEGMSGREIAQLAVSWQXTRYAAEDGVLTEXMMDNRVQDAVPHTSRSCVG

SEQ ID NO: 1149 - protein, 482 aa, Homo sapiens
  SITE (4): Xaa equals any of the naturally occurring L-amino acids
RPPXPRTALSAHRRASRAGPSTSAPRGRTEAASSAAGCGADPGDEMTTSTLQKAIDLVTKATEEDKAKNYEEALRLYQHAVEYFLHAIKYEAHSDKAKESIRAKCVQYLDRAEKLKDYLRSKEKHGKKPVKENQSEGKGSDSDSEGDNPEKKKLQEQLMGAVVMEKPNIRWNDVAGLEGAKEALKEAVILPIKFPHLFTGKRTPWRGILLFGPPGTGKSYLAKAVATEANNSTFFSVSSSDLMSKWLGESEKLVKNLFELARQHKPSIIFIDEVDSLCGSRNENESEAARRIKTEFLVQMQGVGNNNDGTLVLGATNIPWVLDSAIRRRFEKRIYIPLPEEAARAQMFRLHLGSTPHNLTDANIHELARKTEGYSGADISIIVRDSLMQPVRKVQSATHFKKVCGPSRTNPSMMIDDLLTPCSPGDPGAMEMTWMDVPGDKLLEPVVCMSDMLRSLATTRPTVNADDLLKVKKFSEDFGQES

SEQ ID NO: 1150 - protein, 198 aa, Homo sapiens; identical to SEQ ID NO: 777

SEQ ID NO: 1151 - protein, 110 aa, Homo sapiens
IRTCIRKRMGVWLNKDDYIRDLKRIILCFLIVYMAILVGTDQDFYSLLGVSKTASSREIRQAFKKLALKLHPDKNPNNPNAHGDFLKINRAYEVSKMKIYGKVCNMEKRT

SEQ ID NO: 1152 - protein, 341 aa, Homo sapiens
RNQGDKEAEAKFKEIKEAYEVLTDSQKRAAYDQYGHAAFEQGGMGGGGFGGGADFSDIFGDVFGDIFGGGRGRQRAARGADLRYNMELTLEEAVRGVTKEIRIPTLEECDVCHGSGAKPGTQPQTCPTCHGSGQVQMRQGFFAVQQTCPHCQGRGTLIKDPCNKCHGHGRVERSKTLSVKIPAGVDTGDRIRLAGEGEAGEHGAPAGDLYVQVQVKQHPIFEREGNNLYCEVPINFAMAALGGEIEVPTLDGRVKLKVPGETQTGKLFRMRGKGVKSVRGGAQGDLLCRVVVETPVGLNERQKQLLQELQESFGGPTGEHNSPRSKSFFDGVKKFFDDLTR

SEQ ID NO: 1153 - protein, 340 aa, Homo sapiens
  SITE (110): Xaa equals any of the naturally occurring L-amino acids
  SITE (135): Xaa equals any of the naturally occurring L-amino acids
  SITE (156): Xaa equals any of the naturally occurring L-amino acids
  SITE (196): Xaa equals any of the naturally occurring L-amino acids
  SITE (198): Xaa equals any of the naturally occurring L-amino acids
  SITE (216): Xaa equals any of the naturally occurring L-amino acids
NQGDKEAEAKFKEIKEAYEVLTDSQKRAAYDQYGHAAFEQGGMGGGGFGGGADFSDIFGDVFGDIFGGGRGRQRAARGADLRYNMELTLEEAVRGVTKEIRIPTLEECDXCHGSGAKPGTQPQTCPTCHGSGQVXMRQGFFAVQQTCPHCQGRGTXIKDPCNKCHGHGRVERSKTLSVKIPAGVDTGDRIRLAGEXEXGEHGAPAGDLYVQVQVKXHPIFEREGNNLYCEVPINFAMAALGGEIEVPTLDGRVKLKVPGETQTGKLFRMRGKGVKSVRGGAQGDLLCRVVVETPVGLNERQKQLLQELQESFGGPTGEHNSPRSKSFFDGVKKFFDDLTR

SEQ ID NO: 1154 - protein, 159 aa, Homo sapiens
  SITE (31): Xaa equals any of the naturally occurring L-amino acids
  SITE (58): Xaa equals any of the naturally occurring L-amino acids
  SITE (105): Xaa equals any of the naturally occurring L-amino acids
  SITE (107): Xaa equals any of the naturally occurring L-amino acids
  SITE (143): Xaa equals any of the naturally occurring L-amino acids
  SITE (144): Xaa equals any of the naturally occurring L-amino acids
  SITE (152): Xaa equals any of the naturally occurring L-amino acids
  SITE (155): Xaa equals any of the naturally occurring L-amino acids
ATALSEEELDNEDYYSLLNVRREASSEELKXAYRRLCMLYHPDKHRDPELKSQAERLXNLVHQAYEVLSDPQTRAIYDIYGKRGLEMEGWEVVERRRTPAEIREXFXRLQREREERRLQQRTNPKGTISVGVDATDLFDRYDXXLKMCPAVXFPXIEIN

SEQ ID NO: 1155 - protein, 105 aa, Homo sapiens
  SITE (39): Xaa equals any of the naturally occurring L-amino acids
FTRDNAMELKDYYAIMGVKPTDDLKTIKTAYRRLARKYXPDVSKEPDAEARFKEVAEAWEVLSDEQRRAEYDQMWQHRNDPQFNRQFHHGDGQSFNAEDFDDIFS

SEQ ID NO: 1156 - protein, 131 aa, Homo sapiens
  SITE (4): Xaa equals any of the naturally occurring L-amino acids
  SITE (110): Xaa equals any of the naturally occurring L-amino acids
  SITE (117): Xaa equals any of the naturally occurring L-amino acids
DERXVKKAYRQKALSCHPDKNPDNPRAAELFHQLSQALEVLTDAAARAAYDKVRKAKKQAAERTQKLDEKRKKVKLDLEARERQAQAQESEEEEESRSTRTLEQEIERLXEEGSGSXRNSRGSSGADTPGA

SEQ ID NO: 1157 - protein, 107 aa, Homo sapiens
MDAILNYRSEDTEDYYTLLGCDELSSVEQILAEFKVRALECHPDKHPENPKAVETFQKLQKAKEILTNEESRARYDHWRRSQMSMPFQQWEALNDSVKTVGFSLGAT

SEQ ID NO: 1158 - protein, 95 aa, Homo sapiens; identical to SEQ ID NO: 784

SEQ ID NO: 1159 - protein, 216 aa, Homo sapiens
  SITE (206): Xaa equals any of the naturally occurring L-amino acids
  SITE (212): Xaa equals any of the naturally occurring L-amino acids
  SITE (213): Xaa equals any of the naturally occurring L-amino acids
PTRPRIRQAGTMAVTKELLQMDLYALLGIEEKAADKEVKKAYRQKALSCHPDKNPDNPRAAELFHQLSQALEVLTDAAARAAYDKVRKAKKQAAERTQKLDEKRKKVKLDLEARERQAQAQESEEEEESRSTRTLEQEIERLREEGSRQLEEQQRLIREQIRQERDQRLRGAGLSPRLSPLQGKAENTEGQGTPKLKLKWKCRRRXSQKVAXXKTS

SEQ ID NO: 1160 - protein, 113 aa, Homo sapiens
  SITE (106): Xaa equals any of the naturally occurring L-amino acids
  SITE (109): Xaa equals any of the naturally occurring L-amino acids
KVLSEACLEISPRQEPRQPGAADKFKEINNAHAILTDATKRNIYDKYGSLGLYVAEQFGEENVNTLLRAVQLVGQGLFVFCGLPSRAGYCCCCLCCCLNCCCGNFXPRXLKGR

SEQ ID NO: 1161 - protein, 258 aa, Homo sapiens
  SITE (251): Xaa equals any of the naturally occurring L-amino acids
ARPASPSLVPRSGSAMESNKDEAERCISIALKAIQSNQPDRALRFLEKAQRLYPTPRVRALIESLNQKPQTAGDQPPPTDTTHATHRKAGGTDAPSANGEAGGESTKGYTAEQVAAVKRVKQCKDYYEILGVSRGASDEDLKKAYRRLALKFHPDKNHAPGATEAFKAIGTAYAVLSNPEKRKQYDQFGDDKSQAARHGHGHGDFHRGFEADISPEDLFNMFFGGGFPSSNVHVYSNGRMRYTYQQRQDRXQTRVMAG

SEQ ID NO: 1162 - protein, 297 aa, Homo sapiens
  SITE (110): Xaa equals any of the naturally occurring L-amino acids
  SITE (143): Xaa equals any of the naturally occurring L-amino acids
  SITE (193): Xaa equals any of the naturally occurring L-amino acids
  SITE (268): Xaa equals any of the naturally occurring L-amino acids
  SITE (288): Xaa equals any of the naturally occurring L-amino acids
EMCRDRREALNAGNREKAQRFLQKAEKLYPLPSARALLEIIMKNGSTAGNSPHCRKPSGSGDQSKPNCTKDSTSGSGEGGKGYTKDQVDGVLSINKCKNYYEVLGVTKDXGDEDLKKAYRKLALKFHPDKNHAPGATDAFKKXGNAYAVLSNPEKRKQYDLTGNEEQACNHQNNGRFNFHRGCEADITPEDLXNIFFGGGFPSGSVHSFSNGRAGYSQQHQHRHSGHEREEERGDGGFSVFIQLMPIIVLILVSLLSQLMVSNPPYSXYPRSGTGQTIKMQTENLGVXYYVNKGLQK

SEQ ID NO: 1163 - protein, 132 aa, Homo sapiens
  SITE (22): Xaa equals any of the naturally occurring L-amino acids
  SITE (46): Xaa equals any of the naturally occurring L-amino acids
  SITE (120): Xaa equals any of the naturally occurring L-amino acids
  SITE (130): Xaa equals any of the naturally occurring L-amino acids
GTGQTSVSPARIHYSSTCNLGXGGGSADLLIGNRYGGDSGQRGALXGRIKKCRNYYEILGVSRDASDEELKKAYRKLALKFHPDKNCAPGATDAFKAIGNAFAVLSNPDKRLRYDEYGDXPGDFHCPRAXPY

SEQ ID NO: 1164 - protein, 267 aa, Homo sapiens
  SITE (115): Xaa equals any of the naturally occurring L-amino acids
RAPDHRPLLPRPSDQLGPCAHLASTFPLLSPTPLAMANYYEVLGVQASASPEDIKKAYRKLALRWHPDKNPDNKEEAEKKFKLVSEAYEVLSDSKKRSLYDRAGCDSWRAGGGAXTPYHSPFDTGYTFRNPEDIFREFFGGLDPFSFEFWDSPFNSDRGGRGHGLRGAFSAGFGEFPAFMEAFSSFNMLGCSGGSHTTFSSTSFGGSSSGSSGFKSVMSSTEMINGHKVTTKRIVENGQERVEVEEDGQLKSVTVNGKEQLKWMDSK

SEQ ID NO: 1165 - protein, 99 aa, Homo sapiens
  SITE (15): Xaa equals any of the naturally occurring L-amino acids
  SITE (16): Xaa equals any of the naturally occurring L-amino acids
RNEMEKYERIRVVGXXAFGIVHLCLRKADQKLVIIKQIPVEQMTKEERQAAQNECQVLKLLNHPNVIEYYENFLEDKALMIAMEYAPGGTLAEFIQKRC

SEQ ID NO: 1166 - protein, 179 aa, Homo sapiens
  SITE (79): Xaa equals any of the naturally occurring L-amino acids
ATQLPGGPGTSCLPSTQSGADLPWSFSGATSKVRALVRLACRMAGQPGHMPHGGSSNNLCHTLGPVHPPDPQRHPNTLXFRCSLADFQIEKKIGRGQFSEVYKATCLLDRKTVALKKVQIFEMMDAKARQDCVKEIGLLKQLNHPNIIKYLDSFIEDNELNIVLELADAGDLFADDQVL

SEQ ID NO: 1167 - protein, 143 aa, Homo sapiens
  SITE (12): Xaa equals any of the naturally occurring L-amino acids
  SITE (25): Xaa equals any of the naturally occurring L-amino acids
  SITE (59): Xaa equals any of the naturally occurring L-amino acids
  SITE (137): Xaa equals any of the naturally occurring L-amino acids
GTRRAWLGPAEXGKERRSEGASGAXSPKPSRAANPPARPRSCPPCLAAGPSMVMADGPXHLQRGPVRVGFYDIEGTLGKGNFAVVKLGRHRITKTEVAIKIIDKSQLDAVNLEKIYREVQIMKMLDHPHIIKLYQVXETKSML

SEQ ID NO: 1168 - protein, 106 aa, Homo sapiens
  SITE (46): Xaa equals any of the naturally occurring L-amino acids
FIDIGHYVRDISAYEELVSKLNLLVEDELKQIAENIESINQNKAPXKYIGNYAILDHLGSGAFGCVYKVRKHSGQNLLAMKEVNLHNPAFGKDKKDRDSSVREYCF

SEQ ID NO: 1169 - protein, 305 aa, Homo sapiens
  SITE (181): Xaa equals any of the naturally occurring L-amino acids
PLTGRKCPGWTHSGSRRSPRIAEEVPGFPKRAEASRQFSETADRLELLRRAVMAAARATTPADGEEPAPEAEALAAARERSSRFLSGLELVKQGAEARVFRGRFQGRAAVIKHRFPKGYRHPALEARLGRRRTVQEARALLRCRRAGISAPVVFFVDYASNCLYMEEIEGSVTVRDYIQSXMETEKTPQGLSNLAKTIGQVLARMHDEDLIHGDLTTSNMLLKPPLEQLNIVLIDFGLSFISALPEDKGVDLYVLEKAFLSTHPNTETVFEAFLKSYSTSSKKARPVLKKLDEVRLRGRKRSMVG

SEQ ID NO: 1170 - protein, 456 aa, Homo sapiens
  SITE (7): Xaa equals any of the naturally occurring L-amino acids
  SITE (220): Xaa equals any of the naturally occurring L-amino acids
  SITE (315): Xaa equals any of the naturally occurring L-amino acids
  SITE (316): Xaa equals any of the naturally occurring L-amino acids
  SITE (320): Xaa equals any of the naturally occurring L-amino acids
  SITE (321): Xaa equals any of the naturally occurring L-amino acids
  SITE (341): Xaa equals any of the naturally occurring L-amino acids
  SITE (371): Xaa equals any of the naturally occurring L-amino acids
NVWQWAXWGCGGVGAKRHGLDPRLESGRPPTAAASCPPCALGATMSGDKLLSELGYKLGRTIGEGSYSKVKVATSKKYKGTVAIKVVDRRRAPPDFVNKFLPRELSILRGVRHPHIVHVFEFIEVCNGKLYIVMEAAATDLLQAVQRNGRIPGVQARDLFAQIAGAVRYLHDHHLVHRDLKCENVLLSPDERRVKLTDFGFGRQAHGYPDLSTTYCGSAXYASPEVLLGIPYDPKKYDVWSMGVVLYVMVTGCMPFDDSDIAGLPRRQKRGVLYPEGLELSERCKALIAELLQFSPSAGPSAGQVARNCWLRAGXXRLEXXWFQPFLQPRALGQGGARARXALRGNMRSCRVLLHMRFFPSASLPFFPRGXPQLPLFGIHVPRDPGSWRRMRIRDSLRPGPERARPEGTEALRLRGTLSLCAEGVPSQPAVGARFPVGTCNKLAVPRKKKKKKKTR

SEQ ID NO: 1171 - protein, 97 aa, Homo sapiens
  SITE (47): Xaa equals any of the naturally occurring L-amino acids
NCKILDTIGRGTFSEVQDHMLIGTQMAIKIIPKAGSLGITLQRVISXLKLLCHFNIVRLYQVIDTPNTSYLFSNGVCKRRTPTQPIHHHGLMREEKA

SEQ ID NO: 1172 - protein, 119 aa, Homo sapiens
  SITE (116): Xaa equals any of the naturally occurring L-amino acids
ELMSFLTNDASSESIASFSKQEVMSSFLPEGGCYELLTVIGKGFEDLMTVNLARYKPTGEYVTVRRINLEACSMRMVTFLQGRAACLPNSSNHPNIVPYRATFIADNELWVVTSIXGNG

SEQ ID NO: 1173 - protein, 62 aa, Homo sapiens
AFLKKTGDLFAIKVFNNISFLRPVDVQMREFEVLKKLNHKNIVKLFAIEEEVSSKTSILYLL

SEQ ID NO: 1174 - protein, 113 aa, Homo sapiens; identical to SEQ ID NO: 859

SEQ ID NO: 1175 - protein, 222 aa, Homo sapiens
  SITE (190): Xaa equals any of the naturally occurring L-amino acids
  SITE (194): Xaa equals any of the naturally occurring L-amino acids
  SITE (195): Xaa equals any of the naturally occurring L-amino acids
  SITE (205): Xaa equals any of the naturally occurring L-amino acids
WIQRIRHEEVVAETDNGVDALQLAREHMPDIVILDIGIPKLDGLEVICRLSSTKQAHPFKVLVLTSQAPGHFSMRCMQAGAAGYVCKQQDLTELLSAVKAVLCGYSYFPNQALNSVRSTMGNASEADMVERLSGREMMVLQQLARGKTNKEIADGMFLSNKTVSTYKTRLLLKLNARSLVGLDRLASVTXWCRXXSHLHPVRKKXPQGRLLFIVGSIRGSKS

SEQ ID NO: 1176 - protein, 145 aa, Homo sapiens
TGYSSLSRTALEGDGMRVFEAETLQRGLLEAATRKPDLIILDLGLPDGDGIEFIRDLRQWSAVPVIVLSARSEESDKIAALDAGADDYLSKPFGIGELQARLRVALRRHSATTAPDPLVKFSDVTVDLAARVIHRGEEEVHLHTN

SEQ ID NO: 1177 - protein, 242 aa, Homo sapiens
  SITE (130): Xaa equals any of the naturally occurring L-amino acids
  SITE (131): Xaa equals any of the naturally occurring L-amino acids
  SITE (145): Xaa equals any of the naturally occurring L-amino acids
  SITE (183): Xaa equals any of the naturally occurring L-amino acids
NKEAAAGSSDLDPSMILDTGEIIDTGSDYEDQGDDQLNVFGEDTMGGFMEDLRKCKIIFIIGGPGSGKGTQCEKLVEKYGFTHLSTGELLREELASESERSKLIRDIMERGDLVPSSIVLELLKEAMVAXXGDTRGFLIDGYPRXVKQGEEFGRRIGDPQLVICMDCSADTMTNRLLQRSRSXLPVDDTTKTIAKRLEAYYRASIPVIAYYETKTQLHKINAEGTPEDVFLQLCTAIDSIIF

SEQ ID NO: 1178 - protein, 122 aa, Homo sapiens
  SITE (7): Xaa equals any of the naturally occurring L-amino acids
  SITE (8): Xaa equals any of the naturally occurring L-amino acids
  SITE (31): Xaa equals any of the naturally occurring L-amino acids
RNQRPRXXKTRALGLSQNISRVRFLTVLCSXSHLQIGDPQLVICMDCSADTMTNRLLQRSRSSLPVDDTTKTIAKRLEAYYRASIPVIAYYETKTQLHKINAEGTPEDVFLQLCTAIDSIIF

SEQ ID NO: 1179 - protein, 113 aa, Homo sapiens; identical to SEQ ID NO: 868

SEQ ID NO: 1180 - protein, 53 aa, Homo sapiens
TQEAEIAVSQECPTALQPRQQRKTLSERKKKSCCYIAHNFIVISFKIGIAHLG

SEQ ID NO: 1181 - protein, 80 aa, Homo sapiens
  SITE (24): Xaa equals any of the naturally occurring L-amino acids
  SITE (25): Xaa equals any of the naturally occurring L-amino acids
  SITE (68): Xaa equals any of the naturally occurring L-amino acids
  SITE (74): Xaa equals any of the naturally occurring L-amino acids
SWDLNLSALTSKTRFQAATHTNSXXKCIPFLLCFHIDHCVLILSIGRRGRQCHYCKFHSPQGPLCSLXPPTGFXIFGGII

SEQ ID NO: 1182 - protein, 66 aa, Homo sapiens
HPPSLQLYTLTVIGPGPPDCQPAQISRRYSDFERLHRNLQRQFRGPMAAISFPRKRLREILLQRPL

SEQ ID NO: 1183 - protein, 51 aa, Homo sapiens
  SITE (42): Xaa equals any of the naturally occurring L-amino acids
  SITE (45): Xaa equals any of the naturally occurring L-amino acids
  SITE (50): Xaa equals any of the naturally occurring L-amino acids
PHHVFAHSFKPPRLCEHRAQCRQNLRLCELYDCPILCFNLLXLSXYHKAXI

SEQ ID NO: 1184 - protein, 66 aa, Homo sapiens
IHAIHLSTPIECTAPRVNPHMNCGLRVIMMCPCRFLICDKCTTLVGAVDREGGCACVRKGIYGNSL

SEQ ID NO: 1185 - protein, 52 aa, Homo sapiens
  SITE (36): Xaa equals any of the naturally occurring L-amino acids
  SITE (43): Xaa equals any of the naturally occurring L-amino acids
  SITE (44): Xaa equals any of the naturally occurring L-amino acids
GLDSDKTNTYSFQCVTLVSTLCQFFLLLVTDSDHMXKVVAAKXXHGVTISLW

SEQ ID NO: 1186 - protein, 155 aa, Homo sapiens
  SITE (102): Xaa equals any of the naturally occurring L-amino acids
  SITE (146): Xaa equals any of the naturally occurring L-amino acids
EHASWHGGRIMSIKWARFHEVPHITVRFIGPKHGEEKEKEKDKIKEKEKDSKDKEKDKKTVNGHTFSSIPVVGPISCSQCMKPFTNKDAYTCANCSAFVHKXCRESLASCAKVKMKRPKGAFRHMTHHHKEGGCEVTPDTAERGAXSAFWDVLEC

SEQ ID NO: 1187 - protein, 219 aa, Homo sapiens
  SITE (177): Xaa equals any of the naturally occurring L-amino acids
VIVARPEAAGSPPEEGGCTEGTPAKDHRAGRGHQVHKSWPLSISDSDSGLDPGPGAGDFKKFERTSSSGTMSSTEELVDPDGGAGASAFEQADLNGMTPELPVAVPSGPFRHEGLSKAARTHRLRKLRTPAKCRECNSYVYFQGAECEECCLACHKKCLETLAIQCGHKKLQGRLQXFGQDFSHAARSAPDGVPFIVKKCVSRSSGGRCAPRASTGSMG

SEQ ID NO: 1188 - protein, 50 aa, Homo sapiens
  SITE (11): Xaa equals any of the naturally occurring L-amino acids
  SITE (23): Xaa equals any of the naturally occurring L-amino acids
  SITE (33): Xaa equals any of the naturally occurring L-amino acids
  SITE (39): Xaa equals any of the naturally occurring L-amino acids
  SITE (44): Xaa equals any of the naturally occurring L-amino acids
  SITE (46): Xaa equals any of the naturally occurring L-amino acids
SLSNTLLDRIXNHQYMQHNFSYXFQEVVSLRPXVTMNQXGASQXRXPYQR

SEQ ID NO: 1189 - protein, 38 aa, Homo sapiens
  SITE (34): Xaa equals any of the naturally occurring L-amino acids
LNLLNFSLTVHSFNSTLVPTMCQALFYEVGVPQXKDKV

SEQ ID NO: 1190 - protein, 53 aa, Homo sapiens
  SITE (4): Xaa equals any of the naturally occurring L-amino acids
  SITE (43): Xaa equals any of the naturally occurring L-amino acids
VAAXWYGRQMCPRWMLMQGGSETTHRFSRLSFHRAMVGRRLPXLKTASGLTWL

SEQ ID NO: 1191 - protein, 87 aa, Homo sapiens
SRLPKISEYSHRFINKLGPSACFLFIDQYHESFICTYLTSFLHCCLSHHYHGAQIHPRHFLHLICRCHCHQYCHHAYLDPCPQDSHH

SEQ ID NO: 1192 - protein, 192 aa, Homo sapiens
  SITE (190): Xaa equals any of the naturally occurring L-amino acids
  SITE (192): Xaa equals any of the naturally occurring L-amino acids
LLPAASELAHVKQLACSIVDQKFPECGFYGLYDKILLFKHDPTSANLLQLVRSSGDIQEGDLVEVVLSASATFEDFQIRPHALTVHSYRAPAFCDHCGEMLFGLVRQGLKCDGCGLNYHKRCAFSIPNNCSGARKRRLSSTSLASGHSVRLGTSESLPCTAEELSRSTTELLPRRPPSSSSSSSGLIVIXGX

SEQ ID NO: 1193 - protein, 60 aa, Homo sapiens
WISVSSMSFHGLIMHFFLEPNYVPSSGCLFIHLLKDCWMLPFGNYEESCYKYLCRLFVWT

SEQ ID NO: 1194 - protein, 68 aa, Homo sapiens; identical to SEQ ID NO: 885

SEQ ID NO: 1195 - protein, 51 aa, Homo sapiens
  SITE (33): Xaa equals any of the naturally occurring L-amino acids
  SITE (38): Xaa equals any of the naturally occurring L-amino acids
  SITE (45): Xaa equals any of the naturally occurring L-amino acids
  SITE (49): Xaa equals any of the naturally occurring L-amino acids
SAFCYNRVSLHLLGTVHNWKSHRYILLCIWASXDSGHXGLGVPSXMAVXMY

SEQ ID NO: 1196 - protein, 124 aa, Homo sapiens
  SITE (124): Xaa equals any of the naturally occurring L-amino acids
VGLFLASDVQQLRQAIEECKQVILELPEQSEKQKDAVVRLIHLRLKLQELKDPNEDEPNIRVLLEHRFYKEKSKSVKQTCDKCNTIIWGLIQTWYTCTGGPRPRRGVRNERDQSSCLRWAHIQX

SEQ ID NO: 1197 - protein, 73 aa, Homo sapiens
PVFPEALLVLSGHWLASLHVTMRHSSWPPMFCLDFPILSTQSLSICFKLNCGQFGVEIQVHNVTMTSVPLFLE

SEQ ID NO: 1198 - protein, 123 aa, Homo sapiens
  SITE (108): Xaa equals any of the naturally occurring L-amino acids
NSDRLFAPKMVGQRWDSNYKHSRSKKEKIEGEMELPVLVNFIIQPGKNILCDLRVHTCGLRALPFRSSFLFHERWHMFVAEQFHQPVSCLWYFGSLRVFFEILFKILXSLSPFQFKLAVFLFM

SEQ ID NO: 1199 - protein, 62 aa, Homo sapiens
  SITE (3): Xaa equals any of the naturally occurring L-amino acids
  SITE (24): Xaa equals any of the naturally occurring L-amino acids
  SITE (37): Xaa equals any of the naturally occurring L-amino acids
CYXKLPNYCPKCLYHFIPQPAYMXSSCSMTLSTVLSXLLISAFLGVKCYLIAVFRKIHFLEY

SEQ ID NO: 1200 - protein, 165 aa, Homo sapiens
  SITE (126): Xaa equals any of the naturally occurring L-amino acids
  SITE (128): Xaa equals any of the naturally occurring L-amino acids
  SITE (136): Xaa equals any of the naturally occurring L-amino acids
  SITE (147): Xaa equals any of the naturally occurring L-amino acids
  SITE (157): Xaa equals any of the naturally occurring L-amino acids
NSMKPFKDMDYSRIIERLLKLAVPNHLIWLIFFYWLFHSCLNAVAELMQFGDREFYRDWWNSESVTYFWQNWNIPVHKWCIRHFYKPMLRRGSSKWMARTGVFLASAFFHEYLVSVPLANVPPLGXSXGMMGSDPXGPGFVGPLFSXGNMGNELCWXFGHSSDSQ

SEQ ID NO: 1201 - protein, 83 aa, Homo sapiens
  SITE (75): Xaa equals any of the naturally occurring L-amino acids
ETEKTRLEFHSSYRSRVAHPLVCLRAVTLVDVQGEEYHMVWQQSKEPGTTRPLRGAGSRCCMFIPRYCEASLEGXFLDIWWPS

SEQ ID NO: 1202 - protein, 113 aa, Homo sapiens
  SITE (2): Xaa equals any of the naturally occurring L-amino acids
  SITE (10): Xaa equals any of the naturally occurring L-amino acids
  SITE (14): Xaa equals any of the naturally occurring L-amino acids
  SITE (18): Xaa equals any of the naturally occurring L-amino acids
  SITE (24): Xaa equals any of the naturally occurring L-amino acids
PXRPKMTWEXQSWXCLNXHFPIPXELPEIARWTQLLRVRHRKQLCLLNYCCSGAVPVSPPRCLKFVSCATQQRYSQGTILPRYTASPLLTCRRAPKDTDCLLSPLQALAAECT

SEQ ID NO: 1203 - protein, 85 aa, Homo sapiens
PSSVPAVSPAKPSQAQPSPADRGHRSQPRSGGTTEHQPAWNFLPHSASHVASWDRGDGVILLWKDFTSCRMKVPPVCHADARAAV

SEQ ID NO: 1204 - protein, 66 aa, Homo sapiens
  SITE (24): Xaa equals any of the naturally occurring L-amino acids
  SITE (33): Xaa equals any of the naturally occurring L-amino acids
  SITE (34): Xaa equals any of the naturally occurring L-amino acids
  SITE (35): Xaa equals any of the naturally occurring L-amino acids
  SITE (36): Xaa equals any of the naturally occurring L-amino acids
HSAIFKCKSCSTRKETCLQFKTMXVSTHDLVYXXXXKRGFCKHCRIVSYSFFYRNVIPMVHFLFNK

SEQ ID NO: 1205 - protein, 102 aa, Homo sapiens
  SITE (79): Xaa equals any of the naturally occurring L-amino acids
  SITE (87): Xaa equals any of the naturally occurring L-amino acids
  SITE (89): Xaa equals any of the naturally occurring L-amino acids
  SITE (91): Xaa equals any of the naturally occurring L-amino acids
ERPRIMDLAGLLKSQFLCHLVFCYVFIASGLIINTIQLFTLLLWPINKQLFRKINCRLSYCISSQLVMLLEWWSGTECXIFKDRALXQXWXGNATWSQHNLK

SEQ ID NO: 1206 - protein, 141 aa, Homo sapiens
  SITE (60): Xaa equals any of the naturally occurring L-amino acids
  SITE (79): Xaa equals any of the naturally occurring L-amino acids
  SITE (117): Xaa equals any of the naturally occurring L-amino acids
  SITE (139): Xaa equals any of the naturally occurring L-amino acids
SRSLDSPTSSPGAGTRQLVKASSTGTESSDDFEERDPDLGDGLENGLGSPFGKWTLSSAXQTHQLRRLRGPAKCRECEXFMVSGTECEECFLTCHKRCLETLLILCGHRRLPARTPXFGVDFLQLPRDFPEEVPFVVTXHG

SEQ ID NO: 1207 - protein, 94 aa, Homo sapiens
VCMDIASRVLFSPGAIAVFPASFIFMSQSTSVLRRNGFTFKQFFVAHDRCAMKVGTDGILLGAWAPVAGVKRCLDIGAGSGLLALMLAHEPMTA

SEQ ID NO: 1208 - protein, 153 aa, Homo sapiens
  SITE (105): Xaa equals any of the naturally occurring L-amino acids
  SITE (120): Xaa equals any of the naturally occurring L-amino acids
  SITE (126): Xaa equals any of the naturally occurring L-amino acids
  SITE (143): Xaa equals any of the naturally occurring L-amino acids
  SITE (147): Xaa equals any of the naturally occurring L-amino acids
HRFVRRKFKHTFGEDLVVCQIGMSSYEFPPALKPPEDLVVLGKDASGQPIFNASAKHWTNFVITENANDAIGILNNSASFNKMSIEYKYEMMPNRTWRCRVFLQXHWLSWKVMGTKKTSXTWQLPXELLENSCKKHSPLDAIXCKSXTMAIQG

SEQ ID NO: 1209 - protein, 69 aa, Homo sapiens
CLHIRKYWRVLFNMETPRTTGRGHWNADFDLVTLNPLRVIGKSHNFNLIRNNHTCFLGACGNLIHPCNV

SEQ ID NO: 1210 - protein, 77 aa, Homo sapiens
EGAKNPHPSKSRRKAEPGEKREQLMLPCRSLGCYEMVTSLCPTIGQCLLSCGASQAVWFSRGPLTQSCYYGELYNFL

SEQ ID NO: 1211 - protein, 149 aa, Homo sapiens; identical to SEQ ID NO: 903
  SITE (108): Xaa equals any of the naturally occurring L-amino acids
  SITE (111): Xaa equals any of the naturally occurring L-amino acids
  SITE (122): Xaa equals any of the naturally occurring L-amino acids
  SITE (123): Xaa equals any of the naturally occurring L-amino acids

SEQ ID NO: 1212 - protein, 49 aa, Homo sapiens
IYSRVHIQVSELVFMMCGISEVICHQLLLVLSFSHLCHPSDFDGPPCLA

SEQ ID NO: 1213 - protein, 53 aa, Homo sapiens
LCYSLQLDKNKNSPSLQQASLKINSICFSFLPMSCDLTKVRIWLRLQNLRCNL

SEQ ID NO: 1214 - protein, 132 aa, Homo sapiens; identical to SEQ ID NO: 906

SEQ ID NO: 1215 - protein, 49 aa, Homo sapiens
  SITE (20): Xaa equals any of the naturally occurring L-amino acids
KASALDGHGVGKESVGNQKXIHHFRPRNYGSRKVDVHEILEGPLFLMKV

SEQ ID NO: 1216 - protein, 56 aa, Homo sapiens
SLFPQAPHYNCKLTIFYVAVISHLSKMELVKKCSNTIPNACAEFIYDPFIGAQSIF

SEQ ID NO: 1217 - protein, 95 aa, Homo sapiens
  SITE (82): Xaa equals any of the naturally occurring L-amino acids
GCSCEVCGFSCHITCVNKAPTTCPVPPEQTKGPLGIDPQKGIGTAYEGHVRIPKPAGVKKGWQRALAIVCDFKLFLYDIAEXKASQPSVVISQVD

SEQ ID NO: 1218 - protein, 45 aa, Homo sapiens
  SITE (20): Xaa equals any of the naturally occurring L-amino acids
ILRWLWGTSQTGWKPHGYMXALIYMCFLCKEFLWGWILVLVLASP

SEQ ID NO: 1219 - protein, 374 aa, Homo sapiens
  SITE (193): Xaa equals any of the naturally occurring L-amino acids
PLTQPTWLQWSTLWRMLGLSCGMRLCRTSGRTFTPSGRWSLRFGTRPHAGGSLSCPTSCGSRSPYRNTCGWVKVSSSIQHPETPLHISGFHLPYKPKPPQETEKGHSACEPENLEFSSFMFWRNPLPNIDHELQELLIDRGEDVPSEEEEEEENGFEDRKDDSDDDGGGWITPSNIKQIQQELEQCDVPEDVXVGCLTTDFAMQNVLLQMGLHVLAVNGMLIREARSYILRCHGCFKTTSDMSRVFCSHCGNKTLKKVSVTVSDDGTLHMHFSRNPKVLNPRGLRYSLPTPKGGKYAINPHLTEDQRFPQLRLSQKARQKTNVFAPDYIAGVSPFVENDISSRSATLQVRDSTLGAGRRRLNPNASRKKFVKKR

SEQ ID NO: 1220 - protein, 54 aa, Homo sapiens
LCIFWMTYGGQCLHMFVRHSFCSVTDLFMCFAHFKEVVGTFHSPVNVALGVTES

SEQ ID NO: 1221 - protein, 55 aa, Homo sapiens
  SITE (48): Xaa equals any of the naturally occurring L-amino acids
IKNYLVGDESQHLINKTLRLYLLDHCLESSLWEPEVLMTEYSAHQCSXRVPNCGI

SEQ ID NO: 1222 - protein, 166 aa, Homo sapiens
  SITE (30): Xaa equals any of the naturally occurring L-amino acids
  SITE (149): Xaa equals any of the naturally occurring L-amino acids
  SITE (157): Xaa equals any of the naturally occurring L-amino acids
RCLRSESRPWGPARTWAEAASWSPLRARMXCWTVECTWGFNDDRRFPDFSYITQNGRLTDFLDCVIISHFHLDHCGALPYFSEMVGYDGPIYMTHPTQAICPILLEDYRKIAVDKKGEANFFTSQMIKDCMKKVVAVHLHQTVQVRFPXAQWHSHCXPKPTMPFGR

SEQ ID NO: 1223 - protein, 93 aa, Homo sapiens
VHRCGTHIYRQPTACLNKFHLFLNFWSIIMYMSSDTSFFHSTLLLTFTYIVTHSCRTTLCPCFRCVSCKQHMIGVWFNYPFFPWASLILIHLL

SEQ ID NO: 1224 - protein, 46 aa, Homo sapiens
  SITE (41): Xaa equals any of the naturally occurring L-amino acids
ILKYVYVHVFIIRSFFSLCVYKSALLMNAFLLFTSKGSLSXSLAAE

SEQ ID NO: 1225 - protein, 332 aa, Homo sapiens
  SITE (96): Xaa equals any of the naturally occurring L-amino acids
  SITE (309): Xaa equals any of the naturally occurring L-amino acids
  SITE (317): Xaa equals any of the naturally occurring L-amino acids
LKISNVALDSMHWQNDSVQIIASVSDLKSMDEFLLKKVNDLDNEDSKKDTLVDVVFKKALKEFRQNIFSFYSSALAMDDGKSIRYKDLYALFEQIXEKTMRLEQRDSLGESPVRVWVNTFKVFLDEYMNEFKTSDCTATKVPKTERKKRRKKETDLVEEHNGHIFKATQYSIPTYCEYCSSLIWIMDRASVCKLCKYACHKKCCLKTTAKCSKKYDPELSSRQFGVELSRLTSEDRTVPLVVEKLINYIEMHGLYTEGIYRKSGSTNKIKELRQGLDTDAESVNLDDYNIHVIASVFKQWLRDLPNPLXTFELYEEXLRAMAFRRGRRQSVG

SEQ ID NO: 1226 - protein, 61 aa, Homo sapiens
  SITE (2): Xaa equals any of the naturally occurring L-amino acids
PXAAHRQPGAASLPCHFNPSVNLFSSLREEEIDDIGYALYSGLQEPEGCSRWVETGGCHVF

SEQ ID NO: 1227 - protein, 64 aa, Homo sapiens
QKKQAFEAILGLRNGALKRQASLSPFCCKTPHLKETDLRHSQASKDTGSLLASCTFLRKVFSFY

SEQ ID NO: 1228 - protein, 125 aa, Homo sapiens
ALRLREDDRRGVNDLPRALEQIHYILKPDGVFIGAMFGGDTLYELRCSLQLAETEREGGFSPHISPFTAVNDLGHLLGRAGFNTLTVDTDEIQVNYPGMFELMEDLQEQKSRNVDLILQNKLHIS

SEQ ID NO: 1229 - protein, 44 aa, Homo sapiens
RSILRRKLWHCRDDADGHTAAVCPKVGISAQEEKTICLRTQNIT

SEQ ID NO: 1230 - protein, 61 aa, Homo sapiens
  SITE (20): Xaa equals any of the naturally occurring L-amino acids
STSQAELMAQWLSGQYIVFXFFFLRQGLALLPRLECSGMTAAHCNLKLHNRKIKEKSKETT

SEQ ID NO: 1231 - protein, 220 aa, Homo sapiens; identical to SEQ ID NO: 949

SEQ ID NO: 1232 - protein, 100 aa, Homo sapiens
GPVAPRASSQILCLSVHHEMGGGEKAVRCLPDLTGLPKGAGTLGGLTAAGPHVKGQVRRRSSPTSGPRHPGVLVCQTGCPRAPPSPGGLGAVPRPPHPFL

SEQ ID NO: 1233 - protein, 145 aa, Homo sapiens [sequence omitted]

SEQ ID NO: 1234 - protein, 250 aa, Homo sapiens
  SITE (9): Xaa equals any of the naturally occurring L-amino acids
  SITE (220): Xaa equals any of the naturally occurring L-amino acids
  SITE (246): Xaa equals any of the naturally occurring L-amino acids
  SITE (247): Xaa equals any of the naturally occurring L-amino acids
RPPGSPSAXRLRLCVLNEILGTERDYVGTLRFLQSAFLHRIRQNVADSVEKGLTEENVKVLFSNIEDILEVHKDFLAALEYCLHPEPQSQHELGNVFLKFKDKFCVYEEYCSNHEKALRLLVELNKIPTVRAFLLSCMLLGGRKTTDIPLEGYLLSPIQRICKYPLLLKELAKRTPGKHPDHPAVQSALQAMKTVCSNINETKRQMEKLEPWSSCSPTSXAGEGSKLHRHFGISSSCRGLCLKNFXXGKI

SEQ ID NO: 1235 - protein, 105 aa, Homo sapiens
  SITE (98): Xaa equals any of the naturally occurring L-amino acids
  SITE (105): Xaa equals any of the naturally occurring L-amino acids
HVHFATTHSLSPRGLGTSGATAGITVRREMPAPAPSPLAATAIPPMVPHPALPTSLSLQPQVPPSWMLLAPGDSFPVTAVERVSRTNWTHGVTVCTRXSRHPAPX

SEQ ID NO: 1236 - protein, 218 aa, Homo sapiens
  SITE (134): Xaa equals any of the naturally occurring L-amino acids
  SITE (137): Xaa equals any of the naturally occurring L-amino acids
  SITE (164): Xaa equals any of the naturally occurring L-amino acids
WIPRAAGIRHESTQPGWAARDRTEAAADSTSMSYSVTLTGPGPWGFRLQGGKDFNMPLTISRITPGSKAAQSQLSQGDLVVAIDGVNTDTMTHLEAQNKIKSASYNLSLTLQKSKRPIPISTTAPPVQTPLPVXPHXKVVVNSPANADYQERFNPSALKDSALXTHKPIEVKGLGGKATIIHAQYNTPISMYSQDAIMDAIAGQAQAQGSDFSGEPPY

SEQ ID NO: 1237 - protein, 117 aa, Homo sapiens
MSAGDAVCTGWLVKSPPERKLQRYAWRKRWFVLRRGRMSGNPDVLEYYRNKHSSKPIRVIDLSECAVWKHVGPSFVRKEFQNNFVFIVKTTSRTFYLVAKTEQEMQVWVHSISQVCN

SEQ ID NO: 1238 - protein, 15 aa, Homo sapiens
SNTPPPRPPKPSHLS

SEQ ID NO: 1239 - protein, 13 aa, Homo sapiens
PCRFSPMYPTASA

SEQ ID NO: 1240 - protein, 13 aa, Homo sapiens
SYVPMSPQAGASG

SEQ ID NO: 1241 - protein, 13 aa, Homo sapiens
SISSPLPELPANL

SEQ ID NO: 1242 - protein, 14 aa, Homo sapiens
KFSLDYLALDFNSA

SEQ ID NO: 1243 - protein, 12 aa, Homo sapiens
RVDYVQVDEQKT

SEQ ID NO: 1244 - protein, 12 aa, Homo sapiens
SPDDYIPMNSGS

SEQ ID NO: 1245 - protein, 11 aa, Homo sapiens
SYIEMEEHRTA

SEQ ID NO: 1246 - DNA, 30 bp, Homo sapiens
acgtggatccccgagagtctctctcacatg

SEQ ID NO: 1247 - DNA, 34 bp, Homo sapiens
atatatatatctcgaggggtgaagctgtgggata

SEQ ID NO: 1248 - DNA, 20 bp, Homo sapiens
cccatcaccatcttccagga

SEQ ID NO: 1249 - DNA, 20 bp, Homo sapiens
ggggccatccacagtcttct

SEQ ID NO: 1250 - DNA, 24 bp, Homo sapiens
gccaggatgagcactggtgacact

SEQ ID NO: 1251 - DNA, 25 bp, Homo sapiens
cactttggattgcctctcatcagtc

SEQ ID NO: 1252 - DNA, 33 bp, Homo sapiens
acgtggatccccaatagagaaatcaatggccca

SEQ ID NO: 1253 - DNA, 30 bp, Homo sapiens
acgtggatcccctggttagagatgtgtgtt

SEQ ID NO: 1254 - DNA, 33 bp, Homo sapiens
tgtgtggatccccgtgcccatgagccctaaagg

SEQ ID NO: 1255 - DNA, 32 bp, Homo sapiens
tgtgtgaattcggtggaaaggtttctcgagtc

SEQ ID NO: 1256 - DNA, 27 bp, Homo sapiens
gcggcaagctttttgcaaagcctaggc

SEQ ID NO: 1257 - protein, 132 aa, Homo sapiens
MSAGDAVCTGWLVKSPPERKLQRYAWRKRWFVLRRGRMSGNPDVLEYYRNKHSSKPIRVIDLSECAVWKHVGPSFVRKEFQNNFVFIVKTTSRTFYLVAKTEQEMQVWVHSISQVCNLGHLEDGADSMESLS

SEQ ID NO: 1258 - protein, 31 aa, Homo sapiens
SPLPELPANLEPPPVNRDLKPQRKSRPPPLD

SEQ ID NO: 1259 - protein, 62 aa, Homo sapiens
WTKKFSLDYLALDFNSASPAPMQQKLLLSEEQRVDYVQVDEQKTQALQSTKQEWTDERQSKV

SEQ ID NO: 1260 - DNA, 27 bp, Homo sapiens
gcggcaagctttttgcaaagcctaggc

SEQ ID NO: 1261 - DNA, 27 bp, Homo sapiens
gcggcaagctttttgcaaagcctaggc

SEQ ID NO: 1262 - DNA, 27 bp, Homo sapiens
gcggcaagctttttgcaaagcctaggc

SEQ ID NO: 1263 - DNA, 27 bp, Homo sapiens
gcggcaagctttttgcaaagcctaggc

SEQ ID NO: 1264 - DNA, 27 bp, Homo sapiens
gcggcaagctttttgcaaagcctaggc

SEQ ID NO: 1265 - DNA, 27 bp, Homo sapiens
gcggcaagctttttgcaaagcctaggc

SEQ ID NO: 1266 - DNA, 27 bp, Homo sapiens
gcggcaagctttttgcaaagcctaggc

SEQ ID NO: 1267 - DNA, 27 bp, Homo sapiens
gcggcaagctttttgcaaagcctaggc

SEQ ID NO: 1268 - DNA, 225 bp, Homo sapiens
actcctgagctcaggcaatctgtccacctcgacctcccaaactgctaggattacaagcgtgagcacccagcctcatacttatttttaatatttaaaatgattttgcttttcttgtttcttagtgcatgtaaagaagtatctttgcctgctgtataactgtgtgtatctcattttcctcacagtacttattgattccatttacaaagtgactgagggccggcagtc

SEQ ID NO: 1269 - DNA, 4160 bp, Homo sapiens
ctccagaaaacacaactttattcactaggactgaaaacaaaggcttgtgcaatcaaaaggccaagttgagtgcaaggtggagcgtgctcggaaatcacagacctcacctgtggccaggccgggctggcagttgttgtttctggtgttttctgtgatttcccacattttatcacaaggccacaggcatcctccaaggtcagtgaggaagaccctattgctgtttgagccagagcctcctagagggtgggccgggagcaggcagctcccaggacacacagatgcacgatgtgattagcagtgaagccttctgtcccaggcgtgggcaggcgtcctcccttagctgcctgagcatgtgcggctgaagacatggcttttctagggttaggcactgtgcgtggtgccagccccagccctccctcacctggacgtgcccaggagggggcagcagagcaccgtggcaaagtctgtccacttgccgctccccgtcccgtgcagaagactgcttttccgtggcggccagtgtgcggccacgggctctcagaagcctgcttgttgggactgttgctgggaggaggaagggacaaggcttgacctggggctcctgaaaacagacactcgggcgttggccactgggcaacaaagtcagaagggcctggagaccctctgtccagccttctagggactggacggcttcctccagaggactgagctcagccaggttcaagggcggcagcaggaggcccctcgaccctccctcttaacgtaatcatgcagccggaagcgcggctcgctgggagccttcatggagcgctgcttcaactccctgcggagtgggggtgacaaggggacacgatggcctggactctaatgaggattcaggccctgggctgggggagtcctggtgactggcaggacttactttgctatggctgtgaaggccaagtccacgttgaggcccgtcttggcgctggtctccatgaagggcagtccatactcctgtaaacagctgctgccagccaggtggtggcctggcggggacagcctaggctcgcagcctccaggggcaccccctcaccacccccctgccctgactcaccttggccagcttctccccgtcctccctcttcaccacacgctcatgggcagagtccacctggcccaggcacagggtcttggtgaaagctggcccatggttggcccctgccccctcacctgccctgccctgtggcccaggtgaggacagccgggcctcccaccttgttccccagcagcatgagcgccacgtcgtgctgggcgtactcgtggatctcggtcagccaggcctgtgggaggcagcagaccaggctggggctccctgcatggcttgccccatgccccagaactttggccctccaggtcacactgtagagggcacctgtctttatctttttttttttttttttttttttgagacaagagtctcgccctgtttcccaggctggagtgcaatggctccatctcgactcactgcagtctccatctcctgggttcaagctattctcctggggttcagagaaccttgggagggttcagcctcccaagtgactgggattacagttacgcaccaccacgcccagctaattttttgtatctttagtagagacggggtttcaccatgttgatcaggctggtctccaactcctgacctcgtgatccgcccacctcagcctcccaaggtggtgggattacaggtgtgagccaccatgcccagcccattttatttttttgagacagttttgctctgttgtccaggctggagtgccgtagcacagtcttggctcactgcaacctcagtctcctgagtagctgggattacaggtgtgtgccaaaacgcccggctaatttttgtatttttagtagagatggggtttcctcatgttggccaggctggtctcgaactcctgacctcaggtgagccgccatgcctggccaggatacctgtctttagaagtgataaccccccgtgtaccacatacagaagcccaccttacaggtcccttacacaaagcctcctgctgagggagctggaatggcactcaggtccacttgggccacctccagcccagaaggctgtcatttccccctcccctctctcagcggggtcctttggaaccctgatgccatctaccagaaggaggttgggatgggtcaggccctatcagggccctttcaccccaccaggaaagccactgacctggatgttgtcaaaggaggccttgttggtgacatcgtagagcagcagcagagctggggacagagggcagtgaggacatccaccatcacctgcaccctcaggtgctcagacccccgccccaaccagcccaggtacccaggggctcaccatgagcatcccggtagtaggcatgggtaacactgcggaaccgctcctgaccagctgtgtcccacatctgcagcgacaggcactggtcaggctgtccagcccttccctggtgtcccctgtcccccaacttgtcctctgccagtcaccttacctgcagcttcaccttcacaccatccacgtccagaactttgttctgaaacagacagaaccaggcagctctggcatgggcccagcccagcctctggtcccactagcttcactgccttcctgtcccctgagacctcccagctcccaggtccagcccagcccctgcaggcttcccttaagccaatttgacctcacccacacctgcaagtgcaggcctctcccggcagcctctgcactattcctgcttagagcctcttacgctgacttatttgaactcatgaccccaccaggcctcttactgacactgcctcggtttcctcatctgcaaatgggtgcagtaactaacgagctgcaacgcctcagccttcccagtagctctttttgctaatttgaaagactcaggatggcttgaacccagaagttggaggttgcagtccaccatgatcaccactgcactccagccagggcgacagagtgagaccctgcttcaaaagaataaaaaattaaagccactccttgctgggattgtcagggctgggcctgggcctgtctgacccaaggcagtaaccgcagatcccagaactgcctggcagcgtccccagccgggccctcccagttaacgattagacgtaaggcagggagtggtctagccccagtcccatctgttggggtgggggcggggggcttcagccgcagtctgaggccctgggcagctggaacctgtgccacctccttcagcctgagctcctgctgtcagagtgcttctgggtctcccgggaaccaggcagggccatctgctgggctggggaggacaccgccttccctggcaccctgaacgagagtgcgaaccaaatggcctcacctcttaccacctgcccgagagccaagagggaggtggggaagtggggaccagacaggactggcctgcccccctcgggcacttcagtcgtcactccatcccagaggacttgaggggacttggaacccccagactggagggagccccttttcctgtccctggaacagcccttcctccatcctccctctaactggctctaattaaagggtgagaaaaatgcaaatttaagatttgctgaggacaagccggcacctcagcacgaggaattccagctggtgggggtgggggtgggcgctcctcacccaagagcagggtcctctcccctaggcaagccctggaaaccctcgctcaggctctgcagggagcatgtgcttctagggcccagtaaggcctctgtaccgaggcagcactgctggccccaagtggacgtggcccttgacttcctctgacccaccaccctgtaggcaacagtgtccgcctcccccaaggcacaggatatggtccctcggtaatgccagcccctggcatagggcaactaactatgcttgtcgggtgcagccaccagcccaggtgttggaaggtcgaggcaggcagcttctggggtccaggcctcgagcctgttggtaccatggggatcagagagaacttgctgctcgggtaccggcgggactctgatgtggggccaggccagggcctccactcacccggaagtcaatgcctacggtggagatgaaggtccccgccaggaaagcaccatccttgaatcgcaccagc

SEQ ID NO: 1270 - DNA, 2446 bp, Homo sapiens
ctccagaaaacacaactttattcactaggactgaaaacaaaggcttgtgcaatcaaaaggccaagttgagtgcaaggtggagcgtgctcggaaatcacagacctcacctgtggccaggccgggctggcagttgttgtttctggtgttttctgtgatttcccacattttatcacaaggccacaggcatcctccaaggtcagtgaggaagaccctattgctgtttgagccagagcctcctagagggtgggccgggagcaggcagctcccaggacacacagatgcacgatgtgattagcagtgaagccttctgtcccaggcgtgggcaggcgtcctcccttagctgcctgagcatgtgcggctgaagacatggcttttctagggttaggcactgtgcgtggtgccagccccagccctccctcacctggacgtgcccaggagggggcagcagagcaccgtggcaaagtctgtccacttgccgctccccgtcccgtgcagaagactgcttttccgtggcggccagtgtgcggccacgggctctcagaagcctgcttgttgggactgttgctgggaggaggaagggacaaggcttgacctggggctcctgaaaacagacactcgggcgttggccactgggcaacaaagtcagaagggcctggagaccctctgtccagccttctagggactgggcggcttcctccagaggactgagctcagccaggttcaagggcggcagcaggaggcccctcgaccctccctcttaacgtaatcatgcagccggaagcgcggctcgctgggagccttcatggagcgctgcttcaactccctgcggagtgggggtgacaaggggacacgatggcctggactctaatgaggattcaggccctgggctgggggagtcctggtgactggcaggacttactttgctatggctgtgaaggccaagtccacgttgaggcccgtcttggcgctggtctccatgaagggcagtccatactcctgtaaacagctgctgccagccaggtggtggcctggcggggacagcctaggctcgcagcctccaggggcaccccctcaccacccccctgccctgactcaccttggccagcttctccccgtcctccctcttcaccacacgctcatgggcagagtccacctggcccaggcacagggtcttggtgaaagctggcccatggttggcccctgccccctcacctgccctgccctgtggcccaggtgaggacagccgggcctcccaccttgttccccagcagcatgagcgccacgtcgtgctgggcgtactcgtggatctcggtcagccaggcctgtgggaggcagcagaccaggctggggctccctgcatggcttgccccatgccccagaactttggccctccaggtcacactgtagagggcacctgtctttatcttttttttttttttttttttttttgagacaagagtctcgccctgtttcccaggctggagtgcaatggctccatctcgactcactgcagtctccatctcctgggttcaagcatttctcctggggttcagagaaccttgggagggttcagcctcccaagtgactgggattacagttacgcaccaccacgcccagctaattttttgtatctttagtagagacggggtttcaccatgttgatcaggctggtctccaactcctgacctcgtgatccgcccacctcagcctcccaaggtggtgggattacaggtgtgagccaccatgcccagcccattttatttttttgagacagttttgctctgttgtccaggctggagtgccgtagcacagtcttggctcactgcaacctcagtctcctgagtagctgggattacaggtgtgtgccaaaacgcccggctaatttttgtatttttagtagagatggggtttcctcatgttggccaggctggtctcgaactcctgacctcaggtgagccgccatgcctggccaggatacctgtctttagaagtgataaccccccgtgtaccacatacagaagcccaccttacaggtcccttacacaaagcctcctgctgagggagctggaatggcactcaggtccacttgggccacctccagcccagaaggctgtcatttccccctcccctctctcagcggggtcctttggaaccctgatgccatctaccagaaggaggttgggatgggtcaggccctatcagggccctttcaccccaccaggaaagccactgacctggatgttgtcaaaggaggccttgttggtgacatcgtagagcagcagcagagctggggacagagggcagtgaggacatccaccatcacctgcaccctcaggtgctcagacccccgccccaaccagcccaggtacccaggggctcaccatgagcatcccggtagtaggcatgggtaacactgcggaaccgctcctgaccagctgtgtcccac

SEQ ID NO: 1271 - DNA, 4185 bp, Homo sapiens
ctccagaaaacacaactttattcactaggactgaaaacaaaggcttgtgcaatcaaaaggccaagttgagtgcaaggtggagcgtgctcggaaatcacagacctcacctgtggccaggccgggctggcagttgttgtttctggtgttttctgtgatttcccacattttatcacaaggccacaggcatcctccaaggtcagtgaggaagaccctattgctgtttgagccagagcctcctagagggtgggccgggagcaggcagctcccaggacacacagatgcacgatgtgattagcagtgaagccttctgtcccaggcgtgggcaggcgtcctcccttagctgcctgagcatgtgcggctgaagacatggcttttctagggttaggcactgtgcgtggtgccagccccagccctccctcacctggacgtgcccaggagggggcagcagagcaccgtggcaaagtctgtccacttgccgctccccgtcccgtgcagaagactgcttttccgtggcggccagtgtgcggccacgggctctcagaagcctgcttgttgggactgttgctgggaggaggaagggacaaggcttgacctggggctcctgaaaacagacactcgggcgttggccactgggcaacaaagtcagaagggcctggagaccctctgtccagccttctagggactgggcggcttcctccagaggactgagctcagccaggttcaagggcggcagcaggaggcccctcgaccctccctcttaacgtaatcatgcagccggaagcgcggctcgctgggagccttcatggagcgctgcttcaactccctgcggagtgggggtgacaaggggacacgatggcctggactctaatgaggattcaggccctgggctgggggagtcctggtgactggcaggacttactttgctatggctgtgaaggccaagtccacgttgaggcccgtcttggcgctggtctccatgaagggcagtccatactcctgtaaacagctgctgccagccaggtggtggcctggcggggacagcctaggctcgcagcctccaggggcaccccctcaccacccccctgccctgactcaccttggccagcttctccccgtcctccctcttcaccacacgctcatgggcagagtccacctggcccaggcacagggtcttggtgaaagctggcccatggttggcccctgccccctcacctgccctgccctgtggcccaggtgaggacagccgggcctcccaccttgttccccagcagcatgagcgccacgtcgtgctgggcgtactcgtggatctcggtcagccaggcctgtgggaggcagcagaccaggctggggctccctgcatggcttgccccatgccccagaactttggccctccaggtcacactgtagagggcacctgtctttatcttttttttttttttttttttttttgagacaagagtctcgccctgtttcccaggctggagtgcaatggctccatctcgactcactgcagtctccatctcctgggttcaagctattctcctggggttcagagaaccttgggagggttcagcctcccaagtgactgggattacagttacgcaccaccacgcccagctaattttttgtatctttagtagagacggggtttcaccatgttgatcaggctggtctccaactcctgacctcgtgatccgcccacctcagcctcccaaggtggtgggattacaggtgtgagccaccatgcccagcccattttatttttttgagacagttttgctctgttgtccaggctggagtgccgtagcacagtcttggctcactgcaacctcagtctcctgagtagctgggattacaggtgtgtgccaaaacgcccggctaatttttgtatttttagtagagatggggtttcctcatgttggccaggctggtctcgaactcctgacctcaggtgagccgccatgcctggccaggatacctgtctttagaagtgataaccccccgtgtaccacatacagaagcccaccttacaggtcccttacacaaagcctcctgctgagggagctggaatggcactcaggtccacttgggccacctccagcccagaaggctgtcatttccccctcccctctctcagcggggtcctttggaaccctgatgccatctaccagaaggaggttgggatgggtcaggccctatcagggccctttcaccccaccaggaaagccactgacctggatgttgtcaaaggaggccttgttggtgacatcgtagagcagcagcagagctggggacagagggcagtgaggacatccaccatcacctgcaccctcaggtgctcagacccccgccccaaccagcccaggtacccaggggctcaccatgagcatcccggtagtaggcatgggtaacactgcggaaccgctcctgaccagctgtgtcccacatctgcagcgacaggcactggtcaggctgtccagcccttccctggtgtcccctgtcccccaacttgtcctctgccagtcaccttacctgcagcttcaccttcacaccatccacgtccagaactttgttctgaaacagacagaaccaggcagctctggcatgggcccagcccagcctctggtcccactagcttcactgccttcctgtcccctgagacctcccagctcccaggtccagcccagcccctgcaggcttcccttaagccaatttgacctcacccacacctgcaagtgcaggcctctcccggcagcctctgcactattcctgcttagagcctcttacgctgacttatttgaactcatgaccccaccaggcctcttactgacactgcctcggtttcctcatctgcaaatgggtgcagtaactaaggagctgcaacgcctcagccttcccagtagctctttttgctaatttgaaagactcaggatggcttgaacccagaagttggaggttgcagtccaccatgatcaccactgcactccagccagggcgacagagtgagaccctgcttcaaaagaataaaaaattaaagccactccttgctgggattgtcagggctgggcctgggcctgtctgacccaaggcagtaaccgcagatcccagaactgcctggcagcgtccccagccgggccctcccagttaacgattagacgtaaggcagggagtggtctagccccagtcccatctgttggggtgggggcggggggcttcagccgcagtctgaggccctgggcagctggaacctgtgccacctccctcagcctgagctcctgctgtcagagtgcttctgggtctcccgggaaccaggcagggccatctgctgggctggggaggacaccgccttccctggcaccctgaacgagagtgcgaaccaaatggcctcacctcttaccacctgcccgagagccaagagggaggtggggaagtggggaccagacaggactggcctgcccccctcgggcacttcagtcgtcactccatcccagaggacttgaggggacttggaacccccagacggggtagagaacagctccccagactggagggagccccttttcctgtccctggaacagcccttcctccatcctccctctaactggctctaattaaagggtgagaaaaatgcaaatttaagatttgctgaggacaagccggcacctcagcacgaggaattccagctggtgggggtgggggtgggcgctcctcacccaagagcagggtcctctcccctaggcaagccctggaaaccctcgctcaggctctgcagggagcatgtgcttctagggcccagtaaggcctctgtaccgaggcagcactgctggccccaagtggacgtggcccttgacttcctctgacccaccaccctgtaggcaacagtgtccgcctcccccaaggcacaggatatggtccctcggtaatgccagcccctggcatagggcaactaactatgcttgtcgggtgcagccaccagcccaggtgttggaaggtcgaggcaggcagcttctggggtccaggcctcgagcctgttggtaccatggggatcagagagaacttgctgctcgggtaccggcgggactctgatgtggggccaggccagggcctccactcacccggaagtcaatgcctacggtggagatgaaggtccccgccaggaaagcaccatccttgaatcgcaccagc

SEQ ID NO: 1272 - DNA, 547 bp, Homo sapiens
cgagtccgagggggaagaggtttgttaatacgttcgccatgtgctacgatcttgggacgaactgagccacgagcgtggctttgagggccgtccgaacgctgcaggccggccaggtccctgggcgtccaggcctggcctacgcaccactttgtcccttagcgtttaaaggtttcttcccgaatctcaggccctcagctacctgcaggtaagactgggccgggcttgggttcccttattctcccagtctgtgatgaattgctttgacttctgacacctcgtatgaaaactgcacgtgcagtctgattatttagcaagactgaggcttgagggtgcgcactcctgacggggagctgagagtggaaacaggtgttgcccgaaacgaaggagtggggacttaatgtctgtattttggcgctgactttcaggtttcgtcgcgagccggctgcaagttttgaacctaagtaaacctcaatccggagggcctagcggtaaggtgggcgctgtgtctattgaagtgcttagcaataaagaaaggtagtgagttgat

SEQ ID NO: 1273 - DNA, 547 bp, Homo sapiens
cgagtccgagggggaagaggtttgttaatacgttcgccatgtgctacgatcttgggacgaactgagccacgagcgtggctttgagggccgtccgaacgctgcaggccggccaggtccctgggcgtccaggcctggcctacgcaccactttgtcccttagcgtttaaaggtttcttcccgaatctcaggccctcagctacctgcaggtaagactgggccgggcttgggttcccttattctcccagtctgtgatgaattgctttgacttctgacacctcgtatgaaaactgcacgtgcagtctgattatttagcaagactgaggcttgagggtgcgcactcctgacggggagctgagagtggaaacaggtgttgcccgaaacgaaggagtggggacttaatgtctgtattttggcgctgactttcaggtttcgtcgcgagccggctgcaagttttgaacctaagtaaacctcaatccggagggcctagcggtaaggtgggcgctgtgtctattgaggtgcttagcaataaagaaaggtagtgagttgat

SEQ ID NO: 1274 - DNA, 547 bp, Homo sapiens; identical to SEQ ID NO: 1273

SEQ ID NO: 1275 - DNA, 424 bp, Homo sapiens
ggcgctgcgatctcccccacagcttctgcctgctgtgcacgcctggggatctgcgggaaggaggaagtcgctgtggcagccagcccccggccccctgagggtcccctcccacgggactctgccctcagggtctgaaaggtggaaagcagaggcccctgcccaggctgtgtggctggccccttgtccttctcctccaggttcggaccttcaggtggccagggccgattctccaaatcctaagctggtccctggcagacccacctccccaacctgggctgcactggagctctgtcaccccctctcacagagaagatgggactgcagtggtcagagctggggcacagtggtccagaggggtggtgtccttggcatgcaggggcttcttggtgtttctttgggagctggagagatgacccagctgtcc

SEQ ID NO: 1276 - DNA, 419 bp, Homo sapiens
ctgaaacagacagaaccaggcagctctggcatgggcccagcccagcctctggtcccactagcttcactgccttcctgtcccctgagacctcccagctcccaggtccagcccagcccctgcaggcttcccttaagccaatttgacctcacccacacctgcaagtgcaggcctctcccggcagcctctgcactattcctgcttagagcctcttacgctgacttatttgaactcatgaccccaccaggcctcttactgacactgcctcggtttcctcatctgcaaatgggtgcagtaactaaggagctgcaacgcctcagccttcccagtagctctttttgctaatttgaaagactcaggatggcttgaacccagaagttggaggttgcagtccaccatgatcaccactgcactccagccag

SEQ ID NO: 1277 - DNA, 424 bp, Homo sapiens; identical to SEQ ID NO: 1275

SEQ ID NO: 1278 - DNA, 8414 bp, Homo sapiens
ctgctgggaaatcatgaagaacgacagcatgaggagcaccactgtcaacaggcttctgagcgtggcttggatccttagggggagaaaagggctgtgaatgaagtgtgcaggatagatggtggatttattattcactctgagaccaattttttttttctcattagagtcctcttgacacaattacattatgagtacatgatgcaaaccacacagttgagccaaacaagggaattattatcaagttgaagaagaatgtgtccttgctaagggaggatgaaaatctcaattaaaatatcccccagtatgttttctttttgcttttttaagctgagagagtaaaacaaaagggaactgtttatttattttgaaacagtatctattctaccccaaagtagtggtttttgacctctttccctttcaaggatagctttttccttaaaactgtgatcaagacagagtcttaaaagttgtgtctttattaggatgggaaaagaagaaagttctatgatttatgctcttgccttttgtaatgaaaggagctaatgactttcaacagaagtataattcacaaaaagtaaaatccatttcatttattaccacttaactaagtgctttttctaatttgaaagcaatgctacctcccatgcctggtctgcattttgtatttaatctgaatggtttattcaacagtagttctaaataaattagcaaaaagaatctaacattctctatccatctagccaaatgccgagattggccagaggataaggcaaagctgaagagcgacctcttcttattgactagcaattgttattcttagtttctttatatcaagagacaggcttatcctcatcatcatcaaatcccactgaaggatattatttggagttataacttaacactcttcaacactggcaagcctgtgaaataaataaaggcagatttttgtgccctttcttgtctcttcacctcctctaataactcttgtccccttagagacgtcctgacacatctatacctctgcccttcccctggccatgatgcaccaggctgattgcagcgcactgtgaatgatggtccactttctccatttcaaccctgcagcacctttgctgagatcttttctaaatctcagctgctctttcaaccaaaatgcacctgcagaaacaaaactttcattctctcaagttaggtaaactgaaatataacttaagactctaatggctaatgtagcttactatattagcttactaagaagaccctaacattttttcatggactgcttaatgcttttctctaaataaatgaacaatatggaaatttcatgaattctgagatattttaggtctgacatggcttttttttctttgacacagggtcttgctctgtcacctaggctctggtgtagtggcacaatcacagctccatgcagccttgacctccaggggttaagttatcctcccacttcagtccccaaagtagttgggactacatacaagcactaccaagcgtggctcatttttgtattttttgtagagattgggtctcgccacgttgcccagggtggtctcaaattcctgggctcaggtgatccacccatcttggcctcccaaagtgctgggattacaggagtgagccaccgtgcccagcctggagtggcttttcataattattcagcatggacaacataaaaaatgccatatctacaaaaaaataaaaaattagcctggcatggtgatacacccctgtggtcccagctattagggatgcagaggtgtgaggatctcttgatcccaggaactcgaggctgcagtgagctatgattgtgccactatactctgacttggatgactgagtgactctctccaaaaaaagttaaacaaattaattattatttatataatgtgttatacatgtgcatgtgtgattttcatttttttctgatttacatctgtggagaaaaaggaattactattcaataagtgttattaggctagatgcctatccatttggaaaaaatgatgtcagagacctaccacacaccaaacacaaacatgaaatctccaaatggaccagaggcctaaacataaaccagtccttggagggaggggataatttgtgcctcccagtcacacattttcccttctctgccttcagtgtatggatatcactggcaatgctgctcatcaacccagcctagcaggtgaagggcaagaggaacaggctagacagggttgccaacaagtggtccatacaattcagaccataccactggggtaggtatctggtaggtaaatataacataatgcaaaggtctttctaatatgactataactgctaatgcaaatggttttgtaatattaagaatagctaatatttactgctcattcaccatgtgctagtcactgtgttaaataccttatatgcattagctcaatgaatttgttaaacatctttgagatataacccacatacaataaaatttacctactgaaagtgaacatggctgtagcatattcatagaattatccaaccatcaccataacccaagtgcagaacacttttatcactccccaaagaaacctcctactaattaggtgtcacaccccagttaccctcccctcagccccaggcaaccagtagtctactttctgtctctatggatttatctattctggacttttacacaaataacatcatataatctgtcaactctgaagacaactctgtgggcagttatctcacacattaaaaaaataaagtttagagaagttaaataaccaccgaagaaggtggaaggggaaccaaattccacttccctgaaacccaggtctggggtctcaaccatgtaccaggcaacaaccttccacttttcccatgatctgtctgattcaaccacaactggtcatgttcattcaatattttctgtttgccaagttagggcaaagtacaacatattcgtagagatatttaccttaaaactaggctttcaaataggtaagttttatttaaaaaaaaaatgtaacaatagccatgaacccagaagcataaaggaggattcatttcattatcaccaatagctgcccatcagaggccaactctctgcaagtctatagtaaaagatgagaaggtggtatttaaggtggaaagaactttgcactgttataaaagactaacttttggctgggcatggtgacccatacctgtaatctgaacactttgggaggcccatgcaggcagatggcttaccccaggagtttcagaccagccctggcaacatagtgagaccctgtctctacaaaaaattttaaaaattgccaggcatggtggtgcacgcctgtagtcccagctactcaggaggctgaggtgggaggattgcttgagccgggaaggtcaaggctgtagtgatcataccactgcacttcagcctgggcaacagagtgagaccttatctcaaaaaaaaaaaaaaaaattctaattttttttagcttctatttttcacaaaggaaagctttttggcagtataacttccactgttgccataagtgtgttctgaaagaggaaggacagctatgacagatggataatgccgtaccaaaacagagaaaatgagtcagtggagaacttgccccgtgggagctaaagtaaggattttcatatgccagcagaagctaccttaacacatatctcctctgctctccaaatacaattttttagtttcttagcaaacttcaaaagataaactgccttctaagaagaaaaaatgggaaaagattatgaaaactaggataaacggcaaaccaagtattttacttgatcactattatttttcatatttactttatttttttatttgttttttttttccaagacataatctcgctctatggcccaggctggagtgcagtgaagaaaacaaaacacagggtagtcactctgtatcgaagtgattagtatggcagtggcaagtctcttagtagtaatttattctaaaagtagaataaatgctactgtaatttttactctggttaaaataaatgtgctaataaaaacctgaagatgagatataattaatagttccatgaaatgtgctgctatgtgtgatatgagggctgtaacaatattaattccttacgtttggtctgcttctaagatgttcatcaagtggagtgataatcttcatttgagacaggtgaactctgccagtgtcttctcccttttggcactccaagtaattattttccgtctgcttcagcatcacaagtacatccccacgctgcaaggtacaataccactctctgaagcaattattatttaataaaacattattactttttcacattttaatctttggagcctaaagcatttaataatgtgtaatggtagtaacagaggccagtaattttttttttacattaaccagtaaggaaagagctctactttaccttacaagagagttctccggggttttgagagacaatatcttcattggcaattccatgaggcacagacagcttaaacgtaaaccaataaaaggcttattcacaatcaaataacctcctcttaagttgctgatcatttaggaatttggcatgtgtgtgcctaaagtgcaccttctccagcagctaaactcacctggcttcatcgcgctctagatcaatggagcctgccatttctcatggatgttaagaggctcttgggagttggagttaggcccatagaaccacaagagctaaacatggcctaacattcccttaatgaccataaccaggaagttctgttctacaggacaagatccgccaagtcccctgggggtttgaaggagaaacacccagcacttgacctcacagccagttctttaattcagggttcttacaatggtggcctctgaaggctgatcagtgattggagccctccgtgtactgcctgcctgtttccatagaccttgaagctcttctcctagagtctctctgataccaagtgtctacttaaatccatttcatggcctgatcccagccacttcctggtccactcagctctgtctgatcttagaatggtttttacatctgtactggaccttgtccaggaggctctgttccctgctttggaaaattttagctgatgagtgcacatcagacggtctgtactatataaaaggcatacccaggaaatgcaatcacacaagctcacatccaacatgggaagaaggctgcctgggccttggatcacccaggagcaaagatccacagtgcaaggatgtggccctgtacagctggcttggtggtgccatttcccaacatctttgtcagattcctagggcttccaatgtacccagattcctggctagcaatttaatggtactgtaggcatgcaataaatgaaagatttgaagaattattttgtaatgagacatacagctctatatataccatcattttgaatgtattgagttttaaaaaatgctttattgacattatacgactatgctaagaactgtcaggcctctgagcccaagctaagccactgtgacctgcacgtatacatctggatggcctgaagcagctgaagaaccacaaaagatgacattccaccattgtgatttgttcttgccccaccccaactaatcaatcgaccttgttatgttcctccccaggacaatgagtctcctgatctccctaccctgcaccttgtgacccccgcccctgcccgcaagagaacaaccccctttaactgcaattttccactacctacccaaatcctttaaaactgccccactcctgtctccctttgctgactccttttttggaatgagcccgcctgcacccaggtgaaataaacagccttgttgctctcacaaagcctgtttggtggtctcttcacacagacgtgcgtgacaagaaccaaatgtgaaatctggttccccttgagaaagggctcttaacagaatggccaaatcaagtagaggctacgattggcgtaatggttaggagcaggtgtcagagccagctgacctgttctcaaatcttgctccaccattaactggattcgcaaccctgggcatgttactttatgtctctgtttcttattttcctcacttgttaaaggaggataataatatctacctcacaaggttggtatgaggaataaatgagttatttaatacatacataaagtgcttcaaacagcgcctggctcataattagtactcaatatacatcaactactgttatttattaattaagtaatctatcccaaagaacacccctgggttttagaaattaaagttttatcagtttaagtgaatattaatatatatgaatatactgcctccttcttatttgtctttacccttctctaaagaggatttttgaaaaaccctgaacagcttaaagaaaaaataattactggctcaatgatggaaatgtaacacaacatagaattattaattgctgttcttgttacaagctactctgtcgttcaattgttaaaaagagtaagcagtcctgctctcctgatcatttttattttatttttttttttaaaaaagagtctcattctgtcacccaggctggagtgcagtggcatgctcttggctcactgaaacctccatctcctgggttcaagcagttggcttcccaaagtgctgggattacaggtgtgagccactgcacctggcctccttatcatttttatttgttttacatttttcaggttaacctgatcaaagtagagaacacatcaactgtttttgttgttgttgttgttgttttgtttttttgagatggagtctcactgttgcccaggctggagtgcagtggcacaatctcggctcactgcaacctctgcctcccgggttcaagcaattctcctgcctcagcctctggagtagctgggattacaggcatgtgccaacacgcccagctaatttttgtatttttagtagagacagaggtttcaccacgttggcctggctggtctcaaactcccaatctcaagtgatccacccgcctcggcctcccaaagtgctgggattacaggcatgagccaccacccagcaactctgttttttaactgtgggaaatgcaggcaaaggtttaggtcatttgatgagaaaaacattaaaagagaacaaaatcaatatctcaactattgatgaaaacttctaactggtaactattaaatggaccacgataattattgggcttacaaaaggggaaaatgagggaaaaaccatccatcttagtaagaactttctacttcattttaaaatttactcaaggggaaaaggagttattagatataaactatatcatgatataaactataagccaggagtggaggcatgttcccataaccccagctactcagaagtgtgaagcaggaggatccctgagctctggaggtcgagactgcagtacactatgattgcagcagtgcactatgattgcatcactgcactcgagtctgggtgatagaatgacactccatctcttaaatgaaaggaaaaacaaaagatataaactatagtatctgtcagagttactcccattagtataacccactgggtcaggtttttcagaatttctgtttggtccagccaggcagcaagttacaagcggcctgccctgctttctctcctctttccctacatttctcctaataatgaaaccctgctttaaagacctaggtgttttgtttgtttgctttgagacagtcttgctctgttgcccaggctggagtgcagtggtgcaatcttggctcactgcaacctctgcctcccaggctcaagcaattctcatgcctcagcctcctgagtagctaggattacaggattgtgccatcacgcctgggtaattttttgtaattttagtagagacagagtttcaccacattggccagctggtctcaaacttttggcctcaagctgatccaccagcctcagcttcccgaagtgctgggattataggtgtgagccactgtgcccaaccaagacctagaatttattatggcctactcatctaaagcactcttggcgtcaagggacaattccacatttgttccatcatctttttctaaggaatgatgaatcgtatatatactttagggcacacctcttgaccacaaacatttttaaaagctaaatttaccatgtatttactgtagagagggtgtcctggtttgggacgagggggtagcaccggatcttgatttttaaaaacttgactcttggcttttgagagtccagttgccaagttactttgttttttctgaagatccatgtcagaagaggatcgattaaaaggcagtttcttattagatcttctggttgcagaaagctttgggggaggtggtctctcagggggcaccttggttggaggctgttgagttggaatggtttttccattcacaggtct

SEQ ID NO: 1279 - DNA, 309 bp, Homo sapiens
tttttttttttcttttttgagacggagtctcgctctgtccctcgggccggagtgcagtggcgcgatctcagctcactgcaacctcagcctcgcgggttcacgccattctcctgcctcagcctcccgaatagctggactacaggcgcccgccactacgcccggctaattttttgtatttttagtagagacggggtttcaccatgttagccaggatggtctcaatctcctgacctcgtgatccgcctgcctcggcctcccaaagtgctgggattacaggcgtgagccactgcgcccggcctagtacccact

SEQ ID NO: 1280 - DNA, 6181 bp, Homo sapiens
ccatttaatccctggctggatcgtgtgacctgcctggcattctcctccctggaatccggcgcttctgacagcagttgctatattgggggtgcgggcaccgccctggacgctctaggcccccaccctcacccccgctctgttctccttcaaggcagagtcacggtggcagcattgagagttggacacccgggtccttgaagtgatctctaggccccaggtatgtgggggggcggggggggaagtgcagagcagtgagaggaagagctttgagactccatcctcacccatcctggcccttcttagggtcttcagcaccctgcctgctaagtcctagctctgatgactccttgggtggtggggatggcagtggggcgaggcccaggtatagagagggtcttttcctatccccagaaacataatgtccagctttcctgcttacccctctgccctccacagccccaaatccgccaccattccgtgctgcggggacaccatggctccagaagaggacgctggaggggaggccttagggggcagtttctgggaggtgagcagctgggtcctgggctcagctacttgtctaggggaggagcccatctgacagccccagccccaaaggaagcttctccctggtgatggcacccttttcctgtatgcccaggctggcaactacaggcgcacggtacagcgggtggaggacgggcaccggctgtgcggggacctggtcagctgcttccaggagcgcgcccgcatcgagaaggcttatgcccagcagttggctgactgggcccgaaagtggagggggaccgtggagaagggtgagccaggccctcgcagggggcagagggcagctgagtgcaggactgtcgggccagcttctttttgcacgtctcgtgggaagtttgaggcctccacgtctaccctcccttagaaagggaagatcctcctggtcatcctcatggctgtggtgttattaaagtttataaaggatgctcatgagttactttgatagttgcaacaaccctgtggagatggttgttttacccattttctttcctttcttttttttttttttttgagacgttttgcacttgttgcccatgctggagtgcagtgacatgatgttggctcactgcaacctccgcctctcaagtggttctcctgcttcagcctcccaagtagctgggattacaggcacccaccaccacgcctggctaattttgtatttttagtaaagacggggttttaccatgttggccaggctggtctcaaactcctgacctcaggtaatccacccacctcagcctccccaagtgctgggattacaggcgtgagccactgcatctggccttctttcctttgtttattatttatttattttgagacagggtctcactctgtcaccaggctggagtgcagtggtacaatcatggatcactgcaacctctccctctcccacgctcaactgatcctcccacctcagcctcctgaatagctgggaccacaatagctgggatcacaggcatggaccaccacacttggctaatttttgtattttttgtagagatagggttttgctatgttgctcagactggttttgaacccctgggctctagcggtcctttctccttggcctcccaaagtgctgagattacaggcgtgagccaccgtgcccggcctggattacaggcatgagccaccgcacctgggcctgttttatgcattttctagaggagaaactggaagctcagagaggctaagggacttgcctaaaggcacacagctaggaagtgctgaaggttgagcccaggccctctgactgggagcatggatctttccaccctgcaagctgtcttcctcgagggcacacacaggctcttcctttgaggcaatggagtgtagtgtttacacaacagagatgggtttgaatctcagctcctcttttttttctttttttttgagatagagtctcgctctgtcacctaggctggagtacagcggcgtgatctcagctcactgcagtctccccctctcgggttcaagtgattttcctgtctcagcctcccaagtagctgggactacaggcgcccgccaccatgcccggctaattttttgtagttttagtagagacagggtttcaccgtgttagccaggatggtctcgatctcctgaccttgtgatccacccgccttggcctcccaaagtgctgggattacaggagtgagccactgtgcccggccctcagctcctgttgtagccataatgctttgggcgagttcacatctctggtcctcagtgttttgcctgttcaatgttggcaatgtcgctgtcctcacgatggtggctgagacaaggagtcagtgagataaggcacatggtcctcattcaataagcccagctgacagggttgtcattcacctttgcaccccatgcgcgtaccccatgcctccatgcctcacacccagtgagaggggctaggctcattttgggtggtaccaggcctggcctaagccctgtccctccctgcaggcccccagtatggcacactggagaaggcctggcatgcctttttcacggcggctgagcggctgagcgcgcatcacctggaggtgcgggagaagctgcaagggcaggacagtgagcgggtgcgcgcctggcagcggggggctttccaccggcctgtgctgggcggcttccgcgagagccgggcggccgaggacggttccgcaaggcccagaagccctggctgaagaggctgaaggaggtgaggctgggtgggggaggtatccgagacaggctccttcctgtttgtttgcaagggatcgagggggccaaggtgtggcatccagggtccagagtggtctccatgcatgccaggttgaggcttccaagaaaagctaccacgcagcccggaaggatgagaagaccgcccagacgagggagagccacgcaaaggcagacagcgccgtctcccaggagcagctgcgcaaactgcaggaacgggtggaacgctgtgccaaggaggccgagaaggtacaggccacaggtcccagccctggcccccgcccagggcacggcttcctgaatgaatcttgctccctgaacatcttgtccagtccccagcacccttattaccctattcctcacctgccaccctctctccagatgatcatttaaaggaggaacctgacaaaaggtgatgctttactagggaaagaaatggagtttcaggcactgggatgacttcagcagttgagaacttccagctcttttccttgcacagtaccctttgcccgaagtgtcctttcctgcagctctggatatgcaaatcctccccatcctgagatgctgcagtttccacctcctccaggaagccttttctgatttctcccatcctttcctgtaggttgacctcatttcaatcctcaccagactcttttatatgctgtgcctgatgtcacctcccttgttaggctgctggggtccttgagggcaggagctgggtcttgggactgattgcccctagtggctagccctgggtctagcagcctatggcagtgtctggtaaacactggtggagtcctgggtggaagaaggtctggttctcaccaggcccctcctctcccacccagacaaaagctcagtatgagcagacgctggcagagctgcatcgctacactccacgctacatggaggacatggaacaggcctttgagacctgccaggccgccgagcgccagtctttttttttcttcaaggatatgctgctcaccttacaccagcacctggacctttccagtagtgagaagtatgaactgtttggtgggcatggagatctggggtagtactgggtctcctccatctccccgaggccctggctgggactgagggatgcagggtctagacttcctagactgaggggtgtgccttgggtcataggttccatgaactccaccgtgacttgcaccagggcattgaggcagccagtgacgaagaggatctgcgctggcgcagcacccacgggccaggcatggccatgaactggccacagttcgaggcatgtgttccaggcggggtggggatgggaggtgggatgggctcccactcagctcggccagggctagggatgaagtaagtgaaggtggttcagatggccccacctgactataagcactgtccccacaggagtggtccttggacacacagaggacaatcagccggaaagagaagggtggccggagccctgatgaggttaccctgaccagcattgtgcctacaagagatggcaccgcacccccaccccagtccccggggtccccagggtgagagccaggagcgcggctgtggcaaagaaacagctctgcctcccgccctcctttcctttctccttggtttcatttctttcacacctgaaatgggttgaaaattggtgccagggacctgagggcctacttagtagttgtaatgatactggttctcatagtggtttagatttgctgggcatttcccacattccctctcgtttatgccttaaatcagctgcgtgtggcaggaattgcctctttgctcacagtcgggcatggcgaggtagagctagaatctttagtacctcacctgactctcccaggtgcctctgggggtagggaggcctttgccctgatcctgggtgagatctccagccccgtgttccttgcactctgagctgctccctttgcctcccctctccagcacggggcaggatgaggagtggtcagatgaagagagtccccggaaggctgccaccggggttcgggtgagggcactctatgactacgctggccaggaagctgatgagctgagcttccgagcaggtaccctgggacccctttcctagcttcagcctctgccttatctgcctgagcaggggtgtcagaaagggaagccaaatacccacttcttaagggccagtcctctgtcccttcagctgttccaggtccagatagctggtgcctggtggctgcattcagggtctggggtggggcagcttgctgaccttgacctgcctctgcctgagccatgtctttgctagctgggctctgggaccacaccatccccctcagtccttgacccagttgcaggaacagggcctgggccagggccactggcagtgaccaatcccctttcccccaggggaggagctgctgaagatgagtgaggaggacgagcagggctggtgccaaggccagttgcagagtggccgcattggcctgtaccctgccaactacgtggagtgtgtgggcgcctgagtgtcctgacagcccttctgcaacgtttacccaccctggttcagagcccagcttctcctggagagccggaccctcagggccctgaaccgtcgctctctggctgctcctctgtcccttgagggaggaagtcctgggacccagggaggggaggggcctttgtctagggaagggactggtagggaagggacgagtctaggctgagggcaagatgggaggtcagaggtgacagaagcgttcaggggtgcctgggcctccccaggagctgtggactcagttcctgacctctgctttggggttcctggggtgggcttggggtgagtgtagttctggcctagcagcaccctcttgtggcttgttctagcgtgtattaaaacttgacacacacccacacacaaaaacaaaaacaccactgtcgggctcatgtgcatttttttgataggacacccttgccaggccaccagagggcatctagagagaggcctagcgtctgttatggggccggggttggaaaagggtttgcctgcttggtacctgctctggaacttcgagatactaatctggagtggaggggactcgctgtcaggcttgctgttaaccgagaacggctgaaggctgggcgagacgcgggccaatgcgtctcgcgttcgggccggagggacgaggagtgtttgggcagcctaatccttattcatcgatctgtaattagctggagtggggaccccgcccccagcctcccgcagcctgcgcggcgtgggggcgactccacctgggggttgcggcgtgggaggggcggggggaagggtactacgcgcgcgaggaggtttgggccggtccgcgcgccgtcgccccgccccggctgcggattggcccggcgcggcgttgattcttgcggccgc

SEQ ID NO: 1281 - DNA, 176 bp, Homo sapiens
tcgcttctcacttccccatgctgccctggacgccaggctttggagggcaggccgagattgtgtgttccccacggagccttgcgggccctcagtggatgtgtggagtgagatgagtatcttccgtgactgcagggcccctcgtatttctggtgcgttgcttggtttgagtttcacac

SEQ ID NO: 1282 - DNA, 13873 bp, Homo sapiens
  SITE (10983): n equals a,t,g, or c
gcggttgtgtctgggaaggagagaaaatggcggcggagccgaacaagaccgaaatccagactctttttaagaggcttcgcgcagttccaaccaacaaggtgcgtgagcagggagcgcgcggagtctctcgtcccgctggggcctgagggagggagaagggcggaggtgggttatgtttctggggtgtcggtgcctggcctttactcggggcccctgacgattcgctcatcgccgcctccacccaggcctgtttcgactgcggcgccaagaatccgagttgggccagcatcacgtacggtgttttcttgtgcattgactgttccggggtgcaccgctccctgggcgtccatctgagcttcatcaggtaggctctccgcgcggcttgccgtgtttccacccggccggccaggggtgtctgggcaacaagggagagtggctgcctcgacttgggccgctctgaattcggtgggaagcctctgggccgagagggtccggtagcctcctgccagagggaaccacctgtgtgggccctttggcacatgggcggtccgtctccgcctctgggccaaaacttcctcttttttgacggtcaggcttgagactctgagcgttagttgaggggaaagggaggcattgaccttgttgttgctgatatgttgttagaccagtatgtctctagtgagactgtgaccatccattaggggaaagccaaatccaggcgtgcgtgcctgagaatgtgacctcctttcggatctggggacataattagtactctttggagtaaatgaacgaagaggagagttttcatggacagggtagtgtggaggaaatggggtgatggctgattaatgtttcctgggtgcctacagcagcctgaggccaagtgacaggtatccgggttgccagggaaatcctgctggtatctgctagtgggtgagacgcagcccttgtacacaggtccacagagttggattccaactggaactggttccagctgaggtgtatgcaggtcggcgggaatgccaatgcggtaaagctccttctacttccctcaccttccattcttctgcctggttactaactttgcacgactccctaagaggccctgtcgttttccctgttcagagggttctctgttctataacaccaccataagctattttctgaaaacttcgaaactggtcacagcttctcttaaatgggtttcagattccaattaaactgggcaggtgttcttggggaaaagccacaggagttgggagccttcacagtcattgggtcttgtgggcctgccctggatgaaggatggggaggctgggtatgggatgttgtgctcaggcagcgttcagtggggcctggacttcagtcatatcagaggatggcccgctgcaaggtgttttttgcaggaatttcgagaaactttatctctgaaaaaccggtgtcagtagcgtgtatcatcctgtatagataataacttcgctgtcataaggagatgtctcctacagccaacacgtttccttcttgagaatcacccgtagcacgcgctgctctcttctttgctctccagacggctttttttcgccaacatggatgcacagccaatgatgccaacaccaaatataatagccgagctgcccagatgtaccgggagaagatccggcagctggggagtgcggccctggctaggcatggcactgatgtaagtgcctgttcttggggctggggcaggagggttaggagtattcagagccctgtgttttaggggtgtcttctcctttctagctttggatagacaacatgagtagtgccgttcctaatcactccccagagaagaaggactctgatttcttcacagaacacactcaagtgagtgcccacaaggaaccgttttcccagttgttcttgacaggcaatttaccaaggcccaggccttctgtgatcatggttgtagattccatttgctttgatgtgatgtcttggacaccacgtatgaagtccactgttcctgctgggtaggcctaggtgtttcctcctccataaatggaggtgcagtgtagccctccttagaaatcgactcctataaattgggctggcggggaagagaggcagcttcttgaagtttcaagaggtgtccggtgccccaaacaaattttcctggattcttcccctataagaaaggcactgtgggccgggcgcagtggctcacgcctgtaatcccagcactttgggaggccgaggcgggtggatcatgaggtcaggagatcgagaccatcctggctaacaaggtgaaaccccgtctctactaaaaatacaaaaaattagccgggcgcggtggcgggcgcctgtagtcccagctacttgggaggctgaggcaggagaatggcgtgaacccgggaagcggagcttgcagtgagccgagattgcgccactgcagtccgcagtccggcctgggcgacagagcgagactccgtctcaaaaaaaaaaaaaaaaaaaaaaaaaaaaaaaaaaaaaaaggccctgtgcttggggacagtgaaaggattttctcctccccgccccacccctttgaggagggtttcctctttactggccctgggtgctgaagttagactcttggcttcaattcctgttctctactccgctttcctgtgatggtggccaagtcactcaacctgtcaaaacctcagtttctaaaatggggatgtagctccttcataggggttgtagtgataattaaatatattcatatatgaggagcctttagatctgtgcctgcctaggggggggtagttaactgtctttaagttaggagaatgggctctggctctaagtaaatagtgaaggggttggggtgggggctgcttgtcttcctgctttcttccacagtgaatagcaactgtgatcttgtttgctaccctccagtccctttcctcatgggtttggagtatgatttcttgtccacaaggtgcttgtaggtcttggtgcttcttgccagcaggagtggctcaccgaggcatctgtgatctggcctccttttcagccccctgcctgggatgcgccagccactgagccttcagggacccagcagccagccccgtctacagagagcagtggcctggcacgtgagttcagcccagattccaaccaggtgccctggtcctaggagaggactcagggtttggaaggggacatctggccatgacaataggagcaggggtcctcctgtatctttgggtgggccgggattcattttaatccttggaggaagtggtagatattccttttatcttttggtggcaagctgaggaaagccaccgattcttgtcccatcacttctttcaaggggaggttgcaggaagctaggagctcatctctaactcctaccattgcatccacagagccggagcatggccccaacacagacctgcttggcacctcacccaaagcctcactgggtcagtatgccagcgggcaggcgtggggtgtctgggagagggtggacctcaaatgttcttttcagaggtcctactgcctggccgtgtggacagaggccacaggagactgagcatctatctgattctctggagtggggactgtgattgaaatagtggatgcaacactgattttagagccaagccctttgaattgatgaatctgggtgggctggtgtataaggcctggggtctgcctctgagtgtggggctgggtctagccaaagtgttggggaggccagcatgagactggacacctatccctgggctctgaggcagggctggcttgtctggtgcatttccgggggtggagggacagctctgagctgccgaaggctggaggtgacattgttctttctcagccagtaccccagcctgtcctttaactctttcctacattttccttagtgtctttcagacttggttcagggcgaacagtccatttgctgacctcggtttgttctgttgactcttgggggttggggctggaacccagcagagtgactgtcagactgatccatgagaaggctggcatagcttggtctgaagcagggcttcatagagaccgctgggcttgggagctctgtggaggctctggggtgggcctcttgttagccacaagtctgtttctcctccagagtccgtgtatctgtcagctaaaggggcccttcctgccagaggtaactgacagctgcttggggagcccagcccctgttctcagcttcctgctttagaagcggagcctggtgctcaccatatgctccctgcctcgcagtctttgttttggttcagggaatttggacgtctctggtgcttcggacgtctctggtgcttcaggtctaggttcctgtctcactctgctgggtgccagtaaataccccagccacgtctgtctttggctttgacaccgctggttggagctggtggtggcagctttgccttcccttgcctgaagctgttcttaggagctcttgccatgaagctgcatggtgtatactgagctactgcctctgagctgcctttgtcttagctcatgcctacccgtttctcacgcagaactgaaaagctccatcattggcaagaagaagccagcagcagctaagaaaggggtaggtggggagaggtggtatggtagaggggttaggagctgggtgcaggctacctgggttcactccttgaccttaccacttaccagctatatgactttggcaaaggtactgtgtttctccgaacctcgcctgtgaaagggatttaaagatttaaagggatttaaagcctgtcttcaagggctgctgggaggagtcggtgagatggagcacatctagtgcttggcggagtgcttggcaatacttggccctgtcagcattaactgccgtcctcaggcccgggctctgctggggctgtgtgagccgcccatgcccagctccagcgacgactattgtcttggccatgctggttgggctcctgttttttaccctaaattttaagaagggccttttccttgtgggtgtggctacagtgcctgaacctgggagggatctgaggagagtgtgattgggaaggccccttacatgattctgttcccagctgggtgccaagaaaggcctaggggcccagaaggtgagcagccagagcttcagtgagattgagcggcaggctcaggtggcagagaagctccgtgagcagcaggcagccgatgccaagaagcaggcggaggagtccatgtaagtgtttgctgccggggcctcaggcttctgcggggcttggtgggtgggtatgttggacaggtcaggatgggtggtggccactgacacctttgttcccctaagggtcgcctccatgcgtctggcctaccaggagctccagattgatcgtaagaaagaggaaaagaagctacagaatctggaagggaagaagcgagagcaggcagaaaggttgggcatgggcttggtatcccgaaggtgaggctcagctccgggtgtggcagggaaatgccgttgttttctgggaaccattgcggggccttcctagcagtttgggatgctaggcttattgtttctccaagtctgaatagatcacttggcttattgttctaaagtccctaatacagtgcttggcgcatagtaggtatgtgctcagtaagttgaatgactgaataggtatgtgaacaaaacacaggatcaggtgttatttcagtatcttcaagagactagggtggtttttcttgatggcactttgagtcatgggacagtttatttttccagacctccctgagaattgcggtgcatttagtatcatccttaattcctgtctagagatgccatttgtgctccctgtaataccctcacatatcccccacatttcaaatgccctcagtttgggtggaatccttcctgtttcagaaccactcggtttgctgtggttttctttctttttcttttgagacagattcttgctctgttgcctaggctggagtgtaatggtgtgatctcagctcactgcaacctctgcctcctgggctcaggtgatccttccacttcagcctcccaaatagctgggaccacagccgggagccaccatgcccagctaatttttttactttttgtagagacagggttttgctatgttgtccagcctggtctcgaattcctgggtttaagtaccttggcttcacaaagtactgggattacagatgtgagccaccatgtctggctgctatggctttttatttttattttttgagacaaagtctcactctgtcacccaggctggagtgcaatggcacgatcttggctcactgcaatctctacctcctgggttcaagtgattctcctgtctcagcctcccaagcagctgggattacaggtgtgtaccaccgtgtctggctaattttttgtatttttagtagagatggggtttcaccatgttggccaggctgatgtcgaactcttgacctcaagtgatccacctgcctcagcctcccaaagtgctgggattacaggcatgagccacggtgcccggctttcttttttcttttcttttcttttttttttttttttttttgagatggagtcttgctctgtcacccaggctggagttcagtggtgtgatctcagcccactgcagcctccgcctcccagattcaagcaattctcctgcctcagcctcctgagaagctgtgattacaggcatgtgccaccatgcccagcttatttttgtattttagtagagatggggtttcaccatgttgcccaggctggtgtaaaactactagcttcaaatgatctgcccgcctcggcctcccacagtactgggattaccggtgtgagccacggcgcccagtgcttggattacgggcgtgagccacatccagccagagcataacattttaacttgaaaggacattgggtctccctcctttccctgcttcagtcacataggaatgactgggttaatagatgactgggttaagggatgaccaaggggttaaggcatatgaacagttttttagcagtgcaacaattgtttacttaaacccaactcaccctatttatttatttgagacagagtttcaatctcgttgcctaggctggagtgcaatggtgtgatctcagctcaccacaacctccgcctccggggttcaagctattctcttgcctcagcctccacacctggctaattttgtatttttagtagagacagggtttctccgtcttggtcaggctggtctcgaactcccgacctcaggtgatccggctgcctcggcctcccaaagtgctgggattacaggtgtgagccaccatgcccggcccaactcagccctattgcaaaataatcactccttggggttcttctagctaaaagctatagatattttttaatgaattgatttaaatcaaattagtccttaaagtgtccttgtggagcctgacagaggaatgagaggcatcaagagttgtattgtattgcctgccaaccctagaccccttttctttgagaaacgagacagcaattctaggtcttagtgcataaggccagtctttgtgctttgaggtgcttttttttttctctctgagacggagcctcgctctgttgcccagactggagtgcagtggtgcgatctcggctcactgcaagctccgccccccaagttcacgtcattctcctgcctcagcctcccaagtagctgggactacaggcacctgccaccatgcccggctaatttttttgtatttttagtagagacggggtttcaccatgttagccaggatggtctcgatctcctgacctcgtgatctgcccgcctcggcctcccaaagtgctggaattacaggtgtgagccacggtgcctggctttttttttttttaataaagagtaggatgatgaagaactcattctttgatgcagttatgttcatttccctggtgctggggcatttcttcatccattcctttgctttgtgaaccccatcagtgaaggatggggttcatagtgcacaaggtagggagttgttcaggacagagaccactggcatctggtgcacaatattaaaattacaacacgagccaggcacagtggctcacgcctataatcctggcacttttggaggccaaggcgggtggattgtctgtactcaggagtttgagaccaggctgggcaatgtggcgaaaccctgtctctactgaaaaaacacaaaaaatcagctgggtgtggtgacgtgcactgtagtcccagctgctcgggaggctgaggcacaagaatcgcttgaacctgggaggtggtggttgcagtgagccaagattgcaccactggactccagcctgggcgacagagtgagaatctgtctcaaataaataaataaaattaaattataacaggcaaaccgtcactggccagggaactcctacgtggaataaacaaagctgatgtgtaaagaattctgaggtgtgcttcacaggtcaccacacacagctagccttctgttggggtctggcccagccctgtgcttgggtaaggacagaaggctctgggtgacgctccgtgaaggagaacccagttgctgggcattgtctcttgtgcggtgatgctgatgcctatcctttggtctcatgcctggctctgctttgctgcgcagctctgtctcccactccgtgctgtctgagatgcaggtgattgagcaggaaaccccagtgagtgcaaaatcctctcgctcgcagctggacttgtttgacgatgttggtactttcgcctctggacccccaaagtaaggctgttttctagctgtaaacttggctgctgtgttcctcatcaggcttctctgagccactctactgtctccctaggtacaaggacaatcccttttccttaggggaaagctttggctcccgctgggatacagatgctgcctggggtatggacagggtagaggagaaggagccagaagtgaccatctcaagcatccggcctatttcagaaaggtagagtgggctgttttttcttttttctttcttttttttttttaaacaagctgaaggtagagaattctaaggcagcactgtctagaagaactttctgtgttgatgggaatgttctctgtgttgtttaatatggtagccactactatgtggctatgagcccttaaaatgtggttggtgcaactgagcaacaatttctgatgtagtttaatttctgataaacgtaaatagccaccagtggctggtgcctgcctcattagacagggcagcagtcaggcttcggtttgagttgtgctttgtcatcatagagggcctggcagcttcttttgcttggggtccatttctctggccggaggagcctgattgtatgcttcagtcctgacctcctttcaggggttttatgtctccagcccccttcttattttttaaaaccctactccatcttaatctgggatctgtttagttgacataatatctgtgagttatccccgtataaaatgggaacgtaactacttcatagggtctccggaaatacctggcccagtgtccacatactcagcgtgagatgagagcaaccatctccctttccacaccaggatgcttttgagagtaaagggggcagtttgctattcatagttatgacaagagtaggtataaagccaggcagaccgacacatatgctcattgtagtactaggcaagttgtcactaggattagggtagcagcagttgtgtggcctcctgaatgctgacgaagctgtgtgcttttgggcaggagcctaggccactgcaggctgtatttccaccctgcctagtgcaggttcctaagctctctgggccttggcctcaatgtggagaagggtgactcctcaccaggggagaggggcccagagccacagagccacagacagaatgggacctggtaacccatcaccaaaaggccactggtgctctgtttggcctctgtactctgcctcccctgatgataatgggaggagtccgagatattccacatcttcccctcagagccacaaaccggagggaagtggagagccggagctcaggcctcgagtctagtgaggcgcgtcagaaattcgcaggagccaaagccatctcatctgacatgttctttgggcgggaggtggatgcagaggtaagtggggctgtctgccctgaggtccgaggcagcaggcagaagcatgagctttctccctgccgctgctttgggctttagcaccaggagggcctggcctgtgtgagtccttgggtcatcagccccaagatccccaggcctggccttttcctcaccacagtatgaggccaggtctcggctgcagcagctctcaggcagcagtgccatcagctcttcagacctctttggggacatggatggagctcacggagcaggtagggcccctggtggggtggcaggcaccaagtgaggcctgggagcagggcgggagggccctgctgtgactgggaagggcttcttgctgggctctggtcaccctgctcttgttttacaggaagtgtatctctggggaacgtgctgcctacagcggacattgcccagtttaagcagggtgtcaagtctgtggctgggaaaatggctgtgctggccaatggtgtgatgaattccttgcaggtgaggctgaagtggggcctaatgaggagtgctgggaggtttgcccttcgccaccacatagagacactgctactgctcagcccctctgagccttaagagcattttcggccgggtgtggtcgtcacgcctgtaatcccagcactgggaggctgagatgggtggatcacttgaggtcaggagtttgagaccagcctgaccaacatggcaaaaccccgtctctactaaaaatacaaaattagctgggcatgatggcgtgcacctgtaatccgctactcgggatgctgaggcaggagaatcgcttgaacctggaggttgtagtgagctgagatcatgccactgcactccagcctggtgacagagcaagactctatcncaaaaaaaaaaaaaaaaaaaaaaaaatggcaggcaatactttaaatcagtggttctcaacgtgtgtttcccagaccatcagtatcacctgggaattttttagaaatataaattattgagccccgccctaaacctactgaactctggggatgtggtccggccatgtgtggtttaacaagccctgcaggtgactctgatgcatgctcaagtttgagaaccagtgctttaaatcttcacccttggagcagagcttcccaaccctttgtcacttcggcctcaaatgacttacagatgtgatggtccccttggcccagctgggaggagccagacctgcaggccaatcacaagaagtcttgtctttactggagatttttgttatatattattttctgattgctgtgaagtgcaaaaaggccaggaagcattgcctttggaaacccaggaacatctcatttttcttttaatctggtactattaataataccaacataattgtaacagcaagaaattactactggccaggcgtggtggctcatgcctgtaatcccagtattttgggaggctgaggtaggcagatcgcttgaggtcaggagttcgagaccagcctggccaacatggtgaaaccccgtctctactacaaatacaaaaaattagcaaggcgtggtggcgggcatctataatcctagctacttgggaggctgaggcacaagaatcacttgaacccaggaggcggaggttgcagcgagctaagatcacgccactgcactccagcctgggcaacagagcaagacttcatctaaaaaaaaaattattactgatttaatgtctacaatgtggtaagcagtgttcatggttttgttggtgttactgaaatcttacaaacaccctatgagttagttactattattattatcatccccattttacagatataaaaacagggctcagagaagttaagagatatcctcaaggtcatccagttaatggggcacaggtgggatgtacagtagatctttctaatgccatggggcctgtgttcttctaggtcaaggttaatattaccatttctaacgattatgacaagtttactctgtgccagccaccattttaagcacatcatatacttctccttcaatcattacaactattattattcccattttacaagtgaggaaacaggctcaaattaaatacctttctcaagggcacagctagtatattgtggaaccaggatttgaactcaagaagtctggttccaactgcatgctcttaaccatccagaaagcttccagtccatggaggatggggagtgggagatgctgtggtgatcatctggggataaaagaactactccagttgctgcaggaatatgtgaggtggaggggatctctggcttggctgctgtcatggagtctgtttgctttttcttttcctgtttttccagctcacacctgctgccccagggcctggccatgatgcttgtagcacataaggcaggcgcatgtggagacaccatgcccctgaacaggctccggcttccagctgcatgtggattacattcttttacgcacacatcatcacagactggagcctgcttctgcagcctgtccccagacttcagtgtcctgaataaagtaagcctggcagtgaaatgggagagggcagttcctcttctagcaatagtaactgccttgaagtctctaccacctccatttgcagttctgatcagatgcataggtatgtgtgtggggaagctgggaccctgatcttcaggacaaaatgagaatagtttacaaaatcaggggatgctttctgggatacatacaatttttctacatatgcaccagctgcagtacagtggggaaagcatggcattgggaggagaagttgacacagaagcttgatgctcatactcggggagaaaacaaacttatcctaattctgaattcatctctaactgcagccagtgccatgtgggttacccttggcccttctgttgttactgccattcccataattccctcagactgctattgatatggactggctacgatgcttcctcctgctcagacagaaaggtctgaggtgtctgtcaaacagcaggcctctaggtgaggagtgggtaagtttccagccgcaaatagaggaataccattccagaagccccttggtatcaataactgtacaattctaccttggtatcgagaatttttggttcttacaggattctaccacctacactcaaatcttgtggtgctttcatgtatcagattgtttggaagggtctgaggagacagctggggcaaatgcaaagctgtggctgcggggggctaagatgcattttgaagcctcactctcataagctccctcacatcatgggaaagggaaaagaggtcagtattctggagtgattgatcaaaaccaaggtcatacgtcacagagtggtggcagccaatgaccagtacctaagcagtccccttctatatcaagttctttgaggggcaggaactatatcttattcatgactgtatccccatttgcagaatagctcccggcacaaaatatgcactcaagaaacatttggcgaaatgaagtactgatacatacagcaagatggatgaaccatgaaaacattgtgctattaggttggtgcaaaagtaattgcagtctttgccattgaaaataatggcaaaaccacaattacttttacaccaacctaaaacatgaaactagtcacaaaaaaaacacttttttttttttttttgagatggagtctcactctgtcaccagcctggagtgcagtggcgcgatctcggctcactgcaacctctgcctcctgggttcaagcgattttcctgcctcaggctcccaagtagctgggactactggcg

SEQ ID NO: 1283 - DNA, 494 bp, Homo sapiens
caaggggagaggtacatcttggtgaaaaagaccaatgatgactggtggcaagtcaagccagatgaaaactccaaagcgttttatgtgccagcccagtatgtgaaggaggtcacgcgcaaagctctcatgccacctgttaagcaggtagctggtctgccaaataactccacgaaaataatgcagagtttgcatcttcagagatcaacagaaaatgtgaacaaattgcctgagctttcaagtttcggaaagccatcgtcatctgttcaaggaacaggtcttattcgtgatgccaatcagaattttggacccagttataatcaaggtcagactgtcaacctaagcctggacctgacccataataacggaaagtttaacaatgactcacattctcctaaagtttccagccagaataggacacgctcatttggtcattttcccggtccagagttcttggatgtagagaaaactagcttctcccaggaacaatcttgtga

SEQ ID NO: 1284 - DNA, 494 bp, Homo sapiens; identical to SEQ ID NO: 1283

SEQ ID NO: 1285 - DNA, 17787 bp, Homo sapiens
cagggcagatgattctggaccagatgaagcctgaggagccttccagctctaagatagcaggataggagacttctaagattggagctgcagaagacttgccagcccaccagcacaatgtcaggtagaggcaggggctggacttggaaacggggtttgaagctctcacagaggagccagagggatggaaggtggcttgttttccataaaacaccatccagataagagaggtggagatggtagggaaggcttctggctggctgagaaagttattaaaacttccttctcagctctgctctctagctctcctcctccagctctccaacccgcagatctgcagtcctcaggtggagaaagaggccggaagatgaagtttggtcatgttttgtaatgtgctgctgtttctttcccctcttctccagaaatttgctgatttctaggaggtttctttcactctgctccttccctacccagcacgcttgagatgggccagtccctttaatgctggtgctcttagagggagagggtatttcctgatttgaattttgcctctgcattttctattttttttttatttttttgaggcagagtttcgctcttgttgcccaggctggagcgcaatggcacgatccttgctcactgcaacctccgcttcttgggttcaagctattctcctgcctcccgagtagctgggattacaggcatgtgccaccacgcccagctaattttgtatttttagtagagatgggtttctccatgttggccaggctggtctcaaactcctgacctcaggtgatctgcccacctcggcctcccaaagtactgagattacaggcgtgagccactgcgcctggcctgcctctgcattttcttgattgttctcctggtcctctttggttttaggaagccatacacctgcctgtggccctttctcagccctgactccgagcatatggccccaggagatcttggccaagtacacgcaggtatagcagttagccaggcaccagcctgctgtgctcccacgctgtggtatgaaggggacccagctctgcaggctgcccaggaagaggtggccaactcacacagggttatgagttccccaccagagatggtatcttagccccatgtttcctgtgtgaatcaaccactgtggcactatgctctcagtattatagggacacaactgcataaaacatgtttcttgccttgattttattatctttgacctctgagaagaacaaggaaaatagaaggttgagaaattgctagaagaaggttcagagaaggttgcgtggtaaccagaggcggcttttggaagagtagcctttgatctgagcccgaaggctgggtgggattttagcaggcaaccctgtgggtggcatctttcagacctgaggcccccaactaggggacaggcaactgacttcaacctcatcctgattctagaaggaagagtcagcagagcaaccagagttctactacgatgagtttggtttccgtgtgtacaaggaaggtaaacttgagccccttttgtgtgtcatcttgctgatgttctttggggaggactccgctcccttgactgaattactcggcctgtgatggctgagctctgatgcgtcagggttccagatttaaggacagagtgtatctgagggtgatactctcataagtatgggagacttctgctttttttgagataaattttactgatcctcacctgacagtaaaagcaatcgtgttcactgtagagaagttgaaaaattcaggctggacgtggtggctcacgcctgtaatcccagcactttgggaggctgaggtggatggatcacttgaggccaagagttcaagaccaacctagctaacatggtgaaaccccatctctactaaaaatacaaaatttgccaggtgtgatggtgtgcgactgtaatcccagctactcagaaggctgaggcaggagaatctcttgaacccaggaggtggaggttgcagtgagctgagactgcgccactgcactccagcctaggcaacaagagcaaacctctgtctcaaaaaagaaaaaagcatattttcaatggctgtataatatccttttatagtgaatatacagtatttggataactacttttctataactgagtctctagtccatttctgttgttttctactataaatggaccttttggtcctgagtgggctattgggaagtccatctgccaggccagaactgtggctaggacattttaattgactgcaactaatcaccttcaggtcactcacgtttccaattctgacaaaagttttccttgttcttctgattcgtaggcaggtatttgcaggttaaaggtttgggttgagaaggacacagggaacttgctggtatgatggaagtatctgtgtttggctgggtcagtggagtcagagtgttcactgttacaccttggaactgagactgcttgatgcggacaatgttcagacatttgtttatgcaccaaaatgtacacctaacatttgtgcattttactgtaggtaaagtcattaaagttggtgtctttgaaagctgggctgagggattggcttttgggtgaataaggacgaggctgtctgtggagctcacccaggggttgctgggctgccacaggagagcttgacctcattcattcaacagatatctcatggacccaactgtgggtggtgcagtctccacagctgcatccctgcaggcccccgaacaaaactgaaggtggtctcagctgcatggagttctcattttagtgagggagacaggcagtaaacaagcatgtaatattctggagcaagaagggctggaaaaatacttccagggatagagaagaggggcagtaaatcatatataaaaaggtcctgaagtggccctttcagaccatgtcattggagtggagagagcaagaggaaaatggcagggggtgaggacagagtgggcacggcccagaggaagcagctgagggagcgctggaaagcccttggctttaagtctcagctctgagcagagtgacatgatctgacttgcattttggaagggtcactgtggctgctgaggggaacagcctttgggaggtgagggtagcaacagggaggtcagcaggagggccactgcagtgatctggatgaaggaccatggcttggacaagggccatggtcaggggtggtgagacgtaaaggaatcctgtgggtttgctgatggactgagtgtggggtctgggcgagggaggagccagaggtgactccgaggtttaggctgagcatcgggagaatggaggtgtcatttctggatccgggtagtactatggtaggagtggctttgaggagaaggtgaagagctttgctcctcatggggtacatgttagaggctcacctggagctgtcagaaagccattagctatgggaatctggatatggtgggagagagctggcctagagccatgaagctcagaccctcctgaagacggaggcttggctgcttggagaacacgtagtagagaatgctttttctttcctccttggctctctcttggcagaaggtgatgagcctggctccagtctgctggcgaactcccctctgatggaggatgctccacagaggctgcggtggcaggcccacctggagttcacccataaccacgatgtgggggatctcacctgggacaagattgccgtctccctaccccgctctgagaagctccgctccctggtgctggccggcatcccacatggcatgaggccacaggtaaggtggccacagggacccacagggtgttgagagggtcctggccccatgatcaggtgtcacgagaaagactgagtgcccttgcggctcccttccctcagctgtggatgcggctctctggggccctgcagaagaagaggaactctgagctgtcctaccgcgagattgtgaagaacagctccaacgatgagaccatcgctgccaagcaggtgaggccggtggcactgtgcaggaagagctggaggctgtgtgggctcgcaggagagagggagcctgcctggggttcttagagtgtgcccttgttgtggggtaggggaggatatttgctccttccttggtcctctgcaggccaaagaaagaattgtccaaaaggccatcagtgctgtggaagggcttggagatggggttcccaagcccgggtccacttcaggaacagatggggactctaaatatagactccaggcctcgggccacacgttttcaggtggtctggcatgaagtttcccagctggatttgatgtcccggctccacactggctgggagctgaccctgaagggaggagggtgaccttgatcaggaacacaaggaatccccatttctgggggagaagcccgcctggggtctgcctccctcccagggtgtcacaaggtcttgttattgtgggtgccgatggctgcctgacagatcgagaaggacctgctccgcaccatgcccagcaacgcctgcttcgccagcatgggtagcatcggggtgccccgcctgcgcagggtgctccgggccctggcctggctctacccagagatcggctactgccagggcaccggcatggtgagcacagccccagaaagggcagtggcagccccaggaccccctccaggaccctaacaaggagtggcctcccgctacggggcagtagccccagggcctcctccaggacccctaacaaggagtggcctcccactccggggcgtccccaaggagatcggggcagctgcacgttatgcaagcagaggcgctccccaagggatgtgaaagtgaggcaggccaaggaaagcagcccagggaaggcctgggttccagcatgcgtgccccccaagaggcttttgctaattggtctccctagggtaggggcaccttttctaatctgcacaaagacctgggtagaaggcccttgtccctgtgccctggccaggtggccgcctgcctcctgctgttcctggaggaggaggacgccttctggatgatgtctgccatcatcgaggacctgctccccgcctcctacttcagcaccaccctgctgggtgtccagactgaccagcgggtcctgcgccacctcattgtccagtacctgcctcgcctggacaagctgctccaggagcatgacattggtaaggcgcccctgagccactggctcccattctgcagcttggaggactcaggcgggtggccgagtggggatagggcacagccccccaaccatggtctttgtcgctcttttgttctctggtgttccctgccccctcccctcctttgctcttaagcagggaggaccttgctgcagttccggggagggaggtttccaccacctcctccccagcggctttggctcctgtgtttacagagctgtccctgatcacactgcactggttcctcacggccttcgccagcgtggtggacatcaagctgctcctgcgcatctgggacctgtttttctacgagggctcccgggtgctgttccagctcacgctgggcatgctgcacctcaaggtgctccacggccccacttcaggctgaggagtaggcacccgagatggggggcaggggagcaagagacctccctgggccaggcaagaccagccccctggcccctgacaactgtgccaaggcaaacgggtccctgaggatgggggttggggtcagctcagtgccacgtccctgcaatgacaaccttcttcccccatcctgccctggcatggcccaggaggaagagctgatccagtcagagaactcggcctccatcttcaacacgctatcggatatcccgtcgcagatggaggacgcggagctgcttctgggggtggccatgcggctggccggctccctcaccgatgtggccgtggagactcagcgccgcaagcacctggcctatctcattgcagaccagggccagctcctgggggccggcaccctcaccaacctctctcaggtggcccaggatggggggccgcaccttgacccacagcacacggggaggaggggtcaccttgaagttcagagcgcgggggctgcggaaaacaaaccagcccttcctgctctgccccccagcctggcccagtcagaccacagctgtggggtgatccaggcctcctcaggctttgtgcacctcaggttctgatcctggcacggtttgggaggaaggcagacccagctctgattatctgttttcaattcttggagccagcgtcagaggctatttcagatgagacagtataagccaagggctggtgggttctcttcctcccggggccaggaccaccctgacccactcctcttggtgcaggttgttcgccgcaggacccagcggaggaagtccaccatcactgctctgctcttcggtgagagctctgcgagtgccaggcagtgtgggcatgcgggagtctgtcctcacgctcatgtggacgtggagcttcctcctcgggggcctggagtgggctgtggtcaccatggttctctgggcctcctaggggaggatgacctggaggcactcaaggccaagaacatcaagcagacggaactggtggctgacctccgggaagccatcctgcgcgtggcacgccacttccagtgcacagaccccaaaaactgcagcgtggtgagtcgccagctccctgggctgctaccaaacacggccctaactcctccaacccccttggtgggcctgtgttcactgtggcaggagctgactccagactatagcatggagagccaccagcgggaccacgagaactacgtggcgtgctcacgcagccaccggcgccgagccaaggccctgctggactttgagcggcacgacgacgacgagctgggcttccgcaagaacgacatcatcacagtgcgtgggggcgctggactaccaggtcctcaggctgtggcgggttccccagactccctccaccaagccccaccccaacccctttccctgccaagagcttctcttgtgaagatgtaggggtcttggcctggcctagttgctgaggagtcatatcgggggtgcaggaggcgctggcccagggcacccagctttggttcctgctgtttttcctcctgtgcagatcgtgtctcagaaggacgagcactgctgggtgggggagctcaacggcctgcgaggtggggtccttggtctgctcttgagctgggagagggaggagggggtgggcacagaagacttgggtgaccctggccgccaccaagctgttctcctctatacacctgcctggcttgaggtccctgaagcagctgagccggcttcccactgcctcagcctgcctgcaggctgtgtctgctctgtcctcggccctcgtggttgctccttacagggcctgtttttcccacaggctggtttccagccaagttcgtggaagtcctggatgagcgcagcaaagaggtgaggggggtgggcgggctaggcacggctggcacccttctagccagggcctgcgtgcctagcgagtcctggcctgtagcatggcagagaggacagaggagggtgactggctgcaggcgtcaggcagggctttctcagacccatccctcccatcagtactccatcgcgggggatgactcggtgacggagggggtcacagacctcgtgcgagggaccctctgcccggcccttaaggccctgttcgaacatggactgaagaagccatccctgcttgggggcgcctgccacccctggctgtttatcgaggaggtaagtcagtggctgggcccatgacccccaccctgcaccagccctgctgtgccccctagtacccatcttaggtccttcctgccccacagagaggatgggaagagctggcagcgtggtgacaggtgcccagtcggccccaagggctttgaaccagcatcttcctgtccctgcactcacaccgtgtgctgtccccacaggctgcaggccgggaggtcgagagagactttgcctccgtgtattcccgtctggtgctctgtaagaccttcaggtaactcggcccgggttcttctggtggggtcaccagcagtgggagggcggggcctgacccagccccggcaccccaggagctttggtgtcccctcaggttggatgaagatggcaaagtcctgaccccggaggagctgctctaccgggtaagggggcctcctctgccagaccctagagacctctctggggttagcctgtgggggagcctgagtgacagctgacggtgccgttcccaggctgtgcagtctgtgaacgtgacccacgatgcagtgcatgcacaaatggatgtgaagctccgctcactgatctgcgtggggctcaagtgagtgtggaaaaggggttggaggagagccctggagtggggggacccagcccagcatcagggggggtccttacagggaaccctaaaggacaaagaacctcaggggctcaggtccttccccaaagagggtggtctgggagctgctgagagacaggtcagaggcttccaccgtggctgcagccagaagggcctggagctgcccctgctccccactcctggccatgtccccagtgagcaggtgctgcacctgtggctggaggtgctctgctccagcctgcccaccgtggagaagtggtaccagccctggtccttcctgcgcagcccgggctgggtccagatcaagtgtgagctccggtgaggaccttactgggcttgggggatggaggtggggtgggaagggctagctgggggtgacaagagccttaccaccccttcctcacctctagagtcctctgctgctttgccttcagcctctcccaggactgggagctccctgcgaagagagaggtgggtggtgtgggcctcgtagggcctgcactgatggagctgcccaaaccgttcgcggggtggctaaggtgggaacccgaagtgctggtgtcagcggttaggaactaccccagccatgcccaaggcctgtgaggtgaggggctgccctgtttgcaggcgcagcagcccctgaaggagggcgtccgggacatgctggtgaagcaccacctcttcagctgggatgtggacgggtgaccccctcctccccagcccaacctcgggcctgcgtctgaggtggcccaggaccccaagctgcagagcccagggaagagcagctccagagccctggccggggccgcgggatatcaatatcaggctgccccactccacgttccccagcacatcccaggtggtgggagcagagggtaccctgccccaccagggtccttagggatgctctaggccaaaccacagtttgtaccaaaaaccttgtgaggaggtgggggagccatgtctgtgctcaggaagagggaaggggatgggggtggctagtaggctcctggcctctttggtttataaataaactgtgtctgtctttgagaaagcacctacctgtcttctgtgcagctagggctgcagagctgtattcaggtccaaggttctgcccttccttgagtggtctagaaggcactgcgtggcccctcagatgctgggacacaacagacccgggacccagctgtgctacccaccccttccatggactgaataagatggactaacaggcctgtgtttttgtgtttattttaaaaagttcacacaccttccccatctttgtcccagcactggttttggtgactccacccctactcccctatgagtcagcccagaatgtgaagccagtggccccagggcaggagatggccacccctcagccccaccgcagggtgaagctgggcccgaagctcctcctgtcctagggccacgctggctgcagtgaggcggcggggacggaatgtgagtgggtggagagctcctggcaggaaggccaggtagcacctctgccctcatggcactgataaggagccaggaagcagggcaggtggggcataggccgtggcagggtacctacatgtcaatcacacgtgatgggtgggcctgggtagctgcatgccagactgggcaccagactgtggcacacagctcaagggtaaccttgcatccaggcccttctgtgagagtaggatgggagggagttgcacccatctcctgtccgcccccccccaaaaatatatatgtatgtcgatatataatatagaggtatatacacctgtacataaaattgttgccaccaaccactaaatggttacactacaccaagacactaaaatggcagggagccctgggatcctggggttggcagacacagggaatagggggtagaggcccaggctaatttctcccttcacagcaaagcagggagagaaaggaaggagattcaccccttaacctgtctcagccctgggtcagaagagaagcctcccgcctggccaggcttcacctaccttagccaaattgtagccagacagacagtgccccctgacctcaaaaaaggaggtcaagctgaaatggccctgaccctgaccgtgtgtccaaaaccccagcgtgagagccagggctgcttcttgacagctgctctcctctgccctgcgtggcactgaaccaggagtaagggcttctctgttctagcctcccagggaagggaaaaagcaggggctgtgattgtcaagactcacaaccatgtggagaggccgaatcacgcaggagagccacgcattggagtaccctggctcccagccccttccccaccccgtcttgagccagagagctacaagcaggaatcccagtgcagctgcaaatcatggccatcgaggaagtctgtggagaagaggctgggggctgtggtgctgaggggggctaggctcagcacgggaccacctgacgacagctccagccagtccatgctgtccaggtggccatcagccaggtccaggcccatggtgctgctgggctcaggaacaaagtgcaattccgaggtgtccatgggtgacggggggtggtccaggatggcagtgctgctcagcatctggctatggaggtcgtcaatgagggaaaggggctctggcccgtcatgcccactggtcagcaggggcagccccgtgctgctctccaggaagtcctccaggcgtccagggagggagggtgagcctggaggaggtggggcagcctgggggagctcagcagaaggtgatggctgtgctgccaggggggacccacagactgtcttcggggatggcttctccttccctggcagggatggcggctccttgaaatctgctgaaatttctgccaatcaatcaagagagtaaatggatatcagaagccaagcctgtatatctacatgcaaaagaatgaaggtggaccccccaacgtcacaccatttacaaaaataaaacggatcaaagacttacttaaatgtaagagctaagactataaaactctttaaaaatatttgcaaatcacatatttgataaagaagtgatatccggaatacacagagaacttctaaaactcaacaacaaaaaaccaaacttgactcaagaataggtaaaagaaagatttgaacagacatttttccaaagatgatatacaaatggccaacagcacatgaaaagagctcaatatcactagtcatgagggagaccacagtgagatacacctcaaacccactggagtggctactgtaaaattaaatttttaagaaagtattggtgaggatacagagaaactggagcccttgtgccctgtggtagaaatgcaaaatggtgcagctgctatgaaaaacagtatggaggttcctccaacacttacttacttaaaaatagaattaccatatgatctagcaattccactgctgggcatatacccaaaagaattggaagcagggtctcaggtatttgtacacaggtgttgataagtgcattcacaacagtagaatgtggaagcaacctatgtccatcaatggatgaaggaagtgatactatgcttagtgcaacagcctgtcacaaaagacaattcatgattgcacttagtcaaaatcatagagacagaaagtagaatggcagttgctacaggctggcggaagggccaaatgggaagttactgtttaatggggatagtttcagttttacgagatcaaaagaaagggagatggatggcagtgatggctgtacacattatgaatgtatttaataccactgaaccatacacttaaaaatggttagttacaatgggctgggtgcagtggctcacgtctgtaatcccagcactttgggaggccaagtggggtggattacttgaggtcaggagttcgagaccagccaggctaacatggtgaaaccccgacctctactaaaaatacaaaaattagccgggcacggtggtgcacgcctgtaatcccagctactcaggaggctgaggtaggagaatggcttgaacccgggaggcggaggttgcagtgagccaagattgcaccactgcactccaacactgggaaacagagtgacaccctgtctcaaaaaaaaaaaaaaaaaaaaaaaaaaaggttatgatgggttgggcacagtggctcacacctgtcatgccagcacttgggaggctgggacaggaggattggcttcaagccaggagtttgagagcagcctgggcaacaaggcaagaccccatctttatcaaaaaacaacaacaaaaaaaggtaaattttaggtgtattttaccacaattttttttttttttttgagacttgagtctcactgttgcccaggctgcagtgcagtggggcaatcttggctcactgcaacctccgcctcccgttttcaagcaattctcctgcctcaccctcctgagattacaggcacgtgccaccatgcctggctaattttttcaccatgttggtcaggctggtctcgaactcctgacctcgtgatccgcctgccttggcctcccaaagtgctgggactacaggtgcccgccaccatgcccggataaattttttgtattttttagtaaagacggggtttcaccatgttagccaggatggtctcgatctcctgacctcgtgatttgcctgcctcagcctcccaaagtgctgggattacaggcgtgagctaccacgcccagccgatttatcacaatttttaaaaaatcaaaaaaaatgtgcaaaggacttggccattctccaatagaagatacacaaatggtcaggcagcacatgaaaagatgttccacgtcactaaatgacagaaatgcaaactaagataccacttcacacccattaggatggcttgtatcaaaaaattgaaaataagaagtgctggtgaggaggtgaagaaactggaacccttgtgcattgctagtgtgaatgtaaaacgttacagctgcagtggacacagtttagtgattcctcaaaaagttaaacacagaagttaccatatgaggcggggtgcgttggctcatgcgtgtaatcctatcactttgggaggccgaggcgggcagactgcctgagctcaggagttcaaaaccagcctgggcaacacagtgaaaccccgtctctactaaaaaacacacaaaaaattggccgggcgtggcggcgggtgcctgtagtcccggctactcgagaagctgaggcaggagaattgcttgaaccccagaggcagaggttgcagtgagccaagatcgtgctactgcactccaatctgggcaacagactccgtctccaaggaaaaaaaaagaagaaattaccatatgatccggcaattccaaccctaggtttatgcccagaactgaaagcagggactcaagacagacacttgtacactgacattcacaacatccaaagggtggaaacagcccaggtgtccagccacagatgaatggatgaagagaatgtggtgaatccacactacagggtatgattcagcctttaaaaagagtgaaattctgacacatgctgcaacacagatggaccctgaggacattatgctgagtgaaataagccagacacagaaggacaaactgagtctacttctgtgaggtccccacgacaggcaaatccatagagaaagtgggatggggactgccaagggctggagttggggagaatggggagttactgtctaatgggtacagtttccttatggggtgatgaagttctggagcggataggggtgacagttgcacaacactgtgaatggacctaatacctctgattgtacatttaaaaaatgattagaatggcaaattttattatctcaccacaactaaaaaaagaattatgcaaaaaccaggcctgctccccaaccctgtgggttctggccccccctgtcctggcagaatgcactctttgccctgcagccgctctcaccaggcaaggaggtcgctgcctgcccagctgccaccacctgcccagacctctctcctcaaacacctgcttctggcatcactgccacctcttgggccacttttcagtgtccctttggcggcaggcagcacccacacccaccatctccctttctctgccatcccttagaagctagagttcaaagcctgttcccttttccttcttgaacaatatctctggggtagcacctccttcccttggaacctcctgaagctcacgccaaggcctcgctcctgagcgcccagcccagccgtcctcacagcgggtcccatacctgccgcctcagtgccacctgcactggtgagagatgcgcctcagaccccagggacccagggattctccctagggcttgagaattacagacctcacaggaacaccagtgactgagctcttgtcttaaattgaaataaaattcacacaacatcacatctactctggtagagctgtggttccaggctgagctcccactttgcctgcacccctcagccgctcctcctcctcctgaagccactgagacactcaaagagaagtccacgctcaccacccagcatcggcaccacaggcccagacttcttgcctgctgccgccagtgagctcctccccaggaccatctcggggtcatctgggatcttctactcccagctgggtcccctcacacagacgcgcgctatttcctgcccagcatctgccctacctccttcttcccctctgcaggggaacctcccagagagctctctacggccacccccaccctgctcccaggcctctcatggacttcctgttgtgcccatgatgcctaccttccgtgtccaggcctcggtcctcagctcccttggtcacggctggattccaggacaccgcaccctgccactacttgtcctcccgacccccaaggctgggcttagccccaacctctgctcccccacctcacaccctcggcagcctcccagctccaactgccaatctagatgtgacaacactccaactcctacctccagcccagacctctctcacaaatgccacttgatgtcaactgtccctgtgaaccctccattcggtctcgtgacacaccccatcagggaccgcgcaatgtggtcccacacgtgccccctccccagctcaccccatcaatggccactccaccctggccctttaggccacagcccttgaagtcatccttggctgttccttccctctccccccacttcatccataaagacaccaacctggctctctccaaatggggctgattccagccgctcctctgcccgccactgctgcctgctgggccaaagcccagctctccagtcgccccccaacctggggctccctgcttctgcccttgcacggctactatcgcctgggtcctgcatcagaccaggccttttctgctcaaggctgtgcgatggcttcccacacaatggagccaaagccaccctgccctggtgcccaggaggccacgcatgatctggccatgaaggccttcttcccctttcctcaactccactccaacccgccaggtactcccgaggccgcacagatgcacacagctgcccctgctcacaggagacatcctggaccttccccaccaggctccccagacctctccctctcctccatttttgtcctaaggctcctctcggatcttccatatgatctgcttatttcttatatttgttgtccacctccccaggctgcactgtgagctccacaagggcaaatgtctcttctgttcgttgggaggcgagggccttggggcagtgcttccagctgaaggacggcaccttccctggtcctctcgcccaggccttggagacgggagggctcacagccaccactgcatccacagtgcttgcccaagactggtcacgcacggaagcattcaataaaaacaaaccaacccagggctagagacacctatgaacagagaaggccgtcagggaggcagcaggggacctggggttacctccgctctgaatgagaatgtcaaacaggtcgtccatctgctggcttgaggaaccattttcctgtgggacaaaggaaaaaaaaaaaagagataaaaatcttgaatgggggctcccagcccgaactacgaatgaggcccctccctctgccccagaataagcagccagatccacaggacccatgggcgtgcccggactcctggagcccgtcccctaacaacccactccccaaggcctctctgaccctgaagctgggcttcgcctgccccctattcctccgggtggggctgtaggagcctcagcccagcagcctagggcagctgccaacactagccaggcctagcccgccttcctcacctgctgtttgggctgctggctcatggcttcctcatagccaggtggttccttcttcagcagagaagtgggggtcccaaagaggggctgcagtgggtgctccaggtccatctgggcagagggggcaggcgctggagagccaggctgggacgagggctggacaggagagcagggagaggaccagtggccagggggctgggggtgcagacctgccttgtagggggcggggggcggggatagggccagggcctctcacactctaggagggaagatgggaggcactggcttttagggagctttcatgaaagccactaggtaggaaggaatacaggatggggggccctcaaccctgcagggggtgcctggccccttgaggtttgggagaggtctctgggctgggctggtcaccccctgagatttctgcagcttctttctctgcttggggctgctcagggacccctgtctcctatcctgaggtacctgttcctgtcactgtcttctctacccccaagttctgcaggaccacgaggctacataaagccttagggcagcctcacctgtggcctgggctgagagagggtctgctgagggagctttccgctgctgacaccttggtggggacagctagcctctctgaggagaggaccctgagctggatcctggccagaggaccccacagcctctccccggggcaggctacctctgaccttcactggccactccccacagagcagcactagggcaggcccagcctgggtacgggctgctcaggagtcctgctgctgaggtgccgaaatgttctagtctcaacagccagagaggtggggagctcaccaatggctccgccctacagctagggggtctgaggcaggtcccttaactttcctaagtctcagtacccccctggtgaaggaagattaaatgaagcaaacacaaaatgtccagcacgaggggtcccctggcccaagagggctgtagcgagacgctcttcccaccctcctctgggccctgcccggttcctcccatacccaggtacctgctgggggctcccactggacaggccagggctgtctgcattcttattggtcacggtgaggacaaggtgggtccctgtggagtcggtgatgagggtgggaggtgca

SEQ ID NO: 1286 - DNA, 540 bp, Homo sapiens
aatagagcactgggttccattcccagggccatctagctggtggccatgtgtccgtcatttcacagggtggggttacatggtgtggcagggcaaagttttgggagtccatttggaaactatcagtctctcctaggcttattttctgttgtgtaaggaatgaatgtgttgtaaggattgaatgatgacatgacatgctttttaaaatttctagctcagtctctttaatgtaaaaatatgtaatcatccagctcatagttctgagggaaaccctatatcacatatattttacactgaaggaagacattaaaattccattctcttcacacagaaccaaccaaccaggatggctggcctgttggggaagcaggttctgccatctggttctcagcaggcatgtctggaagcaggagggagcgtctctcccatttgggtaccaaagcctctgtaacagtcaggaatgttctgctgtggcctttatcctaaacttggcttggccagtgtgtgtctggggcaggagcagaggccgggacacagctgagc

SEQ ID NO: 1287 - DNA, 665 bp, Homo sapiens
accggctcgggctcaggctgcaaggcttcctgcttcaccaccacggacgggggccccggggccacagcacaagggtctatgtggttggtggctggggccgccaggctggggttgaatgggtgagcggggcccaggggctgctggctcagctggcagctggagaagctgttctcctgcttcacgggggtgccgaggggggcgggggcgggggcgggctgctgggctcgcttctcctgctccagctgcagcttgagccgctccaccagctgctgcttctgccggagcatgcgcgtcagcgcctcgatctgcttgtctttctcctgcagcatctggtccttgtcgcgcccctctagctccgcccgccccccagggctcaggcaacaggacccggcccgggggccctcctccttcacgaggatctgcagtggcgaggcctgcagggtcagctgcgtcagaggtgatgtcaccatctcaccaaaggtgtccccgggggtggagttttcatcgcccgtgctgagcagtgagcgctccgagggggtgggagacacggggggcgtggagcccgtgctgccaaacttcaccaccccactgctggccaccgtggccaccaccacctcagctggagccaggcctgctgccaccagggctggccccgtgctcagccg

SEQ ID NO: 1288 - DNA, 300 bp, Homo sapiens
gagatattatacattgttggaaattagccttcaaaatccaatggacattttatgcttaagcgcatctcaattcagactagtcacattttgggtgctcaagagccactcgtggctatagtggccacttggtggacagcaaagctccaggctttaagggaggaggggctcaacaggtaacatattaagtgggctgtgggggaggttggcaggctataggggcaccttatgcaaagtcccgccaagcaagacacaaagctcctgggttgtgtgtgtttttgttttgttttgctgatttttgaa

SEQ ID NO: 1289 - DNA, 624 bp, Homo sapiens
gagatattttacattgtttgaaattagccttcaaaatccaatggacattttatgcttaagcgcatctcaattcagactagtcacattttgggtgctcaagagccactcgtggctatagtggccacttggtggacagcaaagctccaggcttcaagggaggaggggctcaacaggtaacatagtaagtgggctgtgggggaggttggcaggctagaggggcaccttatgcaaagtcccgccaagcaagacacaaagctcctggtttgtttgtgtttttgttttgttttgctgatttttgaaactaggattctggatttttctgtgaaatctctggagttttaagcattggcaatgattcaaagatttaaaaacccagcacaggccaaatggaacaagtgtgaagtgcctcctgggatgtagtgactcccagggtgtgagctctttgagccccacagtgctccttcggttctcaggggtcctgctccactctactgagtttaggcaccaacccctgtgcagagcttctctcccctgccccccagctccctctcacccccatccctggccttaccgcactgaaccttcctggtctgtttccatgggtgtcttccctaccaagcatga

SEQ ID NO: 1290 - DNA, 409 bp, Homo sapiens
cctcctgagtagctgggactacaggtgcccaccaccacgcctggctaatttctatatttttagtagagatggggtttcaccatattggccaggctggtctcaaactcctgacctcatgatccacccgcctcggcctcccaaagtgctgggattacaggcatgagccaccgtgcccggccagaagttaattttctaaaattcacttagacattcttggctataagagaaagaaagttcttcctgcagtctaacctccatcctcctgcttagcctcaggggaagggagaatatcgaagcacttgcttctttagcggaaccctttggccttttcttcctttaaggaggtgacagccttggtagacaaggcctcgtgtgtacatcaggagtgaggctcgggtgtggagtctgg

SEQ ID NO: 1291 - DNA, 83 bp, Homo sapiens
ggaggcggaagttgcagtgagctgagatagcgccactgcactccagcctgggcgacagagtgagactggtctcaaaaaaaaaa

SEQ ID NO: 1292 - DNA, 10319 bp, Homo sapiens
ccctgcgcggatgattctgggaaatgtcgatcggctgtgggcggcgcactgggtccgccccgctgtagcctcaggcctgacggcgactcccaggctccgggacgattctgggcagtgtcgtccccagaggtcggcggccgttgcccgctcaccagcgacgcggggcgcctgcggggacggtgaggccctgctgaggactccggccagtatgagtcccgggggcggcggcggggctcaggccctgggtctgccccgcggtgtgaccccggccggtgccttggttttcctggccttcatgtcctcctatgtaaacgcggggtgatgacggcgccgacctcttggcgctgttgtgagagtgaagtgggcgcgtggttagacgccagccacagttgtctttgggttatgtcgtcatgaagccggcgctctacagttgtgtaaccttgaacaaatgggttcagtatcttggaatttcagttttgtcatcgtttaaaaaatagatctggaaaaatgtgaacgcacaccgtgcatagtggtgaagactgaacgagctgataaagtttttaccattgttttatgaggattttatttacagagtaattgattttcctcgcaggtggcacctggtaaatggttagcccttgcggagaaacaccctgttagttcccagggagagattggcgccctggagagtgattaccagtgtgcctttccattatggtgtgtcacaggtgccgcaagataagcctgatttttcatgactgctttttcctgcccttctgtgccctcaggacactgcccatctctaagataagagcctggaaagaggactctgttggctgttggaaattgcagagtaatgcctcaggtaggtcggtgtgtccgcaaatcttcctgaaacactttatcaggactgtgtgtttgctttgcttctcctgcctgttcccacctaaccaagtccatttaagggactggatccatggttcctttcagtataggaaggacggagcccacaggagagctccaaggtattatcctcctcacccagtgttcctcttttctacagttttctgctagaagactttctagtcttgccaacattttaaaactgtaattcacaatgcaactttggaatgtaaggttattcggtttatggttgtcaaaactgtaccatgtggtctcaagtgaagagatgcttgcagtcatccttgattcttccctttgacttatacctatattcagatcctctagttggagctaagctatacactgtatacagaatctgaccattagttaccccagcactaccaccaccactaccaccccggtagtgatagcaataaagccacctggattattgcggtagcctcctagctggattccctgcatctgcccttaaccctcatcagtctgttctcagtacagctgtgaccgtggtcctattgttacataaattcctgtcattcctcaacctataatttttcagtggctctaactgagtcacttctgcaatgacctatttgtacaattaggccattacctttctgatcccaccttccttctctgcctcctcattcctgtgagctctagccactgtcactagttgctgtgccatcgacgtggaatattcttcccccacatacgcacaaacttgcatccttatcttcttcgtgtgtttgttccgtggttactttctcagaaaagcttccctgaatggctatttgcaatcgcagtcaccttccctcgcctagcacttccactcctccatcactgctttgttgttttccacagtgtgtgtcactcactagctgatgtactgtatgttcagtatatgcacatgctcattgtctgttcctggtgggaggaatcttttttcttttttgttgtctgttatagcttcagtacccagagggttacctggcaccaaatagatgcttagtaagtaattgtggagtgaataagatgagtaatgacgaactggtggggcagaatcatggcatggaaggtgaagcttgcataggaggggatgtgagtagcagatgtacatgttgggtgaagtctgttttcttggagaagttagataattagaattgaaaaactggtgtggtggtacatgcctgtttttccagctattcgggagggtgatgagttgagaaaatttcttgaaccctgtggtgtgcggctgcagtgagctatgattatgtcactgcactccagcctggcggcagagcaagaaaaaagtaacagctaaagtgaactaatgccaaaatcattcattggttcatcttctaaacacttaggaagtatctgttaggaaaagttgtacatggattttggtgtacactgacacacaggacttcatgatctagtgcagtattgtctaagagaactttctgcagtggtggaagtgctctgcatgtgtactggtcagtacagtagccaccagccctgtatgactattgagtacttgaactgtggcttaagcaactgagaaactgaattttaaactttacttattttatttttacattttaattaatttaaatgtatgtagccaaattgcctagtggctactgtattgaggattgcagcactggtagaaaagtaagaaagcataagaaattaaaataaatgccaggacagataggctatgttcttttggggacagagatgagtgaacaccccaggctgcccagacaactgaaggggaagaaggaagcatccctggctctaacttgtaataacctgttcatcataaagctatgagaaatgtttttttgatttgggataaagggaattaactaacacagtggcaactccaattaacaggtgaatttaggataaattatgtgtagcaaattgaactgtaaggtcttacttgattatttggaaaatgtatgtattggattgtatctgcttggctataaaaaagagatttcttcctgtccttttaatctcattagtggattgcctgtgaagtgcatcacagttgatttagtgattattaagtaataaaactgtgttctttttttctacatttgtggagaggattttctgccattggcaggagatttgaattttaattattttcccaacacctggcaaaaataaattctgcctttaaaaccaaagacgagtatcactggtgaacatgcatgcaaaatatccaaataatgtaatacaatgctgaattaactctcagagctaaaaaattaccacaggcaagcagtctgtttcacaaatcaaagacagtaataatgctgtattaaatagatgtattttttgtacatattataatttgactagccaataaactattattgaatatttaagcttccaaagttttactaaaaagtaatattgtgaaatgagtactattgaaaggaatttctaagccacatctgtgaacatttccttattttctttgaaacgtacccctttatttttttccctttactttcaggtcttatttaaggactatctaaggcagtggtgcccaacctttttggcaccagggatcggttttgtggaagacagtttttccacagaagcaggaggtggtggtttgggggtgaaactgtttcacctcagatcatcaggcattagttcaattcacataaggggcgtgcaaccttaatcccttgcatgcgcacttcacagtagggattgcgctcctatgagagtctaatgccatagctgatctgacaggaggcagggctcaggtgataaaagtcatttgcctgccactcatctcctgctctgtggcctgatttctaacaggccacagactggtaccagtggttatgtacccctaaccatcaggggattagggacccctgatctatggcatgaaaccatccttcagtcttttcacccaggggtctcatattttaataattgtctatcagtacaaagtttaagtatacaccataaatatatttttcttttttgtttatgaatcagttatgtgtatattttagtccattggtgctgctataacagaataccacagactgagtaatagaaattgacttctcatggttttggagcctgggaagtccaagatcaaggggcaggcatccagcaagggccttcttgctgtgtccttttatggtggaagggcgaagagaagagagagaaccaaaaaggggcccaaactcattttttaaataaggaagtcactcctaatgatgatgacattaatccattcatgagggcagagccctcaaggcctaatcatctcctaaggtctcacctctcaaaactgttacagcggcgattaagttcaatacacgcgttttgggggtcacaatcaaaccataacagtgtatgtctattagtctttaatataaaggttttttttttgtttttgtttttttttttgagacagagtcttgttctattacccaggctggagtgcagtggcgcaacctccgcctcttgggttcaagccattctcctgcctcagcctcccaagtagttgggattacaggtgtgagccaccacacccagctgcccattttttgtgagccttagtggatcatcctgagtatcccatttgagagacaatcactttaccctcattttttaattacttacctagcagttaagctgtaaaagatataactaaatacttgactctgtgctgtcaaatgtcaaatgctgatttttaaaaattcatgtatttctgtaacttttagcaaaattaactctactgaagcaaagctctcatatttgtttctcacctttattgtataataattctaagcacataactgtcccccttattgtatagtaattccaactacataactgtcctattattacttaactgagatcacattcccaatcattgccacaactcctgaatcttgttccatttctcccacaaccaggctaattttaccctttcttcagtgacagaagaggcctgggctatggctgagcctaaatatgtttgctatttcaggtgacatttaatgatgtggctatagacttcactcatgaagagtggggatggctcagttctgctcagagggacttatacaaggatgtgatggtccagaattatgagaacctggtctctgtaggtaaggatattaccccttccactccagtaggggacacctttcttttgccaccctgaattgctggagaccctcctaagtaaatggctgaatttctgtagcatgttcccaaggaaatgtgcagctctgttgtgccctgcctgaagcttatctttccatttcgatgaatacccttcatcccttcctgtggtccctcttgtgatggcctctcataatagaggaccacggcttaaacaattctgtattcttcctgtaagcaggtctttctgtaactaagccatatgtgatcacgttattggaggatggaaaagagccctggatgatggagaaaaaactgtcaaaaggtatgattccaggtgagtcatggtgaacgagacaaaggaagattttgttaaaaagggtcccaaactctttatagtgagtttatagtgagtgtggaggcattttaggtatactgttttcaaagatctcagatagaaatgaaaaattgtgggatatttagcttagattttcaaaacaattgttcctctatcccaaattattatctgtatcactcatgtcatccaatcaaggttagaggtttttgccttcataataattcaattgttactctattcataacagtaaggcaaattattctttcttaaatctacttaaagaaaaacatactgatagttttaggctaagaaaagctgtcaattagatgggaaatcacttttctaaagctgagcgttgtagatgaaatatgaacatattagaggaaaaaatgaacatatataaatatgtttctaggaatattttctaatgtccaataaatgacatgattcacacagtttcttcataacttcagaaagcctaaatctttgtcagctataaagagcatttagattattgtgtttttactgcaactgtttaataacatcaattctgtattttaagcatgttaatctggcagcaaattgagattaattgaatgttggagaaaaaggctatgagacaaaatgcaatctttcatacatgcatataggcacaaaatgatggcttggaatccagaatgccttccacattttatttctgataacttcctttttttccatactatttcatccattacatatatttttcccatttccattatcacactgtgttcccacttctgtgaactctgtattctctgctccatttgagcactgttcagaaatcattgaaatatttcagttgtcagaactatgtgttttctgggggcttcatttctaatccagttctcctaattccaatttagaagtttcttttcaaatagttaaaaaaaaacaaaacagtgctttgcttttttgatgtatttcagattgggaatcaagatgggaaaacaaggaattatcaacaaagaaggataattatgatgaagattcaccccaaacagtaataatagaaaaagttgtaaaacaaagttatgaattttcaaattctaagaagaatttggaatatatagagaagttggaagggaagcatggaagtcaggtagaccatttcagaccagcaattctcacctctagagaaagccccactgcagacagtgtttacaaatacaatatatttagaagcacctttcattcaaagtctactctttctgaaccacaaaaaatttctgctgaagggaattcacacaaatatgatatattaaagaagaacttaccaaaaaagtcagttataaaaaatgagaaagtcaatggtggaaagaaacttttgaattctaataaaagtggggcagccttcagccagggcaaatctcttacccttccccagacttgtaatagagagaaaatctatacatgcagtgaatgtgggaaagcctttggcaaacagtcaatcctcaatcgccactggagaattcatacaggagagaagccctatgaatgtcgtgaatgtgggaagacttttagccatggctcatcccttacacgacatctgataagccatagtggagagaaaccttacaaatgtattgaatgtgggaaggcctttagccatgtctcatcacttactaaccatcagagcactcacactggagagaaaccatatgaatgtatgaactgtggaaagtcttttagtcgtgtgtcccatcttattgaacatctaagaattcatactcaagaaaaactctatgagtgtcgtatatgtggaaaggccttcattcataggtcatctctcattcaccatcagaaaatccatactggagagaagccttatgaatgtagagaatgtgggaaagctttctgctgtagctcacaccttactcgacatcaaagaattcacactatggagaaacaatatgaatgcaacaaatgtctgaaagtctttagtagcctctcatttcttgttcagcatcagagtattcatactgaagaaaaaccctttgaatgtcagaaatgcaggaaatccttcaaccagcttgaatcactgaatatgcatttgagaaatcacattagattgaaaccctacgaatgcagtatatgtgggaaagcctttagtcataggtcatccctgcttcaacatcacagaattcatactggagagaaaccttatgaatgtattaaatgtgggaagaccttcagctgtagttcaaaccttaccgtacatcagagaattcacactggagaaaagccatataaatgtaatgagtgtgggaaagcttttagcaaaggctcaaatcttactgcccatcaaagagtacataatggagagaaacccaatagtgtggtaagtgtggaaaagcctttagactatatgaatcactatacatgtgagaaatcttacagaagagaaactgtatgaagcagtggttatcatggtaaatttcctagattctcccttatttaacattagaaaaatttatactggggaaagtcttatgaatgtggtgaatataggaagaccttttagcaaagatgcaggccagtttgtttattagactttatactgtagagaaatcatatgaagaccataaatgtgggaaagcctttgtcagtattaatcccttaattgacataagtatactcacactaggataaaaccctgtacatgtagcaaatgtgggaaagactacagacaataggaatcttttacaaactcctacaggagagaagctgtatgaatgtagaaaatttagaaattgagggaagtcttcagttccaagtatatcccttattctacagcagagaactcaaaatggagagaaatctcatttaagagatgtagcaaagtgttcactaagagtgtttatcttggtacacatcagaagattaatggtagaacaacctgaaggatttaggagttatgtgtaaatctttgcagtcatgctatttgtaaactggattctacaggagagcaaataaacattataataaaatatgcatttcttagagcagtagcttgcagtttcagttgagttctacttagaaattctttttagctagtgggcatgtgaagatatttagtcacccagaggagccagtaagtgttataatattgaaaattaaagctgcaaaagaaataaagtgatgttaataaaagttttggcatctaataaaatcattttgtatatcacaaactctttcactgtgactatttcctgtaaaaaaaatttcactaagattagccttagcgtagcctttagtgggagactagcaaacctagagaaaaatgacctgctctttatactaagaatagcagtattttgatgaggattattcagagtcaatttccagtaggcttaatcaaatacatttcaaaaaaatttactgagcatcactcgtgtattattacacagcgatgggatataggaatccagtagttctgagctttagtggtgtgtcaaagtcagtaggagggcttgttaaagcacagattgctaagtctgaatcttagggtttctgtatgagttgatttgaatttgcatttttcatgcgttcttaggcgacacactgtccagaaagcacattttgataaccattgtaataatgaacaaaacaaatctgatctttttctcgcagggatgttatctgacaagaaagatggatagcaaataaatttgaaataatggtttacaagtgctatgaggacataaccaagaaacaacatactacaagagatcagagcaggcttagcgagatgtgatttttgaaatgaatcctaaatgatgaacactaattatgtaatgagtactactcatgtagccatgtgcatccctgcatgtgcctgtgcgtgtgtgtatgcggtgtgctgggtgttaatctaggtaaagcagacagtcgagttctgtcatacttgctgcagctggattccacgttcccatgtctagtttcagattctgtggctttgaggtagtgctgctggcagcatcattgcagcaaccgtcatttctctatccctgagtcatagttacgggagtttaccttgaaatcactagcccagaagtgttctcattacttttacagcccacctaccaattttgaaagcactaatttgcagcaatatatgtcttgaaatagttaagagagattttgttctctgcactgaaccttgacagataattatgttttgtaaggaggcaggatggcttcaaatattctaagttctagataagaaatggaacagtctcactggccctgtgattagaatcctatcttgtgattagaaaggtaatgcagatcaatttgatttggagtgtatggacactgatgcaagtgaaggggtgtgatatggattatgcttcagattttgttctttatctcaggtgagagtagtaagatatgttattttaaaaaggaacattatgttatagttatgataattctggtgtggaatgagtgataaggtttctgactttcaacaaaatgtatctcctctgatatatgtgctaccttaacagaaagccaaagcacagaggcatattccaatagcaatttgcaagagacagtaggtttggaatggggtggtaaacttttactattttgcagggattttatctttcatttgatttatttttaatcatgaaatttatattgaaattctgtgaaacattgaaggatctttggaagatttataattagggaagggccagatgtagtggctaatgtctgtactcccagcactttgggagaccgaggcaggaggattgcttgaggccaggagtttgagaccagcctgggcaatatagcaaaactcattagtctgtta

SEQ ID NO: 1293 - DNA, 814 bp, Homo sapiens
tagaggcagcattaaattaaaatttaattaaaatattaaaaataaagtaaaaaattcaaatatacaacagtagactgtctggcttgcatacaaagaaggccattgcccctttgggtgagccgggcaaggtcagggtctaagaagcgcctctggtgagaagcggttgtcaggctctgatggctgcgggaggagtgactcctcccaggatgagggtctgtgtcctctcagtgctcactcaagttccgtatttccaagtccttccagggggcgtaacgcacgtgagaactgccatttctgtcacagatacgtggccgcatgcatttccaggaaatgtccttggttcgcgaactacagctggcacaatccagcccagggcgttctgtgagctgtagtctccagcaagtgaattccaaaaaaacctcaaagacctcaaagaccatacagggtggacagcgtagtagcagggtttgggaagagaggagctcttttgctagcaaaggcgagagctcgcctggtacaaggtctgcccacgtcccgggagataaacattagtgtgagcgcacgctagacccagaagagtttgccacggccgcacggttttctgggaagtgtagtttcttggtcccggcgccattgtccttaaaagtagagggtggcccttggttccgaggtgtatctttcacctcatcagtatgactatatgccccaggacacttcccgcatggtcctaactgccgggctctgggacgacagccccaggcggtttagttttttaggaaaccgagatctgtttgcccgcggcgccccaggtccg

SEQ ID NO: 1294 - DNA, 437 bp, Homo sapiens
catacacatgataatgctttacgtttctggatttaaagtgccttcacaatacagaactaggaaaaagaaggccatctttttaaatgaagatagttttaagagagcaataagagactattactttgttatgatagaaggttgggctgatgtcataatgatgttatgatgtcactgacatcatattatttcctcagtcatacctattaaccatttcttgagcatccactatgggcttaatagataagaaacactccataccctttaagagccctgaggtgtgtgtgtgtgaacagcattaaactttggagtcatgttacctgggtttaaatccaagttgcatgaatactggctttgtgtgaccttggacaaactatttcactgtgtcttgcctcagtttctccatctgtaaaatgataataaagctatctcacagcatt

SEQ ID NO: 1295 - DNA, 4264 bp, Homo sapiens
atttagttctacccatgtttattgctaccagctggtctccctccaccctctcatatttacacccaaccccttccccaaagctagcttttaccaaagttcctggtaggaggtcaagaagtgtgtccacttagccggcagtcctagatgtagtggacgctgtttgtccccaggccagttgggcaccaggaagggctactctggggattcagggcatagacttcgtactggggtcaagggaggcccccactcacagatactctcctttccttctggggctcaatgtacaccaaaaccttcagaaagcaaagttggagtggtggacccccaatgtcaagtttagtgctctctttgcttgtgaggacccacacaagtggccaactctggactcagatccacagctggcttccgagaggcaattctgtccttggaagccaggtttgaccatctgtaatcagccttgtgagaagtctcgtttgagggggccagggatggaacgggagggcgcatatcgtatgaggtatgggcattgtgttaagctgggggaagttgcagcttgtcctgaattacatggagaggaataaagtgggtgagtaggaggagccatttcatctgaaagcctgaggcccctctggtcccctcgataaaccccactggtgtcccaggccacaggtaacaggagaatagacatttaatgtcacagaatgtcagagcaggcaaggccttcagtgatcaccctttctaaccccaacccgtcctaagcctagaaagaggaagccacttggttcaagtctcataagatttagtggccaaacctctaagaaagctagggagaaggaaagtgggaatggtacctgtggatttcttcaggccttatttaggggaactggatttacccatggtcagtttgggttcttttaaatggccagcttccctagggtttttagactgacctgaaacattgacttggcccccttttcaggagcagtgcgacaggggtaggtggtgtgggggtgaggaggatttggaggccttgttggtgagggacatgggcagggtttcccagtgccccacttgctgtggccgtggccatggcaggggagcagttggtgccaggaggggctgcgctgtcagtcgctggtggagggcggggctcaggcaggtgggatgtgcccttgggcgactccccaaccactccagctgagcctggaacctgtagggccctggcctggcctctgtggccctaagtgtccctggggaagcagggccaggctcagtgccagtcctcagggcctgggccaccacgggaggctgggcccactcctacagcctttgcagctgggtcccagccttggcctattgccaccgccacctcaaggtgccccggccagggagaggccttgcagctgctcctcagtgcctgccagctctgcgtcatcgcgcccgctctccgagccctcaaagcagcctgagtcgcgcgggatgtccaccttgggttccgacactgtgtgtgccactggctcctggctgctctcggcgccctcttcagcctcctcactgccagctgccagggacgagagagggagacagaatatgggggtggaggtagggaccttgggaaatacaccataggcagtctctccttctgggcacctgccaccgccctgcccctctcctcactgcttccagcttagaagctggtaggagttgtttccaggccagctctgcagtccaggagctcacacttctttagcactaagctggagccaggcagtgggcttgaatcctggctctgttattactcagctttgaggcctcaagtaaggctttgccttctttggccttaagggtcccctttgatccaaaggaggttgggcccaatcatccctacaactcctttctcccgtacactttccctgaaattctaattcaagtggaaagtacctttccactgcagagcagtcctagggcagagcgtggacagaaggcaaggccagggcaagcctcccctccctggaatgccggtgggcacacaccctcaccaggccgctcctaaagccactcactgtcatagtccagcagcagctcggcggccgtgagcagcttggcccggtgctgtggatccatgatgttcagctcattgaggtgtgtttctcgcagctctttgaagtcttccagtgtctggtagccattgagcaggagggtggatgtgtgctcctgtaggcagaggcaggccatcggcacagctgcttaccagccacccctgcctaggtcctccccaactacgcatagctgtcatttcctggtccccatccctggggcagttgtgcctccctgatactagatactagtgaggaccaagctcaaacctccaggccgatgcgctccagcagctcatgcagggtcttaggcttgggcctcttgcccttgctctgtcggcggctggggcgggcatgccccacggcctcctcgggcagcacatccacatagatgaatttgaaagagcccaccttgccattgagtaggcccagccacgtgcccacaggtggcttttcaatgatctggatcacatctcctttctgttgggggagaggagaggagaagggagcaagggagagaggatatggggggccttggcctccactgacactgtcatagcctggttcagtccagcttcctttttgggcacagcctgccaggctccagagaagcccggatgctgatcttacctgcagtttcagcgagtcgtggtcataggggctgggagtgaagtcggtgtggactcgtgcccggccacagaaaggccctgtgtactggggggcaggtggttcctccccgaagctgccagaacctgggctggggctgcagagctcactgcctgcaggagatggggcagggaggaggctcacctttgtcctagaacagctgagacagtgcctagcaggtgccttccaggggacctgcctagaaatcccaagggtatacaccgggaaggcagctgggctctggcaagctttacactgcagaagggattctgaaccacccccttggctaccgaccaggagcacggcttcacctctgggcccttggacatgaaaagagttggcaatgggaggagaaatggctcactgaccaaagaatgggcaaattaggagggcctctagagaacaactgggccaacactccaatgaacagatgcggaaatctgaggtcacacagaccaagtgaactgctcaaggcttctcattttataactggcagcactgagtcagtccattagactccatgttccctgatacccactccaacgctccctccacccaggaagctatgccctgcattcatatttgactttccctgcttaactcaatgtgtagttacaatgtcacatagaaactcagttgggctccttctccctgggaagtacagagtagtgggcattttgaatgattttcagtcgggggcagggaagtgtctgtggaggcagagaaagcaggaaacttggagtggacttgaggggcaagaaaggcggtgctgaatggggctgcagaacccaaagcccctgcctggacgagttccctgctggcacctcttgtcctgtcccatggacttctagaagatgccaggtgatgccctgagcccagcaactatggtctagggtcaagaggctgactcttcacagctggagacctcatacgcccacccccgactggggcatcagaggcccagggatctgtagcctctagctccccttggaaaggtggggacgggctggtccaagagggtgactgagactcttcctctgcccgtgggcctctccggggcctgaggatagcaagtggaagttcctctacggtacatctgagttcaagactgggtcatcttgggcaagtcacttaacctccctaagaccctgtttccacatcaataaagcaaggataacagtactggccccatgaggttgttgagaagatttaatgtgaagaggactgagaatgttcccagcaggcaaagagtaagcattcatttctcttaccccccgcccagacagtgtgccaccagcacggctgtaacccagtcctttcctccagattcggcaggtgtcccccgcatcccctactcacctgttgatgcctggcggctgagcaccggaagttcatgctcctcttgctcagaaaaggccagcgccatcttctcagggccagggctgtccaggctgtagtctggagatgtcggggaggcagagccctcctccagagtgtctgcc

SEQ ID NO: 1296 - DNA, 4264 bp, Homo sapiens
ggcagacactctggaggagggctctgcctccccgacatctccagactacagcctggacagccctggccctgagaagatggcgctggccttttctgagcaagaggagcatgaacttccggtgctcagccgccaggcatcaacaggtgagtaggggatgcgggggacacctgccgaatctggaggaaaggactgggttacagccgtgctggtggcacactgtctgggcggggggtaagagaaatgaatgcttactctttgcctgctgggaacattctcagtcctcttcacattaaatcttctcaacaacctcatggggccagtactgttatccttgctttattgatgtggaaacagggtcttagggaggttaagtgacttgcccaagatgacccagtcttgaactcagatgtaccgtagaggaacttccacttgctatcctcaggccccggagaggcccacgggcagaggaagagtctcagtcaccctcttggaccagcccgtccccacctttccaaggggagctagaggctacagatccctgggcctctgatgccccagtcgggggtgggcgtatgaggtctccagctgtgaagagtcagcctcttgaccctagaccatagttgctgggctcagggcatcacctggcatcttctagaagtccatgggacaggacaagaggtgccagcagggaactcgtccaggcaggggctttgggttctgcagccccattcagcaccgcctttcttgcccctcaagtccactccaagtttcctgctttctctgcctccacagacacttccctgcccccgactgaaaatcattcaaaatgcccactactctgtacttcccagggagaaggagcccaactgagtttctatgtgacattgtaactacacattgagttaagcagggaaagtcaaatatgaatgcagggcatagcttcctgggtggagggagcgttggagtgggtatcagggaacatggagtctaatggactgactcagtgctgccagttataaaatgagaagccttgagcagttcacttggtctgtgtgacctcagatttccgcatctgttcattggagtgttggcccagttgttctctagaggccctcctaatttgcccattctttggtcagtgagccatttctcctcccattgccaactcttttcatgtccaagggcccagaggtgaagccgtgctcctggtcggtagccaagggggtggttcagaatcccttctgcagtgtaaagcttgccagagcccagctgccttcccggtgtatacccttgggatttctaggcaggtcccctggaaggcacctgctaggcactgtctcagctgttctaggacaaaggtgagcctcctccctgccccatctcctgcaggcagtgagctctgcagccccagcccaggttctggcagcttcggggaggaaccacctgccccccagtacacagggcctttctgtggccgggcacgagtccacaccgacttcactcccagcccctatgaccacgactcgctgaaactgcaggtaagatcagcatccgggcttctctggagcctggcaggctgtgcccaaaaaggaagctggactgaaccaggctatgacagtgtcagtggaggccaaggccccccatatcctctctcccttgctcccttctcctctcctctcccccaacagaaaggagatgtgatccagatcattgaaaagccacctgtgggcacgtggctgggcctactcaatggcaaggtgggctctttcaaattcatctatgtggatgtgctgcccgaggaggccgtggggcatgcccgccccagccgccgacagagcaagggcaagaggcccaagcctaagaccctgcatgagctgctggagcgcatcggcctggaggtttgagcttggtcctcactagtatctagtatcagggaggcacaactgccccagggatggggaccaggaaatgacagctatgcgtagttggggaggacctaggcaggggtggctggtaagcagctgtgccgatggcctgcctctgcctacaggagcacacatccaccctcctgctcaatggctaccagacactggaagacttcaaagagctgcgagaaacacacctcaatgagctgaacatcatggatccacagcaccgggccaagctgctcacggccgccgagctgctgctggactatgacagtgagtggctttaggagcggcctggtgagggtgtgtgcccaccggcattccagggaggggaggcttgccctggccttgccttctgtccacgctctgccctaggactgctctgcagtggaaaggtactttccacttgaattagaatttcagggaaagtgtacgggagaaaggagttgtagggatgattgggcccaacctcctttggatcaaaggggacccttaaggccaaagaaggcaaagccttacttgaggcctcaaagctgagtaataacagagccaggattcaagcccactgcctggctccagcttagtgctaaagaagtgtgagctcctggactgcagagctggcctggaaacaactcctaccagcttctaagctggaagcagtgaggagaggggcagggcggtggcaggtgcccagaaggagagactgcctatggtgtatttcccaaggtccctacctccacccccatattctgtctccctctctcgtccctggcagctggcagtgaggaggctgaagagggcgccgagagcagccaggagccagtggcacacacagtgtcggaacccaaggtggacatcccgcgcgactcaggctgctttgagggctcggagagcgggcgcgatgacgcagagctggcaggcactgaggagcagctgcaaggcctctccctggccggggcaccttgaggtggcggtggcaataggccaaggctgggacccagctgcaaaggctgtaggagtgggcccagcctcccgtggtggcccaggtcctgaggactggcactgagcctggccctgcttccccagggacacttagggccacagaggccaggccagggccctacaggttccaggctcagctggagtggttggggagtcgcccaagggcacatcccacctgcctgagccccgccctccaccagcgactgacagcgcagcccctcctggcaccaactgctcccctgccatggccacggccacagcaagtggggcactgggaaaccctgcccatgtccctcaccaacaaggcctccaaatcctcctcacccccacaccacctacccctgtcgcactgctcctgaaaagggggccaagtcaatgtttcaggtcagtctaaaaaccctagggaagctggccatttaaaagaacccaaactgaccatgggtaaatccagttcccctaaataaggcctgaagaaatccacaggtaccattcccactttccttctccctagctttcttagaggtttggccactaaatcttatgagacttgaaccaagtggcttcctctttctaggcttaggacgggttggggttagaaagggtgatcactgaaggccttgcctgctctgacattctgtgacattaaatgtctattctcctgttacctgtggcctgggacaccagtggggtttatcgaggggaccagaggggcctcaggctttcagatgaaatggctcctcctactcacccactttattcctctccatgtaattcaggacaagctgcaacttcccccagcttaacacaatgcccatacctcatacgatatgcgccctcccgttccatccctggccccctcaaacgagacttctcacaaggctgattacagatggtcaaacctggcttccaaggacagaattgcctctcggaagccagctgtggatctgagtccagagttggccacttgtgtgggtcctcacaagcaaagagagcactaaacttgacattgggggtccaccactccaactttgctttctgaaggttttggtgtacattgagccccagaaggaaaggagagtatctgtgagtgggggcctcccttgaccccagtacgaagtctatgccctgaatccccagagtagcccttcctggtgcccaactggcctggggacaaacagcgtccactacatctaggactgccggctaagtggacacacttcttgacctcctaccaggaactttggtaaaagctagctttggggaaggggttgggtgtaaatatgagagggtggagggagaccagctggtagcaataaacatgggtagaactaaat

SEQ ID NO: 1297 - DNA, 499 bp, Homo sapiens
ctgcgtggtatatgaacaaaccataaagcatttaattccccatttgcattgttttcaattttttactattacagacagagctgttgtagatatctttgtccataggtatttgtgcacttatgtggctgtttctgcacttatgtggctgattaaattctagaagggaaatggctgggtcagagagtcagcttgccctccaaagtgcccaggacttttgaatgcttgttggatgaggcctttggagaagcattgtagcataggagttaagaacatgggttctgcagtcaggaagactcctgctctgttactttctagtcaacttcttcaacctccccaaccctcagtttcctcctctgtaaactgggatgatgagggcacccacctcagggggacactgtgaggattacaggagatgctatatgtaaagtgctcagtgcctggcacaagtggaggtgctccttaaatgactgcaattattcagtacccttggggctttgag

SEQ ID NO: 1298 - DNA, 145 bp, Homo sapiens
tctctttctttctttctttctttctttctttctttctttctttctttctttctttctttctttctttctttttttgagacagagtcttgctctgttgcccaggctggagtgcagtggcacgatcttggcacactgtaacctctgt

SEQ ID NO: 1299 - DNA, 499 bp, Homo sapiens
ctcaaagccccaagggtactgaataattgcagtcatttaaggagcacctccacttgtgccaggcactgagcactttacatatagcatctcctgtaatcctcacagtgtccccctgaggtgggtgccctcatcatcccagtttacagaggaggaaactgagggttggggaggttgaagaagttgactagaaagtaacagagcaggagtcttcctgactgcagaacccatgttcttaactcctatgctacaatgcttctccaaaggcctcatccaacaagcattcaaaagtcctgggcactttggagggcaagctgactctctgacccagccatttcccttctagaatttaatcagccacataagtgcagaaacagccacataagtgcacaaatacctatggacaaagatatctacaacagctctgtctgtaatagtaaaaaattgaaaacaatgcaaatggggaattaaatgctttatggtttgttcatataccacgcag

SEQ ID NO: 1300 - DNA, 406 bp, Homo sapiens
tttatttttttaaaagagattctgctcaattaaaaattcatattcttggcatgctaatttgttttcctaaaagaaagattgtggatatcaacttctgaatacagtatgctttaaagctaaatggaaaatagtgaatactatttcaagccttaaggaaacctttgcaaagcatcattacaagcttagaagaaaatctgattttctgcatcaggttttcaggaattaacccgaagtatttgctaattgcagtgtcaccagcagaaaagtttcttcagctgaacaaatgattaggtcatatttatactaaaattgagttgaagcaattaaaaattgtagctcccatgatgattatgaacagtatccaataatcattttagatgctaaaacaagcatatttctgattatt

SEQ ID NO: 1301 - DNA, 406 bp, Homo sapiens
tttatttttttaaaagagattctgctcaattaaaaattcatattcttggcatgctaatttgttttcctaaaagaaagattgtggatatcaacttctgaatacagtatgctttaaagctaaatggaaaatagtgaatactatttcaagccttaaggaaacctttgcaaagcatcattacaagcttagaagaaaatctgattttctgcatcaggttttcaggagttaacccgaagtatttgctaattgcagtgtcaccagcagaaaagtttcttcagctgaacaaatgattaggtcatatttatactaaaattgagttgaagcaattaaaaattgtagctcccatgatgattatgaacagtatccaataatcattttagatgctaaaacaagcatatttctgattatt

SEQ ID NO: 1302 - DNA, 430 bp, Homo sapiens
aggaaacttaattaatatatatgtcttaaagcagatctatgtttttctcccaaagcagactgtattcagacaggaatgacaatttgatagctacagaagaattgttaactctcacaattttgcatttttatatatttcacaaaaggattttaaaaatagaaaagcagaaatatcaagctaaagactggtgtcttgatatacttttttctttgagagacagagtttcactcttgttgcccaggctggagtacaacagtgtgatctcagcttactgtaacctctgcctcccaggttcaagcaattctcctgcctcagcctcccgagtagctgggtttattaggcgtgtgccatcacgcccagctaatttttgtattgttagtagagacggggtttcaacatgtttgccaggctgtcttgaactcctgacctc

SEQ ID NO: 1303 - DNA, 430 bp, Homo sapiens
aggaaacttaattaatatatatgtcttaaagcagatctatgtttttctcccaaagcagactgtattcagacaggaatgacaatttgatagctacagaagaattgttaactctcacaattttgcatttttatatatttcacaaaaggattttaaaaatagaaaagcagaaatatcaagctaaagactggtgtcttgatatacttttttctttgtgagacagagtttcactcttgttgcccaggctggagtacaacagtgtgatctcagcttactgtaacctctgcctcccaggttcaagcaattctcctgcctcagcctcccgagtagctgggtttattaggcgtgtgccatcacgcccagctaatttttgtattgttagtagagacggggtttcaacatgtttgccaggctgtcttgaactcctgacctc

SEQ ID NO: 1304 - DNA, 526 bp, Homo sapiens
aaacattcctacttcccagctctaaacatctggagtttctcatggcataaattaccctctttccaaaatgaagtaaggagcaacaaaagagaagtatgcagagtttccaaaacaaacaaacatctggtaggagaaatggaattcctaaaatcattcaattcaagggttcctcgggtatggagttggtaggattttctttttctttttcttttttttgagatggagtctcgttctgtcgcctaggctggagtgcagtggcgcgatcttggctcattgcaagctccgcctcctgggttcatgccattctcctgcctcagccttccgagtagctgggactacaggcgcccgccaccaggccggctaattttttgtatttttagtagagacggtgtttcaccgtgttagccaggttagtctcgatctcctgacctcgtgatctgcccgtctcggcctcccaaagtgctgggattacaggcataagccaccacgcccggccaggattttcaaagttataaaggacaactgt

SEQ ID NO: 1305 - DNA, 526 bp, Homo sapiens; identical to SEQ ID NO: 1304

SEQ ID NO: 1306 - DNA, 8472 bp, Homo sapiens
cctggatggaatttttaatttatttatcatgtttgtaagttacagacatttatgttttcagcaacagtttataatagttacatctcatacttcaactattagaacagagagaacattaaagtacaaagaaagacttcaaaaatgaggttactgtgatgtatcataaaaggagttaaaattcaaaatatcaaagacctcacctatcggactaaacataaatcttaaaacctcctatggtcctctgagcctaaaattacaaaacttagcaactgcttaaaccaaggaattaacggttctgtgttttcaaggtaagaaaacaaaaaatgctttggtaaactacctttaatactagtttaaatgtttctgccttgtttgtatctctcttgaaagactgtatataagtacaggcacagcatatatttgagaaaacatctcacaaatttcatttactataggtttctcaataatctttacatttaatcaatgagaaaagtgattcagtctcttgaattttaagttaaaaaaattaaaaagtatttccagggactcttaaagctctctcccaaagtataaaatattatgtactttcaaaatcttaagcattcacgttctttctgagaccaacgcaggatacaaacttactctcaacatagatgcttatgtgcttttgggcacacatagtcttagaacagtggtcaaacagctcacaggaccctgtactcctcttcatcctggactgtgacggtggccacagccagaccagccccctcccatctgccttccaggtcagattccctggcatttattaagctgtcactcttcaatgggttcttccttgggggactcaagctcattcaataagtctttgccagctgctccggcttttgaagcaaagagaactgctccctgcttaaaaccgaggttcttcaaactccgggcataatctgcatatatagcagtgatgagtttctgtaaaccatagttaaggaaaagaagagtaaaaagggctgtgatgagactcttcacaggctcccagaagcaggaagggtgagtcgcgtctgctctgctggctgctcggaagggacctggtgtccacagcgggcagcacaggatgaacacaggagacttttcgcgggcagagggtgattcccggccatagtaggccatgtctcagtctgtaccatcattacctttcgtaccagctgagtccaaagcttctccttccagaagacccaaccaacatcctcccataacctacactcaactgaagattggaagatgaatgataagagaggagaaacttaacctgcatatcctcattccatttgaaagtctgagaggctggcagtttgggggcagatatttatttctgaatgttccctatatctggttgttgggtttttagaaagccctgtcctattggtttttttttatttatttttatttttttaaacagcctattgggtactctgtgctgatgctttgatcctcaaaatgcatacactgaaccagtcaccttcccagtgactaggtacatgatcttgagtaggctcagccttcagtttaattttaaaaaactttcagtgcagggctgggtggctcatgcctgtaatctcagcactttgggaggccaaggtgagaggactgcttgaactaggagttcaagaccagcctgggcaacatagtgagacccgggttactaccaaaaaaaaaaaaaagccaggcacaatggtgtggacctatggtcccagctactggggaggatgaggtgggaggactgcttgagcccaggaagtcaaggctgtagtgagccatgatcgtgccactcactccagtctgggcagaagagtgagaccttacctcaaaaaaaggaaaaaaaaaatttttagtttagttttaattctctgttaaaaaaaaaaaaaaattataaacacacacagagaaagagggagaaagagagagagaaccaagtacctgccatgtagaaatgagagcaaatgtaagaatttgaagcaaagtgcagtgagcagcagcaggaccatgcaagcactggcccagtttcattcttttctggtcctgggagttgcattctcaagttcattcttttcaaagaaaccaatgttgctcaagtgccatttagaagaaataaaatgttctggctgatgggtggattatagtggctggcctgagcaacacctctctttaagtgctgtattttgtcccatatcatattgtcactagaggtgatcgtgagacttttttagttattccagtatattttttctagataaatatataaaatttattccatggaatgtctggtcttgaaaaagtactatttcaaagtaccaggtccttctacctgtttcccaaatcattccttcatcttctttttaagttcagacaagacttgggggccctgtcctctatagtccttcctgcctccctccatcctagtcaaagctgacacccatggtgcagccaccttcttatctgattctttgtcctctaatttctccctctttcctggctttggtgaatcagaaaatcagaacatggatctttcacaatataatatagttcctgtccaggcagcacaactaagggaaattccaaaacccatgcatgtcactttcttcctcgtcactacaaacaaccttgcaaaggatatctgtgtcctcagtgacttcaaatgctccatacttgaggcaagcttccacaaataaggctgctctatcaaagtatctcatgctgctcaacagaacaaaacaagagttatgctttgtgatttacatcactggtgggcagcagcatcgaagggtataaagacatttacacattttccctggaaacctgcatactgcattaagatacaagcacttttctaagccctagtttgttgaaaaaaggagggaagaatactcacatctccaaacacaagctttttaaaattaatactttaaaaaattgtgaaatagtttaaatacacaaaaatctacagagatatgacaagtgcccatgtacccctgtccagagttgacaagtaatcttttgtcatatttccgtaatctacctcccttagttttgaataaatgaaatgctccacaattagtgatggttgttcctcttccagattttcagacgggatgtctccacctcaccatgccttctgtcgcctctccccctgctctctgggcctcctctcagttgctctagtcaaagctgaatggaccccaattctctgaagacttttaaattcccttttactaggtgcctgttaagtctgatcagcatattagtaggaaactagcatagctcctagaccgaatgaagatgtaatgaatacggacagttccattctcctttgggttttttgacaaacctgaaatgtatacttctcctttcactttacacatcgagtaccatgacctgctagaaccgcgagagaacatgaagtgactgctcacgggcaggcctgagcagcccatgtgaactctcggtttacctgtgaagcgtctctgccacgctaaaaaagcagcccagagagaggagaaccaggagagcctttgatttctgattgacttgtggagaacaaaggtggtcaacccaccgccttaaaacatcggcacactcctcaggattcaaacggacctgagaaagacgcctgtgttaacaacaaaaacatcctgcactctataaagaaaaaataataattcagttaaagtgagatctgtttctatgaaatacaggctaggctctgcttgactagcacactgccctgaagctgctgcatactctgaataatgataacggtctgtgcctacgggacccagggcctggctatacctctggactgtagtttcggctcagactctgggagaaagaggaggcagctgcttttacttaattgctaccaatgcaagatccatttttaaataagtaatgcaatttacactcataaagaataggaaaaggataaaggttccaagacagtatttgcaaagcagctttgcaggccaaaaaatgtttctaagtcataagtccaaagttcaggactgagctttctatcccgaatgttgagggcacctattgaaacttggaaccacctacttttgccagccatgcagcccgattccactcgccgtatgtctgcaggtagcggcaggcgtctgcagccttatctatcaggcagagcaactgaacgccctctgaaagacaaaagcgcatccccttaagtgacactgcagctccttctttgagaagtcattaaaaagttaaatccccatttgaccttatctagtcgtgcccattttatacctactgaagacattcttgatttaaattctgaaacataatattaagagttttactgttattactcaagtaaccagggtaggaagcacaatacagtctggagaataagtagggagagcatagttctctcacaggttttattgttctgatttgcctaggattgttggatttatgcctattatctcagcaattattaacagtgccccctttcactctgaaaagtgtaaacaattaattctggtttagacaattatattcatctgatttataggtagcaataatttttctatttttcttcagcatatgtaaaagagaaagaaatgtccctactaatcagatactttgctgggaacaaggtctcatttttcagagagatgacaaacatatcaagtgtgccttacctgccaatttgccattggcaatcatattcgttgccaccaacttaatggtgctctgagaggggcctgacgaggtgacagtagtgactaaacaggctttcagtgaatcacagtaataatgctggttatctgcacttgtttccaacagcaactgcacagctctgtctgtctagtaagagaaacggtttttctaattatgagaacattttcctccaacataactttttaaaattcataaggtagaaaactaaaggaaaacactcattttcaaaaaatgcaattgaatattttgtttacaaatacaaacattaaacagaggtgctacactacttttttgagacaaacataaagccagaggctggtgtatctaggtgctcgagtaattgcctattttagctttgtaccagtcaattcagacacaaaaacaaaacaaaacaaatagctgggctccactgggcattatggaagtctaaattacaagctggttaaccatatgttttttctcatgaggtttattggtattattttgaaagaaagcctaaactgtctacagggaaggaggtacatacaaggggaaaatattatgaaatatatacatacagatatattgctctgaaatacgaattaactagcaatttaatgaagcatgtagagttataaaaactgacatacttgacccaagagcagtagctggtctgtacatttccttgtatgatcataagttgaccgtttcacttcctgtagattaaccctttctagctgaaatttctagaattggaaaaaaaagaaaaattaagcctggattataagagtttggaattatttaaattttactgtacttaataagatcattttaataaactactttgacttttcaggttactagataatcaactttacagcaccccaaacatttaataagaatttgaacagcaaaaatgttgatagatattatcacttggatgcatacctgcctgcctacagaaactgacacttaagtagagccggatgaaaaacctatgtgcactgaaggattctgcaggaggttaaagaaattatcatgtgaacagcaaattcaaaccaagtgtataaagtatttgttatttataggaaattaatgacagaattaaaatgaagccaagttaaaaatgtaagacaaattaaacaagcctgtttaataataaaattttaatgtttagtaaacaacgcagtaactgtctatgagcttttcaaatcttgatcaggctttttttttaatgcaaatgtaccgagggcttctttcttttctttctttttttttttttggagacagagtcttgctctgttgcccaggctggaatgcagtggcgtgatctcagctcactgcaacctccgcctcctgggttcaagtgattctcctccctcagcctcctgagtagctgggactacaggcacgtgccaccacacccagctaattttcaagggcttatttctattactgaacagtaacttagtttgaaagtttcccaagtttaagatattgacaaagatataagtaatcaagatgacagctctaaaggttttgctgtgtgaagcagactacctgaaagtaggcattttcacagagcacgtcatagcatatatccagtgggttgctcagtttgtctcgaggagcagcttctttaggagctgttgtgctggctgacttttcctgggataagctgtgcaggtagtgggcagcgacagtccagaagtgcagctccgattcatcaccatagagcctggcaaggatgaagcaaagttttgactgcactcagcacacctggcctggatggcttcctagagtagactgagggactggaagggagtgttgtcacatatccactgggatactggcatggggcctgacagggtgaaagggggaggcagcaagttctcctgccctgctactgggccttcaacaatacgggggcctgactgcacaggaccccttcagactccagcatctttctgttctgtgttaagaacaattatttacctggtttgccattagcacacctttcaatgtgggccattgattcacattaggaagaagttcctctgggataactggctagataaggtatgaaagtaatgtgctatttattctgtggggagaggagtcttttttataagtgacaaactctactgtaagtcaggatatagaggttatcgcttctaaatataatttattggtatatttaaatatacctgtatctgatattttaaaacacatattttaaaaagctgtaggaggaagtgctttccagagagaaggcctagatctcacatttaaaatgcaatttgatttttccctatttgttattactactgtcaaaattattttaagttaaatctaaaggatgaactgatacatttttctaaaatctaagtgtttctaactaaaaacccttaaaagaaatgagttaacttgaaatcctgtctcttatacagaatacatcaaacaatattaccttgaaacaagcaggcacctctgcaagagagtgaattctggatcaagcaacagtttctttatgtcactgtggaagaaatccggacaaaagtgagacaaaagttttcaatcaaacaataaagcatgggggttgatcaatatactcttgaaatgaaaaattccagtcaaataacatgtttagaatttacacaagacaaggtactttaccatgaccctgaaattataaaagttgaagggggctgagagtgttctcaaggcttggagaagcagcagctttcagccaccacagggagctgcagcgctctcatttctggtttataggcttacaacagtttttgaaagtattagctgcctaactactggaacaagaatgccattgttgaaaaaatcatcaagaacagtaaatactttaaagaagatgacattcgtaatttattctgaaactattccaaaaataaagtatctaaggaagaatggcttgtgcttttataagttcgtatttctaaaatagtaaaatactgaatattcacaaatcagaaaggaagacattctttaaatctatagtttcccatttaaacataaatgttaatctttgcatagaaaaaactaattattttgaattttccgtcaataaaatatcatgcttaatttgttaaatactataattatatgtaacagattctagattgcaaaaatgtgttacgctttccccaagaactccttgtagacccatattttttcctttcttattcccagtacattctgttaaatgcccttggctctagggagcacattaatttcttagccagacctgtgcacaccagcacctgacacagagaactcattttagaagcgggaagcagacccagaatcaccctgcgattcgtctcccgctgtgaggcttcatggaggtttgtagtagaggcaagctgagctacaaggatgctcccactatgcatctagtcctgccttgatgtgagatcagagcagctggtgctcatgaacttggtgaagacagatgctctgtcactgtaactactgaataagtactttttctgcaaaacacagactctaacgggaagcaaacctctaaacagaatggtctcttcttgggccactaatattttctaaaacgtaacttattttaattttgaattgcatttaaagttgaattgcatttttctttctcatattcctatcttctaatgaaacatggagtgcttacttagacaatgaattcaactgttcttggaggagattctttatttc

SEQ ID NO: 1307 - DNA, 8472 bp, Homo sapiens
cctggatggaatttttaatttatttatcatgtttgtaagttacagacatttatgttttcagcaacagtttataatagttacatctcatacttcaactattagaacagagagaacattaaagtacaaagaaagacttcaaaaatgaggttactgtgatgtatcataaaaggagttaaaattcaaaatatcaaagacctcacctatcggactaaacataaatcttaaaacctcctatggtcctctgagcctaaaattacaaaacttagcaactgcttaaaccaaggaattaacggttctgtgttttcaaggtaagaaaacaaaaaatgctttggtaaactacctttaatactagtttaaatgtttctgccttgtttgtatctctcttgaaagactgtatataagtacaggcacagcatatatttgagaaaacatctcacaaatttcatttactataggtttctcaataatctttacatttaatcaatgagaaaagtgattcagtctcttgaattttaagttaaaaaaattaaaaagtatttccagggactcttaaagctctctcccaaagtataaaatattatgtactttcaaaatcttaagcattcacgttctttctgagaccaacgcaggatacaaacttactctcaacatagatgcttatgtgcttttgggcacacatagtcttagaacagtggtcaaacagctcacaggaccctgtactcctcttcatcctggactgtgacggtggccacagccagaccagccccctcccatctgccttccaggtcagattccctggcatttattaagctgtcactcttcaatgggttcttccttgggggactcaagctcattcaataagtctttgccagctgctccggcttttgaagcaaagagaactgctccctgcttaaaaccgaggttcttcaaactccgggcataatctgcatatatagcagtgatgagtttctgtaaaccatagttaaggaaaagaagagtaaaaagggctgtgatgagactcttcacaggctcccagaagcaggaagggtgagtcgcgtctgctctgctggctgctcggaagggacctggtgtccacagcgggcagcacaggatgaacacaggagacttttcgcgggcagagggtgattcccggccatagtaggccatgtctcagtctgtaccatcattacctttcgtaccagctgagtccaaagcttctccttccagaagacccaaccaacatcctcccataacctacactcaactgaagattggaagatgaatgataagagaggagaaacttaacctgcatatcctcattccatttgaaagtctgagaggctggcagtttgggggcagatatttatttctgaatgttccctatatctggttgttgggtttttagaaagccctgtcctattggtttttttttatttatttttatttttttaaacagcctattgggtactctgtgctgatgctttgatcctcaaaatgcatacactgaaccagtcaccttcccagtgactaggtacatgatcttgagtaggctcagccttcagtttaattttaaaaaactttcagtgcagggctgggtggctcatgcctgtaatctcagcactttgggaggccaaggtgagaggactgcttgaactaggagttcaagaccagcctgggcaacatagtgagacccgggttactaccaaaaaaaaaaaaaagccaggcacaatggtgtggacctatggtcccagctactggggaggatgaggtgggaggactgcttgagcccaggaagtcaaggctgtagtgagccatgatcgtgccactcactccagtctgggcagaagagtgagaccttacctcaaaaaaaggaaaaaaaaaatttttagtttagttttaattctctgttaaaaaaaaaaaaaaattataaacacacacagagaaagagggagaaagagagagagaaccaagtacctgccatgtagaaatgagagcaaatgtaagaatttgaagcaaagtgcagtgagcagcagcaggaccatgcaagcactggcccagtttcattcttttctggtcctgggagttgcattctcaagttcattcttttcaaagaaaccaatgttgctcaagtgccatttagaagaaataaaatgttctggctgatgggtggattatagtggctggcctgagcaacacctctctttaagtgctgtattttgtcccatatcatattgtcactagaggtgatcgtgagacttttttagttattccagtatattttttctagataaatatataaaatttattccatggaatgtctggtcttgaaaaagtactatttcaaagtaccaggtccttctacctgtttcccaaatcattccttcatcttctttttaagttcagacaagacttgggggccctgtcctctatagtccttcctgcctccctccatcctagtcaaagctgacacccatggtgcagccaccttcttatctgattctttgtcctctaatttctccctctttcctggctttggtgaatcagaaaatcagaacatggatctttcacaatataatatagttcctgtccaggcagcacaactaagggaaattccaaaacccatgcatgtcactttcttcctcgtcactacaaacaaccttgcaaaggatatctgtgtcctcagtgacttcaaatgctccatacttgaggcaagcttccacaaataaggctgctctatcaaagtatctcatgctgctcaacagaacaaaacaagagttatgctttgtgatttacatcactggtgggcagcagcatcgaagggtataaagacatttacacattttccctggaaacctgcatactgcattaagatacaagcacttttctaagccctagtttgttgaaaaaaggagggaagaatactcacatctccaaacacaagctttttaaaattaatactttaaaaaattgtgaaatagtttaaatacacaaaaatctacagagatatgacaagtgcccatgtacccctgtccagagttgacaagtaatcttttgtcatatttccgtaatctacctcccttagttttgaataaatgaaatgctccacaattagtgatggttgttcctcttccagattttcagacgggatgtctccacctcaccatgccttctgtcgcctctccccctgctctctgggcctcctctcagttgctctagtcaaagctgaatggaccccaattctctgaagacttttaaattcccttttactaggtgcctgttaagtctgatcagcatattagtaggaaactagcatagctcctagaccgaatgaagatgtaatgaatacggacagttccattctcctttgggttttttgacaaacctgaaatgtatacttctcctttcactttacacatcgagtaccatgacctgctagaaccgcgagagaacatgaagtgactgctcacgggcaggcctgagcagcccatgtgaactctcggtttacctgtgaagcgtctctgccacgctaaaaaagcagcccagagagaggagaaccaggagagcctttgatttctgattgacttgtggagaacaaaggtggtcaacccaccgccttaaaacatcggcacactcctcaggattcaaacggacctgagaaagacgcctgtgttaacaacaaaaacatcctgcactctataaagaaaaaataataattcagttaaagtgagatctgtttctatgaaatacaggctatgctctgcttgactagcacactgccctgaagctgctgcatactctgaataatgataacggtctgtgcctacgggacccagggcctggctatacctctggactgtagtttcggctcagactctgggagaaagaggaggcagctgcttttacttaattgctaccaatgcaagatccatttttaaataagtaatgcaatttacactcataaagaataggaaaaggataaaggttccaagacagtatttgcaaagcagctttgcaggccaaaaaatgtttctaagtcataagtccaaagttcaggactgagctttctatcccgaatgttgagggcacctattgaaacttggaaccacctacttttgccagccatgcagcccgattccactcgccgtatgtctgcaggtagcggcaggcgtctgcagccttatctatcaggcagagcaactgaacgccctctgaaagacaaaagcgcatccccttaagtgacactgcagctccttctttgagaagtcattaaaaagttaaatccccatttgaccttatctagtcgtgcccattttatacctactgaagacattcttgatttaaattctgaaacataatattaagagttttactgttattactcaagtaaccagggtaggaagcacaatacagtctggagaataagtagggagagcatagttctctcacaggttttattgttctgatttgcctaggattgttggatttatgcctattatctcagcaattattaacagtgccccctttcactctgaaaagtgtaaacaattaattctggtttagacaattatattcatctgatttataggtagcaataatttttctatttttcttcagcatatgtaaaagagaaagaaatgtccctactaatcagatactttgctgggaacaaggtctcatttttcagagagatgacaaacatatcaagtgtgccttacctgccaatttgccattggcaatcatattcgttgccaccaacttaatggtgctctgagaggggcctgacgaggtgacagtagtgactaaacaggctttcagtgaatcacagtaataatgctggttatctgcacttgtttccaacagcaactgcacagctctgtctgtctagtaagagaaacggtttttctaattatgagaacattttcctccaacataactttttaaaattcataaggtagaaaactaaaggaaaacactcattttcaaaaaatgcaattgaatattttgtttacaaatacaaacattaaacagaggtgctacactacttttttgagacaaacataaagccagaggctggtgtatctaggtgctcgagtaattgcctattttagctttgtaccagtcaattcagacacaaaaacaaaacaaaacaaatagctgggctccactgggcattatggaagtctaaattacaagctggttaaccatatgttttttctcatgaggtttattggtattattttgaaagaaagcctaaactgtctacagggaaggaggtacatacaaggggaaaatattatgaaatatatacatacagatatattgctctgaaatacgaattaactagcaatttaatgaagcatgtagagttataaaaactgacatacttgacccaagagcagtagctggtctgtacatttccttgtatgatcataagttgaccgtttcacttcctgcagattaaccctttctagctgaaatttctagaattggaaaaaaaagaaaaattaagcctggattataagagtttggaattatttaaattttactgtacttaataagatcattttaataaactactttgacttttcaggttactagataatcaactttacagcaccccaaacatttaataagaatttgaacagcaaaaatgttgatagatattatcacttggatgcatacctgcctgcctacagaaactgacacttaagtagagccggatgaaaaacctatgtgcactgaaggattctgcaggaggttaaagaaattatcatgtgaacagcaaattcaaaccaagtgtataaagtatttgttatttataggaaattaatgacagaattaaaatgaagccaagttaaaaatgtaagacaaattaaacaagcctgtttaataataaaattttaatgtttagtaaacaacgcagtaactgtctatgagcttttcaaatcttgatcaggctttttttttaatgcaaatgtaccgagggcttctttcttttctttctttttttttttttggagacagagtcttgctctgttgcccaggctggaatgcagtggcgtgatctcagctcactgcaacctccgcctcctgggttcaagtgattctcctccctcagcctcctgagtagctgggactacaggcacgtgccaccacacccagctaattttcaagggcttatttctattactgaacagtaacttagtttgaaagtttcccaagtttaagatattgacaaagatataagtaatcaagatgacagctctaaaggttttgctgtgtgaagcagactacctgaaagtaggcattttcacagagcacgtcatagcatatatccagtgggttgctcagtttgtctcgaggagcagcttctttaggagctgttgtgctggctgacttttcctgggataagctgtgcaggtagtgggcagcgacagtccagaagtgcagctccgattcatcaccatagagcctggcaaggatgaagcaaagttttgactgcactcagcacacctggcctggatggcttcctagagtagactgagggactggaagggagtgttgtcacatatccactgggatactggcatggggcctgacagggtgaaagggggaggcagcaagttctcctgccctgctactgggccttcaacaatacgggggcctgactgcacaggaccccttcagactccagcatctttctgttctgtgttaagaacaattatttacctggtttgccattagcacacctttcaatgtgggccattgattcacattaggaagaagttcctctgggataactggctagataaggtatgaaagtaatgtgctatttattctgtggggagaggagtcttttttataagtgacaaactctactgtaagtcaggatatagaggttatcgcttctaaatataatttattggtatatttaaatatacctgtatctgatattttaaaacacatattttaaaaagctgtaggaggaagtgctttccagagagaaggcctagatctcacatttaaaatgcaatttgatttttccctatttgttattactactgtcaaaattattttaagttaaatctaaaggatgaactgatacatttttctaaaatctaagtgtttctaactaaaaacccttaaaagaaatgagttaacttgaaatcctgtctcttatacagaatacatcaaacaatattaccttgaaacaagcaggcacctctgcaagagagtgaattctggatcaagcaacagtttctttatgtcactgtggaagaaatccggacaaaagtgagacaaaagttttcaatcaaacaataaagcatgggggttgatcaatatactcttgaaatgaaaaattccagtcaaataacatgtttagaatttacacaagacaaggtactttaccatgaccctgaaattataaaagttgaagggggctgagagtgttctcaaggcttggagaagcagcagctttcagccaccacagggagctgcagcgctctcatttctggtttataggcttacaacagtttttgaaagtattagctgcctaactactggaacaagaatgccattgttgaaaaaatcatcaagaacagtaaatactttaaagaagatgacattcgtaatttattctgaaactattccaaaaataaagtatctaaggaagaatggcttgtgcttttataagttcgtatttctaaaatagtaaaatactgaatattcacaaatcagaaaggaagacattctttaaatctatagtttcccatttaaacataaatgttaatctttgcatagaaaaaactaattattttgaattttccgtcaataaaatatcatgcttaatttgttaaatactataattatatgtaacagattctagattgcaaaaatgtgttacgctttccccaagaactccttgtagacccatattttttcctttcttattcccagtacattctgttaaatgcccttggctctagggagcacattaatttcttagccagacctgtgcacaccagcacctgacacagagaactcattttagaagcgggaagcagacccagaatcaccctgcgattcgtctcccgctgtgaggcttcatggaggtttgtagtagaggcaagctgagctacaaggatgctcccactatgcatctagtcctgccttgatgtgagatcagagcagctggtgctcatgaacttggtgaagacagatgctctgtcactgtaactactgaataagtactttttctgcaaaacacagactctaacgggaagcaaacctctaaacagaatggtctcttcttgggccactaatattttctaaaacgtaacttattttaattttgaattgcatttaaagttgaattgcatttttctttctcatattcctatcttctaatgaaacatggagtgcttacttagacaatgaattcaactgttcttggaggagattctttatttc

SEQ ID NO: 1308 - DNA, 11057 bp, Homo sapiens
catggtgtatatgtgccacattttcttaatccagtctatcattgttggacatttgggttggttccaagtctttgctattgtgaataatgccacaataaacgtacgtgtgcatgtgtctttatagcagcatgatttatagtcctttgggtatatacccagtaatgggatggctgggtcaaatggtatttctagttctagatccctgaggaattgccacactgacttccacaatggttgaactagtttacagtcccaccaacagtgtaaaagtgttcctatttctccacatcctctccagcacctgttgtttcctgactttttaatgattgccattctaactggtgtgagatggtatctcattgtggttttgatttgcatttctctgatggccagtgatgatgagcattttttcatgtgttttttggctgcataaatatcttcttttgagaagtgtctgttcatgtccttcacccactttttgatggggttgtttgtttttttcttgtaaatttgtttgagttcattgtagattctggatattagccctttgtcagatgagtaggttgcaaaaattttctcccattttgtaggttgcctgttcactctgatggtagtttcttttgctgtgcagaagctctttagtttaattagatcccatttgtcaattttgtcttttgttgccattgcttttggtgttttagacatgaagtccttgcccatgcctatgtcctgaatggtaatgcctaggttttcttctagggtttttatggttttaggtctaacgtttaagtctttaatccatcttgaattgatttttgtataaggtgtaaggaagggatccagtttcagctttctacatatggctagccagttttcccagcaccatttattaaatagggaatcctttccccattgcttgtttttctcaggtttgtcaaagatcagatagttgtagatatgtggcgttatttctgagggctctgttctgttccattgatctatatctctgttttggtaccagtaccatgctgttttggttactgtagccttgtagtatagtttgaagtcaggtagtgtgatgcctccagctttgttcttttggcttaggattgccttggcgatgcaggctcttttttggttccatatgaactttaaagtagttttttccaattctgtgaagaaaggcattggtagcttgatggggatggcattgaatctgtaaattaccttgggcagtatggccattttcaagatattgattcttcctacccatgagcatggaatgttcttccatttgtttgtatcctcttttatttccttgagcagcggtttgtagttctccttgaagaggtccttcacctcccttgtaagttggattcctaggtattttattctctttgacgcaattgtgaatgggagttcactcatgatttggctctctgtttgtctgttgttggtgtataggaatgcttgtgatttttgcacattgattttgtatcctgagactttgctgaagttgcttatcagcttaaggagattttgggctgagacaatggggttttctagatatacaatcatgtcgtctgcaaacagggacaatttgacttcctcttttcctaattgaataccctttatttccttctcctgcctaattgccctggccagaacttccaacactatgttgaataggagtggtgagagagggcatccctgtcttgtgccagttttcaaagggaatgcttccagtttttgcccattcagtatgatattggctgtgggtttgtcatagatagctcttattattttgaaatacatcccatcaatacctaatttattgagagtttttagcatgaagggttgttgaattttgtgaaaggctttttctgcatctattgagataatcatgtggtttttgttttggctcttgtttatatgctggattacatttattgatttgcgtatattgaaccagccttgcatcccagggatgaagcccacttgatcatggtggataagctttttgatgtgctgctggattcgttttgccagtattttattgaggatttttgcatcaatgttcatcaaggatattggtctaaaattctctttttttgttgtgtctctgcctggctttggtatcagaatgatgctggcctcataaaatgagttagggaggattccctctttttctgttgattggaatagtttcagaaggaatggtaccagttcctccttgtacctctgatagaattcggctgtgaatccatctggtcctggactctttttggttggtaaactattgattattgccacaatttcagctcctgttattggtctattcagagattcaacttcttcctggtttagtcttgggaaagtgtatgtgtcaaggaatttatccatttcttctagattttctagtttatttgcgtagaggtgtttgtagtattctctgatggtagtttgtatttctgtgggatcggtggtgatatcccctttatcattttttattgcgtctatttgattcttctctctttttttctttattagtcttgctagcagtctatcaattttgttgatcctttcaaaaaaccagctcctggattcattaattttttgaagtgattttgtgtctctattgcctctttttttttttttcttgagatggagttttgctcttgttgcccaggctggagtgcagtggtgcaatctcagctcactgcaacctccttttcccaggttcaagagattctgcctcagctcactgcaacctccttttcccaggttcaagcggttctcttgcctcagcctcccaagcagctgggaatacaagtgcccgccaccacacccggctaatttgagcatctttcttttttcttttttttaaagagatggagtctcgctgtcgcccaggctggagtgcagtggtcccatctcagctcacctcaacctctgccttccaggttcaagcaattctcctgcctcagcctcctgagtagctgggactacaggtgcacatcaccacactcagctattttttttttttttttttttgtattttagtagagatggggtttcaccatgttgctgaggctggtctcgaactcctgagctctggtaagctgcctgcctcggcctcccaaagtgctaggattacaggcgtgagccactgcacccggcaatttgagcatctttaattgtccttggctttgctcactttaaatatggaagacgggaaagctaaaaatcatgccaggtcacctgtggaacccaaaatgtccttctttctcttatacttaggacatattttatcttaagtcatatttctcaatgttcttgaaaaaaataaggtgagggtggtttttatttggcatttttaggcatgatgccaaacaccaaagagaaaggcctgaaattgtccacagggactcctgtgagagcctcagtcgctcatcatctctcagcgggagaaaagcggggctttcccgggttattttgaatgtgtgctgcgtgctgaccaaacaggcatggaaggaaagaaaacatgcaggacccttgcaggaaaggcaaggcgaggtggcggctgtctgcccttctgatttcctcttagacctgacatctcattggattccagcagttttcagaagtgccttccaaaagcgcagctcctccttccttcttttaaagtggcagcaacatgtccttgattaaaactgccattacgttttaattaaaagggttctttcattcacaagtcattttgagtcagtcaaaataatctcatgcaggctcccagagaaacggccccgttgcctggaacattctcccttgggtgccttccctgcgtggccctcttttatttcagcagcacagttacaagtttgtgcctgaatgctttacttcaatcacatcctgttgctgagaatggaatatcctgggtagtcacagagctcaggattcactgaaacctaacaccatcctgaggcaagaggaagcctcaggaaacaaatagatgagagagaaattgttttcttatttcattgtgtctacatgttgagactttctgatcgggtacctgtgtgagagggacatgaggcttgtatgaatctgctctgttatctcttttgaaagaacaaaatgtcctgctactacgtccaaagcaatgattaaacctagagcaagaccgtggtggggcagccagccacatttggcagagcatttcgttagcaacagaggaggaaaaaggtaacggtgagcagtaggaaatggctcagagaccagtcaaggggaagcacctaccacccaccacctggccttcttcctgaagaagccccacctccagagtggctcctccacccccacccaggctttgtggcaaagggaagggcccaggccttgcccagcagcttctgtgggggctggcagtggggccagggtctgctgtcctgaagtaattctcagtcttattcccaatttcagctgcttgtttcagctcgtgaagccacctcattagtgtgttgacaacacgtattcttaatgatctttcgtgaaaagatattcagaaaggctaaatgtgaaaaacaattcatacttgttcagctcttgatttccaatgcttgatggaggtgagtatggcagttttcagcagtgtggctgtgaatatcaccagagatcacctgttctgtttggaaggggattttcagtggtgtctcgaccaggcttggtctctgtgtccccgtgggagtcctaactgctacactagccagctggactgacacaaacccaggctctgggccttgtctgctcactgtgtttataccgagctgccgtgcctggccctgcttcactctcaccatcaggcaatgccttagtacctatttgttggccttaatccaaagcattttcatttttcagaaagcacgactctggtataaagtttcttctttctctctgcttcgcaagtctcgtaattcacatgttgaagccttaccgtccagtgtgatagtatttgagggttcagcctttttttttccttatttatttattattatactttaagttttagggtacatgtgcacattgtgcaggttagttacatatgtatacatgtgccatgctggtgtgctgcacccactaactcgtcatctagcattaggtatatctcccaatgctatccctcccccctccccccaccccacaacagtccccagagtgtgatgttccccttcctgtgtccatgtgatctcattgttcaattcccacctatgagtgagaatatgcggtgtttggttttttgttcttgcgatagtttactgagaatgatggtttccaatttcatccatgtccctacaaagggcatgaactcatcattttttatggctgcatagtattgcatggtgtatatgtgccacattttcttaatccagtctatcactgttggacatttgggttggttccaagtctttgctattgtgaataatgccgcaataaacatacgtgtgcatgtgtctttatagcagcatgatttatagtcctttgggtatatacccagtaatgggatggctgggtcaaatggtatttctagttctagatccctgaggaatcgccacactgacttccacaatggttgaactagtttacagtcccaccaacagtgtaaaagtgttcctatttctccacatcctctccagcacctgttgtttcctgactttttaatgatcaccattctaaccggtgtgagatggtatctcattgtggttttgatttgcatttctctgatggccagtgatggtgagcattttttcatgtgttttttggctgcataaatgtcttcttttgagaagtgtctgttcatgtccttcacccactttttgatggggttgtttgtttttttcttgtaaatttgtttgagttcattgtagattctggatattagccctttgtcagatgagtaggttgcaaaaattttctcccattttgtaggttgcctgttcactctgatagtagtttcttttgctgtgcagaagctctttagtttaattagatcccatttgtcaattttgtcttttgttgccattgcttttggtgttttagacatgaagtccttgcccatgcctatgtcctgaatggtaatgcctaggttttcttctagggtttttatggttttaggtctaacatttaagtatttaatccatcttgaattgatttttgtataaggtgtaaggaagggatccagtttcagctttctacatatggctagccagttttcccagcaccatttattaaatagggaatcctttccccattgcttgtttttctcaggtttgtcaaagatcagatagttgtagatatgcggcgttatttctgagggctctgttctgttccattgatctatatctctgttttggtaccagtaccatgctgttttggttactgtagccttgtaatatagtttgaagtcaggtagtgtgatgcctccagctttgttcttttggcttaggattgccttggcgatgcaggctcttttttggttccatatgaactttaaagtagttttttccaattctgtgaagaaaggcattggtagcttgatggggatggcattgaatctgtaaattaccttgggcagtatggccattttcacaatattgattcttcctacccatgagcatggaatgttcttccatttgtttgtatcctcttttatttccttgagcagcggtttgtagttcttgaagaggtccttcacatcccttgtaagttggattcctaggtattttattctctttgaagcaattgtgaatgggagttcactcatgatttggctctctgtttgtctgttgttggtgtataggaatgcttgtgatttttgcacattgattttgtatcctgagactttgctgaagttgcttatcagcttaaggagattttgggctgagacaatggggttttctagatatacaatcatgtcgtctgcaaacagggacaatttgacttcctcttttcctaattgaataccctttatttccttctcctgcctaattgccctggccagaacttccaacactatgttgaataggagtggtgagagagggcatccctgtcttgtgccagttttcaaagggaatgcttccagtttttgcccattcagtatgatattagctgtgggtctgtcatagatagctcttattattttgaaatatgtcccatcaatacctaatttattgagagtttttagcatgaaaggttgttgaattttgtcaaaggccttttctgcatctattgagataatcatgtggtttttgtctttggctctgtttatatgctggattacatttattgatttgcgtatattgaaccagccttgcatcccagggatgaagcccacttgatcatggtggataagctttttgatgtgctgctggatttggtttgccagtattttattgaggatttttgcatcaatgttcatcaaggatattggtctaaaattctcttttttggttgtgtctctgcccgactttggtatcagaatgatgctggcctcataaaatgagttagggaggattccctctttttctattgattggaatagtttcagaaggaatggtaccagttccttcttgtacctctggtagaatttggctgtgaatccatctggtcctggactctttttggttggtaagctattgattattgccacaatttcagctcctgttattggtgtattcagagattcaacttcttcctggtttagtcttgggagagtttatgtgtcaaggaatttatccatttcttctagattttctagtttatttgcgtagaggtgtttgtagtattctctgatggtagtttgtatttctgtgggatcggtggtgatatcccctttatcattttttattgcgtctatttgattcttctctctttttttctttattagtcttgctagcggtctatcaattttgttgatcctttcaaaaaaccagctcctggattcattaattttttgaagggttttttgtgtctctatttccttcagttctgctctgattttagttatttcttgccttctgctagcttttgaatgtgtttgctcttgcttttctagttcttttaattgtgatgttagggtgtcaattttggatctttcctgctttctcttgtgggcatttagtgctataaatttccctctacacactgctttgaatgcgtcccagagattctggtatgttgtgtctttattctcgttggtttcaaagaacatcttcatttctgccttcatttcgttatgtacccagtagtcattcaggagcaggttgttcagtttccatgtagttgagcagttttgagtgagattcttaatcctgagttctagtttgattgcactgtggtctgagagatagtttgttataatttctgttcttttacatttgctgaggagagctttacttccaagtatgtggtcaattttggaataggtgtggtgtagtgctgaaaaaaatgtatattctgttgatttggggtggagagttctgtagatgtctattaggtccacttggtgcagagctgagttcaattcctgggtatccttgttgactttctgtctcgttgatctgtctaatgttgacagtgggatgttaaagtctcccattattaatgtgtgggagtctaagtctctttgtaggtcactcaggacttgctttatgaatctgggtgctcctgtattgggtgcatatatatttaggatagttagctcttcttgttgaattgatccctttaccattatgtaatgctttgtctcttttgatctttgttggtttaaagtctgttttatcagagactaggattgcaacccctgcctttttttgttttccatttgcttggtagatcttcctccatccttttattttgagcctatgtgtgtctctgcacgtgagatgggattcctgaatacagcacactgatgggtcttgactctttatccaatttgccagtctgtgtcttttaattggagcatttagtccatttacatttaaagttaatagtgttatgtgtgaatttgaccctgtcattatgatgttagctggttattttgctcgttagttgatgcagtttcttcctagtcccgatggtctttacattttggcatgattttgcagcggttggtaccagttgttcctttccatgtttagcgcttccttcaggagctcttttagggcaggcctggtgtgacaaaatctctcagcatttgcttgtctgtaaagtattttatttctccttcacttatgaagcttagtttggctggatatgaaattctgggttgaaaattcttttctttaagaatgttgaatattggcccccactctcttctggcttgtagggtttctgccgagagatccgctgttagtctgatgggcttccctttgaaggtaacccgacctttctctctgcctgcccttaacattttttccttcatttcaacttcggtgaatctgacaattatgtgtcttggagttgctcttctcgaggagtatctttgtggcgttctctgtatttcctgaatctgaacgttggcctcccttgctagattggggaaattctcctggataatatcctgcagagtgttttccaacttggttccactctccccatcactttcaggtacaccaatcagacgtagatttggtcttttcacatagtcccatatttcttggaggctttgctcatttctttttattcttttttctctaaactttccttctcacttcatttcattcatttcatcttccattgctgataccctttcttccagttgatcgcatcggctcctgaggcttctgcattcttcacgtagttctcgagccttggttttcagctccatcagctcctttaagcacttctctgtattggttattctagttatacattcttctaaattttttttcaaagttttcaacttctttgcctttggtttgagtgtcctcccgtagctcagagtaatttgatcgtctgaagccttcttctctcagctcgtcaaagtcattctccgtccacctttgttccgttgctggtgaggagctgcgttcctttggaggaggagaggtgctctgatttttagagtttccagtttttctgttctgttttttccccatctttgtggttttatctacttttggtctttgatgatggtgatgtacagatgggtttttggtgtggatgtcctttctgtttgttagttttccttctaacagacaggaccctcagctgcaggtctgttggagtaccctgcagtgtgaggtgtcagtgtgcccctgctggagggtgcctcccagttaggctgctcgggggtcaggggtcagggacccacttgaggaggcagtctgcctgttctcagatctccagctgcgtcctgggagaaccactgctctcttcaaagctgtcagacagggacatttaagtctgcagaggttactgctgtcttttagtttgtctgtgccctgcccccagaggtggagcctacagaggcaggcaggcctccttgagctgtggtgggctccacccagttcgagcttcccggctgctttgtttacctaagcaagcctgggcaatggcgggcgcccctcccccagcctcgctgccgccttgcagtttgatctcagactgctgtgctagcaatcagggagactccgtggggtaggaccctccaagccaggtgcgggatataatctcgtggtgcgccattttttaagcccgtcggaaaagcgcagtattcgggtgggagtgacccgattttccaggtgctgtccgtcacccctttctttgactcagaaagggaactccctgaccccttgcgcttcccaggtgaggcaatgcctcgccctgcttcggctcgcgcacggtgcacgcacccactgacctgcgccgactgtctggcactccctagtgagatgaacctggtacctcagatggaaatgcagaaatcacccgtcttctgcgtcactcaggctgggagctgtagaccggagctgttcctattcggccatcttggctcctccctc

SEQ ID NO: 1309 - DNA, 768 bp, Homo sapiens
gtgtgaggtgtcagtgtgcccctgctggagggtgcctcccagttaggctgctcgggggtcaggggtcagggacccacttgaggaggcagtctgcctgttctcagatctccagctgcgtactgggagaaccactgctctcttcaaagctgtcagacagggacatttaagtctgcagaggttactgctgtcttttagtttgtctgtgccctgcccccagaggtggagcctacagaggcaggcaggcctccttgagctgtggtgggctccacccagttcgagcttcccggctgctttgtttacctaagcaagcctgggcaatggcgggcgcccctcccccagcctcgctgccgccttgcagtttgatctcagactgctgtgctagcaatcagggagactccgtggggtaggaccctccgagccaggtgcgggatataatctcgtggtgcgccattttttaagcccgtcggaaaagcgcagtattcgggtgggagtgacccgattttccaggtgctgtccgtcacccctttctttgactcagaaagggaactccctgaccccttgcgcttcccaggtgaggcaatgcctcgccctgcttcggctcgcgcacggtgcacgcacccactgacctgcgccgactgtctggcactccctagtgagatgaacctggtacctcagatggaaatgcagaaatcacccgtcttctgcgtcactcaggctgggagctgtagaccggagctgttcctattccgccatcttggctcctccctc

SEQ ID NO: 1310 - DNA, 278 bp, Homo sapiens
tttttgattttttattttattttttttttgagacaaagcctcgctctgtcacctaggctggagtgcggtggtgcgatctcggctcacagcaacctccgcctcccgggttcaagcgattctcctgcctcagcctccgaagtaactgggattacaagcacctgccaccatgcctggctaatttttgcatttttagtagagatggggtttcaccatgttggccagactggtctcaaactcctgacctcaggtgatctgcccaccttggcctcccaaagtcc

SEQ ID NO: 1311 - DNA, 278 bp, Homo sapiens; identical to SEQ ID NO: 1310

SEQ ID NO: 1312 - DNA, 29220 bp, Homo sapiens
tttttttttttttttttcctggtgcagccagatgttctaacttttgaacaaatgagcgtggtcagtaatgtacaataactcttgagtctgttactttggcctagctaagcccatctggccctcgggcatcctgcaagatgacagacagaagagcaagggcactatcagaaatggaacaggctgccccctactcctcccagcctctaccagtacacagagacagactggagatagagcattcgcagccagttggcatcttggttcttttgtcttctgaaaataaaaataagtgcttgtcttgtctttgggggtcaaagagaaccgcactaatttatttcctcgagggggcttttctggaggagaggatcctcagtcctgtgccaaggtttcacgctgtttggccacacgccaggcctttcttctggatctggtctgcacgtccagagatgatggaggaattgcatcagcatcatatgcacagtgaaagggtggctcttgtccagagaggcccattccgggcctggctacatggcctcagggcctggcggcagtttgaagagtctggctgcagataggagctttcttatgtgtctctcctctgtgatgccggcctcctgaaggcaagtgtgagacagagaaggcacttggctcagtgtgctgaagcccgcggtggagagggtgccggcgtacatgggcagaccgatggaaatgagccaatctgacacagacgaaatgcacccaggagagacgggctttcggcagatttccgtgagtccaccacttggaatctggataaattaagaaagaatatgatagaaacgctccatgtgtcatcgaggactacttcgcgtatgtctaaaaggaacagcactgaaatactgcattgctagactattatcagaaagcgacaatgcaatgagtgtcagagatcaagactagcaggaaaaattcttctctaagatgaaacaaatctttaaggaagagttccacaaggttctcgaaggtgttggaatgaggtcaaatcccatttatgtgtccgagtcttcaaactataagcatttacatattctgctattttgtttcactgtggatatgctcttgacaaagagccctaaggtagtctgaagggacaaatctgggtgatcgtgtgaaatgtagcattcagtgggtagggtttttataaaggagactttccactgtattttgaatctatgttaacaaccagaaaattacatgtttagtcaatacaagttatgaagaatttaaaatacaataatatcaagggttggctggaacagggaagtggacatttaaccttgactactgggtatataaagggcctgcacctttcagaaaggtgatttgctaacgagtatgaaaatctttgggattttatacaattttgatgaagcaaaccatcttccaggaatatctactcagaaattaacctttaaagtctacaaagatttattaacaaggatgttcttcattacattatttaaaataaaaggttagaaaaatctaaatgttttaactatgagactcactactagagtacactgacctactagaatactttgaaatacaatagccacccccctgcttatccatggttttgctttctacagcctgaaaatattaaatgggaatttccagaaataaacaattcataagtcttatattgcatgccattctgagtagtctgaagaaatctcacaccacccagctctgtcccacctgacaatcatccctttgtctaacaaatccacgctgcctacaccaccagccccgcagtcacttagtagcccgtagtcatcagatcaactgttgcggtaatgcagtacttgcattcaagtcactcttatttgaccttacaatggcccccaagtgcaagagtaacgatgctggccattcgcacgtggcaaagagaagcccttaagtgcttcctttaagtaaaaaggtgagagttcttgacttaataagaaaagaaaaaaaattgtatgctgaggttcctaagacctacagtgaaaacgaatcttctatccatgaaattgtgaaggaaaaagaaatttgtgtataatatatacagggtttggtactcagcaagctttcaagagatccacttggaggtcttggaccataatccctcatggatagggggagactactgtattgatgatatcaatttttttttttttaagtaacagggaaacagattcatgatctgataatagccaacaatcaggtttcggtactatacatttacgcatacattacgcatgtgcagagaaatgactagacagagttttaatggacaagtaaaaattgtgtgtatttatggtgtaaaacgtggtgtgttgataaatgtacacattgtggaatggctaaatcaagctatttgacatatgcattacctcatatactatattttgtggtgagaacacttaagatctgctgtcctagcaattttcaagtatacattgttattaactgtagtcaccatgttgaacaatagatctttggaagttatgcttctaactgaaactgtgtcattcagacggattttattttatttcttaagagatggggtctcactatgttgcccaggccggcatcaaaattctgggctcaagcaatcctcctgcttctgcctcccaagtaactaggattacaggtgtgcactatcacgcccagcactagacggatctttaaaaagtttttcacagtgttgggattacggataattttcattttttttttctttctgaaagtgtatttttaaacatttctaggctgaccacatattactttctccccagctgtctcctttccatagctacgcaagcccttgcctacttggcagttgttagtatggtcatcactaagcgtgatcactaaatgtgcctcaggaagctggagaactgtgggctgctcaccgccatgcggtgctgcttccgaagctgcttcacccggatctggtccatgttggcggcgacgtcccgctcgggctgatccaagtcctctgcgtatctctgcaccagggcttcaggaatcccacagcggccatgctgccagggagaacaggaatatgacatcaagagtcataaggattttgtttttctttccctaagatacaccacatataacgtagggtctcactgtcacttagactggagtgcagtggtgtgatcatggctcactgcagcctcaaactcctgggctcaagcgatcttctcgccttggcctcccaaagtgttgggattccaggcgtaagccaccacacccaacccaaaagtttgaatttgaaatgaatatattttctttattggtcaggatgaatgctttagagggaatacttttacatctttatcttaaagtactgatgagctctaggaaaatgttctgaagcatagttaaggcagaacacaattattccacatttttcaggacaatgccttcgcctcaatcagatcattttgcaaaatacaactcctctaatgttactgaagagagtcttctaaactgcaggagagaagggctaacttctgctttacagatattcaactgtttgcactttatctgctacaagtgataccaccagctcactaggccagcatttactgtatggtctttctcactacctttcatttaaagacattcactcaggaaatatcaaggagggtcagagaggtggaggaggatctgattctaaggcattcattgtcatgagaattttataataaaggactctcaggaatgcatcctaataggacctgtatttccaggagtaaagtactgctgtatctgttagcattgctttgtctttggagtcacttggtattggtagatctcattttttttgaatgagaaataatttttcattatacagctaaatgtttttggtacaatgggggattttatattatctttttcccattacccatacagataactgtataatacaattatcacatctgaatagggttcttttgtccacatttattttatttgctcctagtaatccctctaagaggtcttcatgcaggttatttttaacctcggtttacctacggagagatgaaatggggtggtgtcaatatctgaacacatgcatgtcaagtaaggtgtggacacgtggattcaggtgtctcctgtccactgggcgggctaccgggctggcttcagatgtgggttcatctcacctggctgcctgacttctacaaacaaaggcctgtgaacgtggtgggcccaggacctttgataccttatcagaatacggctcctccgtgagatcgatgccttcagcgtgcagcttgttttcagtgagcgtttctagatccactccccgggcacaggagaccttcctggtcaaagccgggcccagcttcacaccgtgctcctggaggcttgtgttctcggggagctctgagagccaggggggcggccttgtgcttggtgggctgccaggcgcctgccctgagagaggcctgggagccagtgctgggggacagtcgctagggctggtggggctggcggggctgccccttttcactggcaggcatggcgcatcgggactggggagggccccactggggcccatgggaacagggtggagtccgttagcaaggcgttctctgctctttttggcaggaacaggtggaggctgtgatggaattttgggctgcattctctgctcagcatctaccccttctttggtgcccaggggatggtgtgttccttcaaactcgtgtccttttctgtggccctccagaggcgtccttgctaaaccgtgtttagctccaggaggctgagcatcatagtttctgggcaaacactgagggggtgacaggccgcgaccagaggctgcgattgagccctccagtttcttagttgtcaatttctgaggttcagaaaatctcttgctttgggtcagtagcaatgcattgtcgacagcagagtcttgctccaggggctgggccttcgtggaagaggcggtcgtcttctgtggcacttcaggtacaatctgagggggcggttctgtcacctcggtaggcacgtcttgctcagcaccaggctccacttgaaggtcatccagggaatgggatcggggccaagtgtccacagtctgggggccctccagggtctcacagctccggcagatggaaactgggaggcttcttcggtttttattcaaaccagtcacaccaggtgggtcacagctcttggacgtgtctggggcaaggccaccacccagcctgccctcctcctgtccctgcttcagtgcatcccctgatttcattaaaggcaatgttgggtaattgcccaactggtttctgctaaaagacttcaagctgggctcggtggatgacttggcagataggaggctagctttccgagtcttgcctgtgagacaagggaatattttacaatcacattttaaaagcaaatcaatcaaacggatgcataaagttgtgctaacataattgaaatctccaacacccacatcctattgttcaattacactaaaaacataaaatcaccatttatgacatcgggtgatagagggttattatggttccatttttatttttagaaagaattcttagtcttattaaaggaatcatgaagactgaaattaattgggttacatgggaaagaaatacgctgtgtcaagcagtaaaataaatcttggcttaagtctgtgccccactgcaatcgacgtggaaagaggctgatcatcataccgcatattgatgagatttgttgggtgagtacaatttctcaaggtcatgatggaaaaggagagctggactgaatttcacaacaggttctataaatggtatcccctacagagtgatctgtgaatactcaaatcccaccttccctgaagcccctccttctagtaagtttatcctagaagcaatcaaccaacctggacacagacaggtaaacttttgtgagtactttgccaaagaaaatctacaaaatactgataaagttttaggtcccagcaaagcaacagtcctagttacaactgccagactgataactgaactatcaaccagacataatctacttatctgacgactggtagttgatactaaactgctgctgttggataagctttgccaagaacttacaattcatgggccagacaatgtgctgaatgctttgttctcatcagtacttacatgtgcgcgcgcacacacacacacacacacacacacacactgtcccttgttacatttttggttgataacatgtttgttgtgtgctttgaccctgtccacctgtatgttccacactgataaacaccaacatgctatgcatttgtaggatattattgttgttacataaagatcatcagcctagtgctactactgaagatattgaccatggtcctacttttcattattagaaaaatcatcacaacttaaggaggccaaggcaggtggatcacgaggtcaggagatcgagaccatcctggctaacacggtgaaaccccgtctctcataaaaaatataaaaaattagccgggcatggtggcaggcgcctgtagtcccagctactcgggaggctgaggcgggagaatggcatgaacccgggaggtggaccttgcagtgagccaagatcgcgccactgcactccagcctgggcgacagagcgagactccgcctcataaaaagaaaagaaaaatcatcacagataaatgaagaaatacctcttcagaaaaaaaaaattgcatcagattttaaaagtgggttgaaatagaaaattattagaacctctttagcataaatttagaaatatgactttcttttcccttaactcccaatataaaactatatatataagttccatttttgcattctgcattacattagaaagatccctgaacttactttgagttcaaagtatggttcgctagcaatctagttcttcagcaggtacacctgaattcatttgggcatgaaaaattctgccagtgatatctgtgagatccttaccaatcaccaacagttgggggaattaatttcctgaaaagttttggatatgaaaaggttattaagagaaaaaaaaattcttcagaacctacatgagctacataaggattctgatgtttactgaaactgaggatgtactgggatactaggtgagttttgcatcctgtcttgaccgaggctatctgaatattatatatagtttggggagaactactatcttcccaagttgatagaaaaccttgaatagcagggcatcatggctcaaattctgaggtccccaagatgcttcttagaattggaattagagtgaggcaaacaaggtgcccagaggacaaactctaaggaggtgaatgcccagagtcatgtgagtgcagggctggtacccgagagtgagcacttgcttagggtttgcatcctggacacccactttcctgtccttagccctagttttggtacccacaatggctctcaaactattttttcccatgattcccagtaagaaatacattttacattcaacatgtagtacacagagacacacatgcatgtacacaagcacaaacacacacacagacataactgaaacaaggattacaagtgacagtgctaacaatactaacctttatcttaggggatgctctctgatattttgtattctattttgtcttacaaaactgctgtccatgacccactaaactgctttcatgacctactaataaagtacaacctgcattaagttttaaaaaagtttgctttagtaggtgctcagtaaatatcttaacacatgggctactagataggattccaatggctgctaaaagctatcaaacctgggcattttttatgacggccttcaagagtttgacagagatttaggtcactgtggcagcgtaagcctcttaccactgtttctcatcttgctacaatgggaattctggggtcacaacaggaaaccacaaagccatccatggtaacgtttagcccacctgaccccataccacttaagactcctcttctgtttgagacaagtaccttttctgaaatttcatactgattacacttcctgactggctgtacagagaggccacaaacaagacatgtggccatccaatccttctctcctgcagtaactgcctcgacattcaggccatgcagccgaggcatttaagacactgctgctggtatgaccctgatggatggtctacctggtaaactgttttccttatggacctaatagctcccaacactccaatgttggtttttattgcatacagaaaagggcataggagacacacaatttaggttttacagctgcaggtatttgacacagaatttattaacctcacccagcagccaggagaatagatagggaggctaacttggactagaatggtgtagaggtgagaaaggaaacgatgattgctgagttcatgacaggaatagaatcgtccttttgcagaaaactgtgctttgaaatcagtacttgtcaaagcaggttcccagcgactcatgctgacattaccgttttccaggttctcactgctttcgtagcatcctgagtctcggggtgagcatccactcaggccctggctgtcaacgagcagcttctcctgggatcctgactggtcgctgttacctagaggagagaacacggcatgaaatcaacaaggtgagtgaaaagcagaggtttcagagtcaacagatctcgactttatcctcagttactgccctgagcttttggaagagaacaatttatcttaaaatagatgagatcaaaatgaactagtgtgatcacaacttttcttccaataaggtattcatcgcacgaagataagtttggagagagcacacagttggaatatgttgacaccttttaagttagttatgcgaacagaagctgactctggccttggggctatgaggaaaggagaaaggtagagtgttgttttggcagtggggctcccagacccttctgagtgatggcaccatcaaggagaagcaaagaaagaataaacgccccattcacaaggtgagattaggtcatatgtttttcggagatctgtaagacttgtgcttgaagacagttatgttgccaactttccaaatttgggagctaatattaaagtgtcaaatgaaataaattttattagcatttaggagcattcttagccctcagcaacacgtgctgagggctcttgtattagctcagcaagagtaaggctggcaagacgaggcacaaaccccaaaactcaggacaggccagtggcaaatcttcttttgtttttgttgtttgggatgagttagaggttgttttttcttttctgcttctccttttgtcttgtgccagcacatttttgtctcctgcatataagtaaaagctggggaaagcttaggaaaccctcgaacttggaagctgagtaacagatacatgcttgctggtatagataaatggatgactgaaaactgaatgtcctcattctgagtggataaagaaaatgcagtacctatacaccatggagtactacttggccatgaaaaggaaagaaataatgtctttgcagcaatttggatggacctggaggccattattctaagtgaagtaacacaggagtagaaaaccaaaatccacacggtctcacttgtaagtaggagctaagctataagcacataaaggcatacaaagtgatataatggacttcagagagtcagaagaggaagggtggggggagtctagggataaaaaaactacacattaggtacaatgtatactactcagatgatgggtgcactaaaatctcagaattcaccactatataattcatccatgtaacccaaaaccacttatacccccaaagctactgaaataaataaaaaataaaataaagaaaaaaaaaggaagacctcattctgaggaaggcttttaaagagaagcatcattatttgtcaactgtgcctcaacaaagctggaggggaaaaaaaaaaaaaagcagcatcggacgcttctgttgagtgaatctgccccaagtaaatcacgtggaaagccacgagggccttcaacaccctagcagcatcacccggcatgttgtagaaagggcacatggagccttacatgggacactgaggttacacgcagaacatctttgcattattatgcagagtaagtaagtgcttggtcacataaaacagaaaccaagaaaacattttctacacaaaatagctagttgcaatgatgaatggctttattttcctttcttttcatcccccaccaacttccccactccaaccacatacacaaagaaaaaaagaaatcaataagccagaaatgtgatgccttttctcaggtcatcaaaataaaaatgcggggaggcagaaggctctggcagctctccggctgtccaccacttcctgcttgcatttctcacggggaaagcattttacagccccaactacagcagagatcgtggcagcgtaagtccctcaattagaatcccaaattaagagtgctacttttaaagtgactaatgaaaaattaactaattggaagcacaagagcaaatactgtccccctgaccacctaaaagtggaacattctagagcggtgtcctcactgtgtggaagagcctgtggctttgcagtggcctttgttctggcctagcatgttatttagaaaaatgatacttataaaatgagggctttgtgctatccattacaacccagggagaggagtcggtgtactctgtccctggtgacatggttcagtgcaccacagtggccaaaacagactccagagtgctgggtgggagtaacacagaagacctgctcctactgcagcatggaagtatgtgctgtgcctgcatctttggggaccccagcctcagcagacacagcagaatacctgaaattattttggagaaggaggggatccattgtgtcacctgaaaaccacagttggcgtaaggaagggggctagaatcgctgtcttcattagggagaagagaaaaagaggtgaggtgcctctcctctgtagtgcagaatcaagaccatgaccttttcccacacttgtcagcgtgggtgccaaggtacaaaaggtaagaaggaagataagctagaacgctgaaaattctcacagtcaaatcacagcaaagtgctaggttgtgaggctgtaaccccatttgagcatgacctgaactttgacctgaagggactctgcttgggctaagctctctctgcctccagcctcaccaaccacacacacacacacacacacacacacacacacacacacacacacacacacacacagaatatgctaagacacctatgaatattccaacatcaaaaggtagtggtacccaaaggcacatagcattgcctggggagcagttaccttgggaaagaagagaagggaatgggattctttgaaagcaggactttctgtgggcttacaccatatttcttaaaatgtaaaagaaataagaaaatatggcaaaacattaacttcagcatgtgcatgcatatgtttgtttgttttcttttcctctgtacttttctgcatgtttgaaataattcctaattagaattcttatacaagttattgtttatacttagaaatggctaagacagtaaactttagattatctgtattttaccacaagtaaaaattcttttagcaatttgtaagaggctttcatttgccagacctaagatagtgggtctgggcttggcgtaaggaatagccatctgacaattagagtcttttcccaatggaaccctatatgatggctggcattttcccacgcttcgagggaggctggacgggtctgacttccaagtagtgctggaaatgtactttttgctctcagttatggctaagctagaaacctttcaagatccctacatatcttcaaagatctcaatagacctctgcatctccctagtgtatggaaatcttgtttgacagaaacctatcatgttatcagttagaggcactacttcttagccacgatgactttaactgtattggatgtaaaaatcctataatgctaggaaaagtctggaccctgactcttggcactaatgggtactctggaaccttgaagcctttgttttagaaccaataaaaggaagtacaactttatctatcagggacgttctaaacaccagagcagaatagatccacaatggaatgtctgaagaggcaaagaggtcttcttcaccttccaggttagcaacctgatggatagcgataccctcctacaaaatgctccttggtacaaaaatctcaggatgtgatcccaggaggaatgatgggtctcagccaaagtggcatggagcagtctaagcacagattcctgccttacactcaggagttagcttttctcctccaaagctgtggatgataaaggaaatgtcatggagagtatatataaaccagctgttggttggatgcagtggctcacacctgtaatcccagcactttgggaggccgaggtgggcggatcacctgaggtcaggagtttgaggccagcttggccatcatggtgaaaccccgtctctactaaaaatacacaaattagccatgcgtagtggtgcatgcctgtaatcccagctactcgggaggctgaggcaggagaattgcttgaacccgggaggcggaggttgcggtgaaccaagatcgcaccactgcactccagcttgggcaacgagagtgaaattctgtctcaaaaacaaaacaaaataaaacaaaacaaaacaaaaaccccagctgttcttggtgactgaggaagagcaagtgagctgtttctgggcagatgtggttcgggacaatagatgctttaatactgattcatactaattgagctggtaggctacaccagttaccgtgcaggctctttacacgcaacctggccacagaccccaaagtgtctcttgggcaatcaaatacttacttaaaagaccttgttataaagtgatattaactatgaatcacaattgcctccaaatctatcccaaatctatccctaaaggcagcctgtttatcttaggctcagacatctatctgatggtgtgtgtttctctagcttaccagttcatttagagggactgcctatttagcagaagggaatttcacctaatgacacttgcttccacgtttctcaggcctgatacatttcagtaatgtataattcttttttccaccattaaccatggttttggtgtgtcttttagcaacagaaatgctattagctactgatatccctgaagcagagtccttgaaggaaaacgtgtttgaattcagtaactggaaaggatactcctttaagatgaatgatttcaggaatatttctgatggcagattgaataatacagagcaagataagactgagttaatggagcaaagggtatggtgtattcaaatagacagacttcataaaagctgtgagctcagtgatgattctgctcacaggctgtaaaaataagctgtcatttaggttgggaatttgcaagccaatcgatacggaattctctgctctacatattcactgcggagagacgtctcctcctttaacgaaagctgatgaatttcatttattcactaaccagtctattcaataagaacacaactcctcgtgtgctctgagaagtaatcaagctttggctgagcgaaaacctcccagctggtcagtcacttttgtgctcagctgtcccaatggcctgctggaggctgcacctctcaaaagtactgaaagtggagtctacccatttttttgggaaaactgtaattccattcttgcagacacttggtgcagaatcctcttcaactatcacctagaaacatgcccggaaaggtggcggcggcacaggaggttttcttttgttcccatgtctgcactgggaatttatgattttgtgctgtttgaccttggcatgggaaagaacaggacagaataagtgactccagggacctaagcacatactggcagcgtaggtggggcctgctgtggcagacctcacagggaacacctctgtgcgtacagggacttactgtcatactcttgtaacagaaagaacaggacagaataagtgactccagggacctaagcacatactggcagcatacgtggggcctgctgtggcagacctcacagggaacacctctgtgcatacagggacttactgtcatactcttgtaacagctccactgctgtcaagagaacagctctgtgttccgggtccctgatatttaactcatccaagtcttcctcctccagcagcttaaaggtgtccaaatcttcatatccattgaacaggaaagtgggcatgtgctcctgtgagagggagaaggaagacagaagggtgtcagccagcccagacacatgataacaccgccaacaactagcctgcaacccacacactgttcccatagtcaccttcaggctaatcaaaagattagtaagtatcatttgcaatggatcctgtacatcccagccctctggcttagtaggcaagcagggtgttttattaatcatgggttaggaagatgtacattgcaggctgtgatggattctgctggcttgcactataattgtactcttgataagagctaattcctttacctccacagagcccacaacagaggagactcctcctccacttacagagctattaaaatccagcttttaagtcctcaggatcaagagttttgcaaagaggaaacataatctctcattgcagactcatgctagtagatgcctggagtgatggtgggagagaggtgggcgcagagtttccttgtggcccctgtggagctagctgcgatcaaggtgccaggagtttctgcctacagctcttccagcagcaaggtttgacccggggcttacgctatcacccacagctgaggtcaagggcagtgttggaaaactggtaactaactaactctttctgtagaataatgaatgctcatcatagtaacgagctgcccttattggaccacacagatcagccccaaccctaccctaaaaatgccctcacttgcttagtgtaggagagaaaaaggcagtgaggtagtagcgtgtgacaagaatcagaagcgactgacttttaggttaatccgatccaggagatcctccacagacttgggctggggtggtcgtcctttccgacgcctcctggtggggcgtttgggtttctcctcgtcttcactgagcacgtccacgtagatgaacttgaacgtgccgactttgttgttcagcaggcccatccaggtccccatgggtggcttgctgattatatcgatgatatctcctttctgtggcccagggagcaaagatctttccattaggtacattccatgaacgtacaaatcaagaatctgtcagatacacaggtcatgcagaagtgaagatgccacaaaggccagaatcggggtcccacaagtcacccctctgagtgacctgcataggatgtgactgtgagctccgcagaggccagacaggtgtctctgactgtacggaattccacgcaggcccccggtcacagcccctccaccctcctgccctgcagaaccaggggtgcctggggtacccctggtgctctcagccaggctgcccgcccggcactctgaacgccttccctcctcagagggctcccacttcttagaggaggcacttcccacctgtcctaaccagtggcaatcccggccctgtcatggctgcacacactttgtggaaccccatctgtcccataaaggtacctctgagcacacagaaggcagaaatctttcttcagatggagaaaacacagaaaccaggtgtgtggagcaggagccaggtggggagagggagggtgtgcaacaggaattctagagggaagctgaggtcagaggggtgaagtgatgctaacccagggattaacacgagaccctccctctgcctcgagggctggctggttcttgttctgtttttcactacagaggagaccagtgatcgaggtagccaagatactgtccagtctgtaccatagtagcccagcattcaacagtgaggaggaaagaaagcctcctagagaaatggaagagcccagttagctgctctgaggccagggagagagataccttgagcttgagtgagtctgtgtcatagggactgggggtgaagtcggtgtgcaccctggcacgcccgcagaacgggcctcggtaaggcggctcttcgtcatccccatcttccgacttgacgctttcccggttgctggttgaggaatcagtggtgctcactgtttgaccgcctgtacaggaaacataggaagaacacgggtagatccagatttcccacccagcaaagcagaaaggtattgaaggtatggcagattaggaaatgaaggcccagagaaaggaagccttgagccacaaccctctgtcaggaccagggcagggcccagttatgaattctccgagtgctatccctcagctcctcagtggacaggggactcacagcaagttaccctcatgacctgggaatccatgtggcacggaggatcccgcgtggaggacactgcagggccaggcaccagactctgctcttaacattcgtgacctctcagtggtaatgcacactctctctaaccattttacagatgaggaaacaaattcagagcagtcatgtcatttgcccaaaagggtaagaaagagcttaaagtggtaggtttaaacttgatctcggggcacggtggctcacgcctataatcccagcactttaggaggccgaggtgggcagatcgcttgagtccaggagttccaccagcctgggctacatggcaaaaccccgtctctacaacaaaattagccgggtgtggtggcatgaccctgtagtacagctatgcggaaggctgaggcaggaggatcccttgagccagggaggtgaaggttgcagtgagctgagatcacaacactgcactccagcctgggagacagtgagactccatctcaaaaataaaaataaaaataaaataaagttgatcttttccttcataccattcagccaactccaactaccattggcccgaatttatcagtcacatataaaattcccctcccttccccactccctttattttgctggtcatcttcatgtgcttgtctccctggcttattccccctgctctctagatccttcctctgagatgctttccctattgtctccgatcaaaattcatcacctcctgttttgggctgctgctgctgcatgtctactaataaacaaacacgactctgagtccagagagtttattggtctgattctctaatagcacctgaagggcaggacttggtcttattcaccttgaaattgcctgaacctagtgctcagtatatgtcagatattaactccaaagaaaataatctacaatgacaaactcgacttactcatggagctctgcccactgagagaactgcgaagactttctacagaacccccggccttgagcttgggcttgtccaagtgttcggggtcgggctgtgaaggcggaggggagccaggcattccatcaaggcccgagtcctgccatgggtttcaacaaaatgaagaagttcatcagagtggacaggtgttgttttgtaattctcagcgacttggccttcaacgaaatcaatcaaatcaatctatacctatatttgattctataaccaatattctcctcctcttaaacttacatcctcgcttacttttaaagtcgtggccaatgtcactatttattaagcactcaaatactatttctcattctcgaatagatattcttggaatctccaagaaaaaaaaaatctgtctaccacacagacaaaatacttaaaggtttagagactcagcatacgcaaaagcccagtagcaaggctggacttcaaatgtagatcaagtacaatccatgattactagaatacctggaagtgtagtcagaggatatttaatctacttggataggaaacatgcacttttaaaaaagtgtattcctggaaaaaaaaaattggctagattcttatatttctatttgtacaaattattggcattggataaggaaacatgaatttaaaacccacatatacagcaaacatactattttccagtctaccataaaatttccatatgttactctaaagttttagcttctttcacttttctaaagtgttgtcagtaaaaagctgggaaatctctttcacaccagaatcctgatgggagtgactcagcagtacttcctgcattttgagtagctaagtattatcctctcagcggctcctcatttgcacatttgagtatagcatgcttatttgattcgtggtgctacatcaatagacgatatcacacttcagaaagtttgcagtgagaattgtttacttgccaaaatagaaaagtctctggcatattacatatggccgcagccacacgggctcaaaaccagctaaaatgaaacctgctatttgcatgctgccgagtcatcagaagggccttaacacagctccgcaggtcctgcaaacatctgaggacatcagcaacagcagcttctgatccaacacacattagtgctttcaatgtgaggaaagtgagcaagcgacctcaaaaacaacaaagaaaactagagctgacattattaggaagttactgaagctccaaagtatgaattccttaaaaaaaaaaaattcattcctcctttctgcgtcataaaataagtaacttttttcccattaaaatcttctgtaatgcttctgaaaaaagcacgcagtttgaaaaacagcaatagtaaatgtgggtctctgatatattttcaaatgctttaaaaaattattaatttattcatcacatgtttatgaattacctacaataacaggcactaatccaggtattgggcatatagcagcaacggagaaaacaaatatccctaccataatggttggtatatttactaaaaagtttttttaaaaaaacacacaaggtgggcgcagtggctcatgcctgtaatcccagcactctgggaggctgaggtgggtggctcacgaggtcaggagttcgagaccagcctggccaacgtagtgaaaccccatctctactaaaaatacaataattagccgggtatggtggcacgtgcctgtagtcccagctactcaagaggctgaggtgggagaatcgcttgaacccaggaggcagaggttgcagtaagccgaggccacaccattgcactccagcctgggtgacagagtgacactccgtctcaaaacaaaaacaaaaacaaaaaaaaaacaaccacataaaaccttccattatttttgctttacagaaaatttataatgatcagttgtttcttttattccttaacttatgtgaaatggctgctttaaaaaaacagaactaagcacataagattgctatatggtagtaaaattattgaaaaatgccaaaatgacattaaaattctatgcttctgattcataaagcagaaaacctctgtgaacgtaaagcttaagagttttagtggctgtttcaatctatcttggggaaaagcaaacttaataaaatgctttcaattagtagcatgctctcactagcatgctgactgcttcattgctgggaagaaatatagaatcactatcactccgtcacccacaaggacaagagaatgaaaagaataaagaaaaaaaatcatggataagacatgctgaaggcagtccagacatctatctcctgcaggtctaacaagccacggtttctcagcctgagcactgatcattttgatggacagctctttgctgtgcagaccgtcctgtgcatgctaagatgtttggcagcgtccctggcctctatcctctagatcagcattctccaactcccgggccacggaccagaacccgtctgtggcctgttaagaagtgggccgtacagcaggaggtgagtggcgggtgagcaggccaagcttcatctgttttcacagccactctccattacccgcattactgtctgagctccacctcctgtcagatcagcggcggtattagattctcgtaggagcacgaatcctattgtgaattgtgcacacgaggcatctaggttgcacgctgtttatgagaatctaatgcctgatgatctgtcactgtctcccatcatccccagatgggatcatctagttgcaggaaaacaagctcagggctcccactgattctacattatggtgagttgtataattatttcattatatattacaatgtaataacaatagaaatgaagtgaacaataaatgtaatgcatgtgaatcatcctgaaaccaccacctacaccagctccgtggaaaaattgccttccacgaaaccagtccctggtgcaaaaagattgggcactgctgccctagatgccagcaatatccactccacttcacctcaacccagtctgaccattgaaagacattgccctggagtccatgggggagcaaaatgatagcctctcaccccttccccgtgagaaccactgtaatcaactgaagctgctgtgcaggctttgtttgaatcaagtgaggtgggtggcaggctggtgacgttcggtcattcgcataggggcgatgcttggttttagctcactgtgcccaccagagagcagcagctgagcaaaaatgtctgcttttcctgctgtttttatttggtagataaagtgcattacctacatatttcaagcagacaaccagctcatacacaggaacttcaacaggctacaaaatgagtgctatacaggtgctggaggagagtgtcttgaaaattgaatggtcataattaccttgaggcccagctctccaactatctttactccctccacccatgcaatttagacagaaacagtcatttctctagcaatgaaattatagatccaggggggaaaaatcaattctatgataccttccttcatggctacagataaggcaaatgagggaaaacacccctctctgaaacattattaccaaagcctggtacccaggaagaactttgagtttatttcttagactggctatgtgcttctagaacaacttatgctatgatcgacaagtctactgccacccccccccccaaaaaaaaaaagctttaggtttgattcaggtaacatccattttgtagcaaggcatagtttagaaaataaaatccttcctttgtattcaaatttacaacgcttagtgcactgaagaataaccatttctttacatgtctgtctctcttgtctgtacacagaaggcaagttctgtattttgtattcccagcaccaagcacggtgctgagcagcccaaagtgcttaataaacgtgtgttgaattcagtgtttctctacgtaaataaagcacggacttggagcaggttaatgccaaggagtatgtgtatttagcaccatttaaaatctcagaagggccattctcagcttttcttgtcaggaagaaccaagggaacattctaccaggtagctgcatacctgctcagagacagagctgctgtattttttagacattctctttctcatcgtctctttcactgatttcacctttttcccaagagagatgcgagaggcagtaggtgatttgatgacttctttgtacacaaagtctccttctttaccctgtaaaacaaaatgttgcaagtattgttggtcgcagaaaatgaagaacaggttttattatttaaaccattaacatcctagctctcagaaatattgacattcctcatggatcttgacgtttttcttgtgttaactcagtgctattatttatctctttgattaaaaattaaagcttattgactatttttgtttgcttaaagtgggatgtgagtcactttttattttacttacttttagtacattcttatcaggttacattttttccactatttttaacatccaagggggctgcatttcatcagtaaagagtgatttacctttgggaggctgaggcaggtggatcacgaggtcaggagatcgagaccatcctgactaacacggtgaaaccccgtctctactaaaaatacaaaaaattagctgggcgtggtggtgggcgtctgtagtcccagctactcaggaagctgaggcaggagaatggtgtgaatccgggaggtggagcttgcagtgagctgagatcgcgtcactgcactccagcctgggcgacagagtgagactccctctcagagggaaaaaaaaaaaaaaaaagtgatttacatgaaccaatgttcatgtaatcccagcaatgggggagaatagagggataatactaccgaattgcctggagaaagagattagaacaaatggtgaaagctcagtcgttagaagagcaacatctgattggatttccatcaccatagcactcagtgtgtaaatttctctctcttaaagagctagattgtggtcatctctcattctagtctgcatttttttaaaaaacaaacttctccctgagaaagaaaaaaatcatattttctctcatttctaaaaaagattgacagcagaaaactattggcttaagaatcaatataattcgatagccaaataaaatagtttaattctcttccaggaaattttcaaaacatttcatatatatcccaggtgggtattttagctgacccatgatcataacaaatatgaaacatgaaatcttcattttacagttttatgacacaatgcaaaggacaagctaaactacatgtaagactcaccaaaggccgggcgcgtggctcacacctgtaatcccagcactctgggaggccaagatgggcggatcacaaggtcaggagttcaagaccagcctggccaacatggagaaaccccatctctactaaaaatacacaaattctctgggcatggtggcgtgcacctgtaatcctagccagtcgggaggctgaggcaggagaattgcttaactgggatctgggaggcagaagttgcagtgaggcaagattgtgccactacactccagtctgggctacagagcgagactccatcttaaaaaaaaaaaaaaaaaaaaaaaaaaaaaagactcaccttcacccttggggtctgagaaagcaaatttcaggaaacaaaacttgtgtgccactgtggtggcctgtccctagactatgaccccaaagcaggtctgagagggcagacacctgggcctgacaccagacccctgagggatctggtctgctttggtcccacagagactgggttcattccaggacaccccagaccacaaaatcctaggcttagtataggccatgtggggccaggtactgggcccataataagactggtgttccaaaatgccagcacatactcttggggaccaaatcacagggctccacttcatggcactatgtgtgtgtagtagttacatgcttgcaactagcaagaagaaaaggccgtgtgcaaaatgactcagaccacagaggccagacttatctggatttgttacttgaagaaaactggaagcaaaggcattaaaggaactgtgctactcaaggaaggagatggcagtgagagtggtcatcattcattccacgtggaacagtggagtctgtaaggcaagtgaaatagagcttttttccaaacgtgactcaggattaccaaggaaaacggtacccagtatcaattctcaaagatactcaatggtgaactattgtcaacctcatcgcctgaatccatattttttgctttcctctgatgttactcaccattgggtcagaattattactgccaacgtgcagagagcgattcgtcaagtcaaatcctccaaaactgcaggttctctgtggaaaagagggtagggcagaaaaacttcagttatgcttaagccagccggcagtgcaccaacccagcagtccccgtttgcaggacatctctgaatcacaaatacgtggacaggatgaaagtagaaaacgagaaatgatgagaaaaaaacacatgagtcatgtcgtaaggaaacttcactcatttttccctttcacaggccactggaactctgcctaccccagaggtctagaatccccttaacatgcaaaaaccaaccattttttttaaaaagcctaaaaaacaaaagaaaaaccctccatgagtccagtgctgtgagattccctgtctccagcacagaacttcccctaacatcagctacattcagtagagataatgaagggatatgtgttagaggatccatgtactcaggcatcctgaaaacccaggtttgaaatcccacggctctgacaccaacagcaagcttttcaaacagactttcattttgtttagctttaaatcgctgagaagagggggggagaaggttatgtttacagttgtccaatcaggccaagagaattactcactcaccgcttccccatcctagccaaaaacgctggtaactttcccatcgaactgcccaagttaattcatggtgacccttttctctcagtgaatgaagatgccacatttgcccagaaagaaaacggttgattcagtgactgtgtttgaccacactttttaatttcagtaggaacaatgctgatgttataaagaatgaaaactttattatccttttaggtggttgcaaacttcacggaactgcttatatcttagtgatttctgtatttgcagaacttgattcaaattcactgttgtttttctagtaaaagccactgagtgaccgccctgtgccccacaacacacattaatgttacagctaattatcttttttaaaaatcagtaataaaagtttaattgtagattcgggcttcaatattttgtattaccagcttctcagagaagtctaatgaacagctattaaatggaagaaatgaacagaaaagtacaatgtattaggttggtgcaaaagtaatcgcagttttgccattattttcaatggtaaaaactgcgattacttttgcaccaacctaatatactataagcattgcttattcattaaaaaaaatatatatatccccccgtgtgtgtaaaaaattttttacacacattagaaacatcctagaaggaaaatgcctacatttttgaaatcacagaaatctagatgcaaatcctggttctgccacttacttgctgtgtgatctcaggtaaagtacttacactctctgagctttagattcttcattattaaaataatacttatatcatatttgaagccttctagcgcactgcctggcacaaggcagacactctatgaatgctggtttcttccactacttttcattaaggctgtactgagaatgtggtagtcatcctgacagctgttatactgaagttgaggcttagttaacattacaaatatgcaaatacagggctggagctttgttctgggccttacaatctaatctgggagttcaactataaaatcagagcataccaggaatgggccacaaagtgagagacggccattggggtctggagagggccaggagataaggaaagcatttcgtgacaactgacatcaggaggtctcagagctgttcttattcaccgatgctgctgctgctgctgctactaccgacttgttttctaatagacattatcctaattctgtattaaatatcaatgggcaatctgatttctcttatcgtcagcttaactggacctatatctattctatagaaagagaaaaacctttctacacaaatatattcaccaaatcacctaactgggtaagcaatgttatgaccacctctcaaggctaatttttaacattaaccttctctttccagcttataatgccatgtacatttcctccttcttgcaaaagcagtgattttattctagttcctttcccgtgactcagggcttcacagacatggtatggcacccagatgcctcatcattgtatggcttttgcacgtccctgctttaaaccacagcatctactgcaatgttggagcccaagttatttctgatacatatgaaataagtgacaaagaatttatgtggaaattatgactgcaataaattagaatctcatttaagttttcacatgcctattgtatgcatttatttctaaaatgaaaaactgaaagaatggaccagttttcttaactaccaactaaaacctctttcagtgataggctaagatatctggaattgattcttttttacagtggaggagtgacaaagaatataacaataaagattgcttgaattaatttctaactttttctataagatcaagtagttctttaaacagcattccttcaaaagagaaaatggactgtaaagagactcataaaaaataaatcaatacatgaaccagcccttgacgttgatgacctaaataaatgaagcctaaatgaagtttttttagttcacacacttcctgtactgaaaattataaaaacactttagatagatgcttgggatgaggagggctagtcaatggaatggccatgcagttggaaacacatgttttggggttgaattcaaaaatggacaaaattgcaaaatgtcatgcatgtctgttctctcaaacaaaaattgaatgaccaaataaaatacgagacaagtgaccacttccagtggatacaaagcattatcatttccctgaggcttcatcaagcaaatatggcattttcgaaagacaaagagcttgaggttgaagaataaaggaaacttttagataaaatgaaagaaatatgacaaggagaatggaaaataaccttttaaataaatctagcaaagaaataagattaatccctttttaaaaaagttctttctattgtaagatgatagaacacttatttacattctctggataattagaaagttaaatttgtttgattgtacaactgtactacaagaaaaggaatatgcaaatatataacttcctactgaacacatatttttgcaagtgttcaaactgtccattagtgtctcaagctcacagtattttaaaaatactcagcctcagactgatacttgggatagggattacacaggagcacgttaggtgggggcggtgcctggagatgagcttgcccaaatgtccatactcaatgtcaatgaagaattaatcactggcctacaacactaactagcacaaatcccagaaatataacttctagagacaaggccctcatggagttatagtattaatctgacagtaaataacatgagaggcacatcaacaattcaaggtgctcagattgggaaatttctcagtattacatgatgtaaactcacagaggtgagtcatcaattaacagaagaagtgcgtctgttctatcaaggtcatgtcaaaacatacaagagcagatgaattgggtagaacacttctgaaagtaaaaaataaatacataaaactaagactggttatttttcaaaatatctgtgagtcagagcaaaccagaggctgaatgagtgagaaagagaattgttattttaaaacaaaaactcaaccattgaaaaactgttgccatgatacagaaagagccagaagaaaagttcctgctacatactagtagtattaaaagtgctgcaagaattacatgaatatgaaaggacagaaaataaggaaagtcaacatgtggaaatatgtggaaaacccaggggctaggaaggacctaaggattcttttacaacagagaaggtcgttttaagaatggcattgaccaatccgtcttcactttcacaaaagcagaacccgactgaatgaatttaaattacactgatcgtctggggaagaacatcctgttcatgaacgggaaggccccctgggaaaaccactattgaaggacactctattctttcaggtctttaaaagggcccacagccaactgtcctgagcagatcaagcaaggtgccaggtgacagagggccaagaaatctacttcctcactttgcaccattttatatgtgccactgtgcaaactaaaagttaggtgggaatttcagaaggaaaaatatctatattctgaagttcaaagtaagtcatgccttgaaaataaatcttactaggtctctgatcatccagcgttaaaagtgaaaaacatcctactctttgaaagtgagtactttattccttgctgagtacagaagaatctataggctaggggaaggcatttccaaatgttgatttgtttataaagataagaacatggaatagacttaagtaaaacaaaaaagctcccatttttgttgttagatttacgaactttctgcttgcctctactaataaaataaatgtgctttaaaatgttttcaaatcaccaaattggtgactgtgatgacggcagtttttccatgagcctgctcctattgttttaattttaaaaccaagagcaagcatctctttcaagggtgaaatgcccttctgttttgaatcagcttctttgaggtcaagtgacataatggccgagaatcaagacagccactcctggaggcggccaaaccccacccctgtaccctggaagcccctctctggattagcttcaatgcttattttaatgggcactcaaacagcttcatctgacaagaggagaaatggaagagaaggtgaaagctgcctggaagtgaaagcaggatttgaaattgaaggtgatggtgggatgtgccctgacgtcatgagcaggagagaggggaggaagccggtccccgcagaagaaaggccataatgcttgactgcacatcacagaaatgacaaggccgtcctcaggaccatctttgtgactcacagacttctggtggattctcaagagaacccttttagtacagcggtcgaccgtggcggcccacttcctctttgcctcctcatcctcctccagcaggcaccgcctcaggtcctgtctctcagccttgctcagggtcctgtctgaggcaggccgcactagctgggtcaggttcaggtggctgtacaggctccgctccaccacgtaggtgatattgaactcgctgaccgaggtgcgcccgcgcaccctcctgccggggaagccgcagctcccgccccctttgcctttctgccggagcagctgcaggtcacaggtggtgctggtgacgccttttctggagggacgctggcagagaaaagctctggaacaggaataattagtatccgttttcttcaagcggatttgcttccggacactctgaaactcctccagggacaccagaaggtggtgcctgcgacggtggttgtcatagaagcaaacaccatccgtacttaccccgtggcttagggacccgagacccttcttc

SEQ ID NO: 1313 - DNA, 29220 bp, Homo sapiens
gaagaagggtctcgggtccctaagccacggggtaagtacggatggtgtttgcttctatgacaaccaccgtcgcaggcaccaccttctggtgtccctggaggagtttcagagtgtccggaagcaaatccgcttgaagaaaacggatactaattattcctgttccagagcttttctctgccagcgtccctccagaaaaggcgtcaccagcaccacctgtgacctgcagctgctccggcagaaaggcaaagggggcgggagctgcggcttccccggcaggagggtgcgcgggcgcacctcggtcagcgagttcaatatcacctacgtggtggagcggagcctgtacagccacctgaacctgacccagctagtgcggcctgcctcagacaggaccctgagcaaggctgagagacaggacctgaggcggtgcctgctggaggaggatgaggaggcaaagaggaagtgggccgccacggtcgaccgctgtactaaaagggttctcttgagaatccaccagaagtctgtgagtcacaaagatggtcctgaggacggccttgtcatttctgtgatgtgcagtcaagcattatggcctttcttctgcggggaccggcttcctcccctctctcctgctcatgacgtcagggcacatcccaccatcaccttcaatttcaaatcctgctttcacttccaggcagctttcaccttctcttccatttctcctcttgtcagatgaagctgtttgagtgcccattaaaataagcattgaagctaatccagagaggggcttccagggtacaggggtggggtttggccgcctccaggagtggctgtcttgattctcggccattatgtcacttgacctcaaagaagctgattcaaaacagaagggcatttcacccttgaaagagatgcttgctcttggttttaaaattaaaacaataggagcaggctcatggaaaaactgccgtcatcacagtcaccaatttggtgatttgaaaacattttaaagcacatttattttattagtagaggcaagcagaaagttcgtaaatctaacaacaaaaatgggagcttttttgttttacttaagtctattccatgttcttatctttataaacaaatcaacatttggaaatgccttcccctagcctatagattcttctgtactcagcaaggaataaagtactcactttcaaagagtaggatgtttttcacttttaacgctggatgatcagagacctagtaagatttattttcaaggcatgacttactttgaacttcagaatatagatatttttccttctgaaattcccacctaacttttagtttgcacagtggcacatataaaatggtgcaaagtgaggaagtagatttcttggccctctgtcacctggcaccttgcttgatctgctcaggacagttggctgtgggcccttttaaagacctgaaagaatagagtgtccttcaatagtggttttcccagggggccttcccgttcatgaacaggatgttcttccccagacgatcagtgtaatttaaattcattcagtcgggttctgcttttgtgaaagtgaagacggattggtcaatgccattcttaaaacgaccttctctgttgtaaaagaatccttaggtccttcctagcccctgggttttccacatatttccacatgttgactttccttattttctgtcctttcatattcatgtaattcttgcagcacttttaatactactagtatgtagcaggaacttttcttctggctctttctgtatcatggcaacagtttttcaatggttgagtttttgttttaaaataacaattctctttctcactcattcagcctctggtttgctctgactcacagatattttgaaaaataaccagtcttagttttatgtatttattttttactttcagaagtgttctacccaattcatctgctcttgtatgttttgacatgaccttgatagaacagacgcacttcttctgttaattgatgactcacctctgtgagtttacatcatgtaatactgagaaatttcccaatctgagcaccttgaattgttgatgtgcctctcatgttatttactgtcagattaatactataactccatgagggccttgtctctagaagttatatttctgggatttgtgctagttagtgttgtaggccagtgattaattcttcattgacattgagtatggacatttgggcaagctcatctccaggcaccgcccccacctaacgtgctcctgtgtaatccctatcccaagtatcagtctgaggctgagtatttttaaaatactgtgagcttgagacactaatggacagtttgaacacttgcaaaaatatgtgttcagtaggaagttatatatttgcatattccttttcttgtagtacagttgtacaatcaaacaaatttaactttctaattatccagagaatgtaaataagtgttctatcatcttacaatagaaagaacttttttaaaaagggattaatcttatttctttgctagatttatttaaaaggttattttccattctccttgtcatatttctttcattttatctaaaagtttcctttattcttcaacctcaagctctttgtctttcgaaaatgccatatttgcttgatgaagcctcagggaaatgataatgctttgtatccactggaagtggtcacttgtctcgtattttatttggtcattcaatttttgtttgagagaacagacatgcatgacattttgcaattttgtccatttttgaattcaaccccaaaacatgtgtttccaactgcatggccattccattgactagccctcctcatcccaagcatctatctaaagtgtttttataattttcagtacaggaagtgtgtgaactaaaaaaacttcatttaggcttcatttatttaggtcatcaacgtcaagggctggttcatgtattgatttattttttatgagtctctttacagtccattttctcttttgaaggaatgctgtttaaagaactacttgatcttatagaaaaagttagaaattaattcaagcaatctttattgttatattctttgtcactcctccactgtaaaaaagaatcaattccagatatcttagcctatcactgaaagaggttttagttggtagttaagaaaactggtccattctttcagtttttcattttagaaataaatgcatacaataggcatgtgaaaacttaaatgagattctaatttattgcagtcataatttccacataaattctttgtcacttatttcatatgtatcagaaataacttgggctccaacattgcagtagatgctgtggtttaaagcagggacgtgcaaaagccatacaatgatgaggcatctgggtgccataccatgtctgtgaagccctgagtcacgggaaaggaactagaataaaatcactgcttttgcaagaaggaggaaatgtacatggcattataagctggaaagagaaggttaatgttaaaaattagccttgagaggtggtcataacattgcttacccagttaggtgatttggtgaatatatttgtgtagaaaggtttttctctttctatagaatagatataggtccagttaagctgacgataagagaaatcagattgcccattgatatttaatacagaattaggataatgtctattagaaaacaagtcggtagtagcagcagcagcagcagcatcggtgaataagaacagctctgagacctcctgatgtcagttgtcacgaaatgctttccttatctcctggccctctccagaccccaatggccgtctctcactttgtggcccattcctggtatgctctgattttatagttgaactcccagattagattgtaaggcccagaacaaagctccagccctgtatttgcatatttgtaatgttaactaagcctcaacttcagtataacagctgtcaggatgactaccacattctcagtacagccttaatgaaaagtagtggaagaaaccagcattcatagagtgtctgccttgtgccaggcagtgcgctagaaggcttcaaatatgatataagtattattttaataatgaagaatctaaagctcagagagtgtaagtactttacctgagatcacacagcaagtaagtggcagaaccaggatttgcatctagatttctgtgatttcaaaaatgtaggcattttccttctaggatgtttctactttatcaattcagttaattatatatatatatatatatatatattttttttaatgaataagcaatgcttatagtatattaggttggtgcaaaagtaatcgcagtttttaccattgaaaataatggcaaaactgcgattacttttgcaccaacctaatacattgtacttttctgttcatttcttccatttaatagctgttcattagacttctctgagaagctggtaatacaaaatattgaagcccgaatctacaattaaacttttattactgatttttaaaaaagataattagctgtaacattaatgtgtgttgtggggcacagggcggtcactcagtggcttttactagaaaaacaacagtgaatttgaatcaagttctgcaaatacagaaatcactaagatataagcagttccgtgaagtttgcaaccacctaaaaggataataaagttttcattctttataacatcagcattgttcctactgaaattaaaaagtgtggtcaaacacagtcactgaatcaaccgttttctttctgggcaaatgtggcatcttcattcactgagagaaaagggtcaccatgaattaacttgggcagttcgatgggaaagttaccagcgtttttggctaggatggggaagcggtgagtgagtaattctcttggcctgattggacaactgtaaacataaccttctccccccctcttctcagcgatttaaagctaaacaaaatgaaagtctgtttgaaaagcttgctgttggtgtcagagccgtgggatttcaaacctgggttttcaggatgcctgagtacatggatcctctaacacatatcccttcattatctctactgaatgtagctgatgttaggggaagttctgtgctggagacagggaatctcacagcactggactcatggagggtttttcttttgttttttaggctttttaaaaaaaatggttggtttttgcatgttaaggggattctagacctctggggtaggcagagttccagtggcctgtgaaagggaaaaatgagtgaagtttccttacgacatgactcatgtgtttttttctcatcatttctcgttttctactttcatcctgtccacgtatttgtgattcagagatgtcctgcaaacggggactgctgggttggtgcactgccggctggcttaagcataactgaagtttttctgccctaccctcttttccacagagaacctgcagttttggaggatttgacttgacgaatcgctctctgcacgttggcagtaataattctgacccaatggtgagtaacatcagaggaaagcaaaaaatatggattcaggcgatgaggttgacaatagttcaccattgagtatctttgagaattgatactgggtaccgttttccttggtaatcctgagtcacgtttggaaaaaagctctatttcacttgccttacagactccactgttccacgtggaatgaatgatgaccactctcactgccatctccttccttgagtagcacagttcctttaatgcctttgcttccagttttcttcaagtaacaaatccagataagtctggcctctgtggtctgagtcattttgcacacggccttttcttcttgctagttgcaagcatgtaactactacacacacatagtgccatgaagtggagccctgtgatttggtccccaagagtatgtgctggcattttggaacaccagtcttattatgggcccagtacctggccccacatggcctatactaagcctaggattttgtggtctggggtgtcctggaatgaacccagtctctgtgggaccaaagcagaccagatccctcaggggtctggtgtcaggcccaggtgtctgccctctcagacctgctttggggtcatagtctagggacaggccaccacagtggcacacaagttttgtttcctgaaatttgctttctcagaccccaagggtgaaggtgagtcttttttttttttttttttttttttttttttaagatggagtctcgctctgtagcccagactggagtgtagtggcacaatcttgcctcactgcaacttctgcctcccagatcccagttaagcaattctcctgcctcagcctcccgactggctaggattacaggtgcacgccaccatgcccagagaatttgtgtatttttagtagagatggggtttctccatgttggccaggctggtcttgaactcctgaccttgtgatccgcccatcttggcctcccagagtgctgggattacaggtgtgagccacgcgcccggcctttggtgagtcttacatgtagtttagcttgtcctttgcattgtgtcataaaactgtaaaatgaagatttcatgtttcatatttgttatgatcatgggtcagctaaaatacccacctgggatatatatgaaatgttttgaaaatttcctggaagagaattaaactattttatttggctatcgaattatattgattcttaagccaatagttttctgctgtcaatcttttttagaaatgagagaaaatatgatttttttctttctcagggagaagtttgttttttaaaaaaatgcagactagaatgagagatgaccacaatctagctctttaagagagagaaatttacacactgagtgctatggtgatggaaatccaatcagatgttgctcttctaacgactgagctttcaccatttgttctaatctctttctccaggcaattcggtagtattatccctctattctcccccattgctgggattacatgaacattggttcatgtaaatcactttttttttttttttttccctctgagagggagtctcactctgtcgcccaggctggagtgcagtgacgcgatctcagctcactgcaagctccacctcccggattcacaccattctcctgcctcagcttcctgagtagctgggactacagacgcccaccaccacgcccagctaattttttgtatttttagtagagacggggtttcaccgtgttagtcaggatggtctcgatctcctgacctcgtgatccacctgcctcagcctcccaaaggtaaatcactctttactgatgaaatgcagcccccttggatgttaaaaatagtggaaaaaatgtaacctgataagaatgtactaaaagtaagtaaaataaaaagtgactcacatcccactttaagcaaacaaaaatagtcaataagctttaatttttaatcaaagagataaataatagcactgagttaacacaagaaaaacgtcaagatccatgaggaatgtcaatatttctgagagctaggatgttaatggtttaaataataaaacctgttcttcattttctgcgaccaacaatacttgcaacattttgttttacagggtaaagaaggagactttgtgtacaaagaagtcatcaaatcacctactgcctctcgcatctctcttgggaaaaaggtgaaatcagtgaaagagacgatgagaaagagaatgtctaaaaaatacagcagctctgtctctgagcaggtatgcagctacctggtagaatgttcccttggttcttcctgacaagaaaagctgagaatggcccttctgagattttaaatggtgctaaatacacatactccttggcattaacctgctccaagtccgtgctttatttacgtagagaaacactgaattcaacacacgtttattaagcactttgggctgctcagcaccgtgcttggtgctgggaatacaaaatacagaacttgccttctgtgtacagacaagagagacagacatgtaaagaaatggttattcttcagtgcactaagcgttgtaaatttgaatacaaaggaaggattttattttctaaactatgccttgctacaaaatggatgttacctgaatcaaacctaaagctttttttttttgggggggggggtggcagtagacttgtcgatcatagcataagttgttctagaagcacatagccagtctaagaaataaactcaaagttcttcctgggtaccaggctttggtaataatgtttcagagaggggtgttttccctcatttgccttatctgtagccatgaaggaaggtatcatagaattgatttttcccccctggatctataatttcattgctagagaaatgactgtttctgtctaaattgcatgggtggagggagtaaagatagttggagagctgggcctcaaggtaattatgaccattcaattttcaagacactctcctccagcacctgtatagcactcattttgtagcctgttgaagttcctgtgtatgagctggttgtctgcttgaaatatgtaggtaatgcactttatctaccaaataaaaacagcaggaaaagcagacatttttgctcagctgctgctctctggtgggcacagtgagctaaaaccaagcatcgcccctatgcgaatgaccgaacgtcaccagcctgccacccacctcacttgattcaaacaaagcctgcacagcagcttcagttgattacagtggttctcacggggaaggggtgagaggctatcattttgctcccccatggactccagggcaatgtctttcaatggtcagactgggttgaggtgaagtggagtggatattgctggcatctagggcagcagtgcccaatctttttgcaccagggactggtttcgtggaaggcaatttttccacggagctggtgtaggtggtggtttcaggatgattcacatgcattacatttattgttcacttcatttctattgttattacattgtaatatataatgaaataattatacaactcaccataatgtagaatcagtgggagccctgagcttgttttcctgcaactagatgatcccatctggggatgatgggagacagtgacagatcatcaggcattagattctcataaacagcgtgcaacctagatgcctcgtgtgcacaattcacaataggattcgtgctcctacgagaatctaataccgccgctgatctgacaggaggtggagctcagacagtaatgcgggtaatggagagtggctgtgaaaacagatgaagcttggcctgctcacccgccactcacctcctgctgtacggcccacttcttaacaggccacagacgggttctggtccgtggcccgggagttggagaatgctgatctagaggatagaggccagggacgctgccaaacatcttagcatgcacaggacggtctgcacagcaaagagctgtccatcaaaatgatcagtgctcaggctgagaaaccgtggcttgttagacctgcaggagatagatgtctggactgccttcagcatgtcttatccatgattttttttctttattcttttcattctcttgtccttgtgggtgacggagtgatagtgattctatatttcttcccagcaatgaagcagtcagcatgctagtgagagcatgctactaattgaaagcattttattaagtttgcttttccccaagatagattgaaacagccactaaaactcttaagctttacgttcacagaggttttctgctttatgaatcagaagcatagaattttaatgtcattttggcatttttcaataattttactaccatatagcaatcttatgtgcttagttctgtttttttaaagcagccatttcacataagttaaggaataaaagaaacaactgatcattataaattttctgtaaagcaaaaataatggaaggttttatgtggttgttttttttttgtttttgtttttgttttgagacggagtgtcactctgtcacccaggctggagtgcaatggtgtggcctcggcttactgcaacctctgcctcctgggttcaagcgattctcccacctcagcctcttgagtagctgggactacaggcacgtgccaccatacccggctaattattgtatttttagtagagatggggtttcactacgttggccaggctggtctcgaactcctgacctcgtgagccacccacctcagcctcccagagtgctgggattacaggcatgagccactgcgcccaccttgtgtgtttttttaaaaaaactttttagtaaatataccaaccattatggtagggatatttgttttctccgttgctgctatatgcccaatacctggattagtgcctgttattgtaggtaattcataaacatgtgatgaataaattaataattttttaaagcatttgaaaatatatcagagacccacatttactattgctgtttttcaaactgcgtgcttttttcagaagcattacagaagattttaatgggaaaaaagttacttattttatgacgcagaaaggaggaatgaattttttttttttaaggaattcatactttggagcttcagtaacttcctaataatgtcagctctagttttctttgttgtttttgaggtcgcttgctcactttcctcacattgaaagcactaatgtgtgttggatcagaagctgctgttgctgatgtcctcagatgtttgcaggacctgcggagctgtgttaaggcccttctgatgactcggcagcatgcaaatagcaggtttcattttagctggttttgagcccgtgtggctgcggccatatgtaatatgccagagacttttctattttggcaagtaaacaattctcactgcaaactttctgaagtgtgatatcgtctattgatgtagcaccacgaatcaaataagcatgctatactcaaatgtgcaaatgaggagccgctgagaggataatacttagctactcaaaatgcaggaagtactgctgagtcactcccatcaggattctggtgtgaaagagatttcccagctttttactgacaacactttagaaaagtgaaagaagctaaaactttagagtaacatatggaaattttatggtagactggaaaatagtatgtttgctgtatatgtgggttttaaattcatgtttccttatccaatgccaataatttgtacaaatagaaatataagaatctagccaattttttttttccaggaatacacttttttaaaagtgcatgtttcctatccaagtagattaaatatcctctgactacacttccaggtattctagtaatcatggattgtacttgatctacatttgaagtccagccttgctactgggcttttgcgtatgctgagtctctaaacctttaagtattttgtctgtgtggtagacagattttttttttcttggagattccaagaatatctattcgagaatgagaaatagtatttgagtgcttaataaatagtgacattggccacgactttaaaagtaagcgaggatgtaagtttaagaggaggagaatattggttatagaatcaaatataggtatagattgatttgattgatttcgttgaaggccaagtcgctgagaattacaaaacaacacctgtccactctgatgaacttcttcattttgttgaaacccatggcaggactcgggccttgatggaatgcctggctcccctccgccttcacagcccgaccccgaacacttggacaagcccaagctcaaggccgggggttctgtagaaagtcttcgcagttctctcagtgggcagagctccatgagtaagtcgagtttgtcattgtagattattttctttggagttaatatctgacatatactgagcactaggttcaggcaatttcaaggtgaataagaccaagtcctgcccttcaggtgctattagagaatcagaccaataaactctctggactcagagtcgtgtttgtttattagtagacatgcagcagcagcagcccaaaacaggaggtgatgaattttgatcggagacaatagggaaagcatctcagaggaaggatctagagagcagggggaataagccagggagacaagcacatgaagatgaccagcaaaataaagggagtggggaagggaggggaattttatatgtgactgataaattcgggccaatggtagttggagttggctgaatggtatgaaggaaaagatcaactttattttatttttatttttatttttgagatggagtctcactgtctcccaggctggagtgcagtgttgtgatctcagctcactgcaaccttcacctccctggctcaagggatcctcctgcctcagccttccgcatagctgtactacagggtcatgccaccacacccggctaattttgttgtagagacggggttttgccatgtagcccaggctggtggaactcctggactcaagcgatctgcccacctcggcctcctaaagtgctgggattataggcgtgagccaccgtgccccgagatcaagtttaaacctaccactttaagctctttcttacccttttgggcaaatgacatgactgctctgaatttgtttcctcatctgtaaaatggttagagagagtgtgcattaccactgagaggtcacgaatgttaagagcagagtctggtgcctggccctgcagtgtcctccacgcgggatcctccgtgccacatggattcccaggtcatgagggtaacttgctgtgagtcccctgtccactgaggagctgagggatagcactcggagaattcataactgggccctgccctggtcctgacagagggttgtggctcaaggcttcctttctctgggccttcatttcctaatctgccataccttcaatacctttctgctttgctgggtgggaaatctggatctacccgtgttcttcctatgtttcctgtacaggcggtcaaacagtgagcaccactgattcctcaaccagcaaccgggaaagcgtcaagtcggaagatggggatgacgaagagccgccttaccgaggcccgttctgcgggcgtgccagggtgcacaccgacttcacccccagtccctatgacacagactcactcaagctcaaggtatctctctccctggcctcagagcagctaactgggctcttccatttctctaggaggctttctttcctcctcactgttgaatgctgggctactatggtacagactggacagtatcttggctacctcgatcactggtctcctctgtagtgaaaaacagaacaagaaccagccagccctcgaggcagagggagggtctcgtgttaatccctgggttagcatcacttcacccctctgacctcagcttccctctagaattcctgttgcacaccctccctctccccacctggctcctgctccacacacctggtttctgtgttttctccatctgaagaaagatttctgccttctgtgtgctcagaggtacctttatgggacagatggggttccacaaagtgtgtgcagccatgacagggccgggattgccactggttaggacaggtgggaagtgcctcctctaagaagtgggagccctctgaggagggaaggcgttcagagtgccgggcgggcagcctggctgagagcaccaggggtaccccaggcacccctggttctgcagggcaggagggtggaggggctgtgaccgggggcctgcgtggaattccgtacagtcagagacacctgtctggcctctgcggagctcacagtcacatcctatgcaggtcactcagaggggtgacttgtgggaccccgattctggcctttgtggcatcttcacttctgcatgacctgtgtatctgacagattcttgatttgtacgttcatggaatgtacctaatggaaagatctttgctccctgggccacagaaaggagatatcatcgatataatcagcaagccacccatggggacctggatgggcctgctgaacaacaaagtcggcacgttcaagttcatctacgtggacgtgctcagtgaagacgaggagaaacccaaacgccccaccaggaggcgtcggaaaggacgaccaccccagcccaagtctgtggaggatctcctggatcggattaacctaaaagtcagtcgcttctgattcttgtcacacgctactacctcactgcctttttctctcctacactaagcaagtgagggcatttttagggtagggttggggctgatctgtgtggtccaataagggcagctcgttactatgatgagcattcattattctacagaaagagttagttagttaccagttttccaacactgcccttgacctcagctgtgggtgatagcgtaagccccgggtcaaaccttgctgctggaagagctgtaggcagaaactcctggcaccttgatcgcagctagctccacaggggccacaaggaaactctgcgcccacctctctcccaccatcactccaggcatctactagcatgagtctgcaatgagagattatgtttcctctttgcaaaactcttgatcctgaggacttaaaagctggattttaatagctctgtaagtggaggaggagtctcctctgttgtgggctctgtggaggtaaaggaattagctcttatcaagagtacaattatagtgcaagccagcagaatccatcacagcctgcaatgtacatcttcctaacccatgattaataaaacaccctgcttgcctactaagccagagggctgggatgtacaggatccattgcaaatgatacttactaatcttttgattagcctgaaggtgactatgggaacagtgtgtgggttgcaggctagttgttggcggtgttatcatgtgtctgggctggctgacacccttctgtcttccttctccctctcacaggagcacatgcccactttcctgttcaatggatatgaagatttggacacctttaagctgctggaggaggaagacttggatgagttaaatatcagggacccggaacacagagctgttctcttgacagcagtggagctgttacaagagtatgacagtaagtccctgtatgcacagaggtgttccctgtgaggtctgccacagcaggccccacgtatgctgccagtatgtgcttaggtccctggagtcacttattctgtcctgttctttctgttacaagagtatgacagtaagtccctgtacgcacagaggtgttccctgtgaggtctgccacagcaggccccacctacgctgccagtatgtgcttaggtccctggagtcacttattctgtcctgttctttcccatgccaaggtcaaacagcacaaaatcataaattcccagtgcagacatgggaacaaaagaaaacctcctgtgccgccgccacctttccgggcatgtttctaggtgatagttgaagaggattctgcaccaagtgtctgcaagaatggaattacagttttcccaaaaaaatgggtagactccactttcagtacttttgagaggtgcagcctccagcaggccattgggacagctgagcacaaaagtgactgaccagctgggaggttttcgctcagccaaagcttgattacttctcagagcacacgaggagttgtgttcttattgaatagactggttagtgaataaatgaaattcatcagctttcgttaaaggaggagacgtctctccgcagtgaatatgtagagcagagaattccgtatcgattggcttgcaaattcccaacctaaatgacagcttatttttacagcctgtgagcagaatcatcactgagctcacagcttttatgaagtctgtctatttgaatacaccataccctttgctccattaactcagtcttatcttgctctgtattattcaatctgccatcagaaatattcctgaaatcattcatcttaaaggagtatcctttccagttactgaattcaaacacgttttccttcaaggactctgcttcagggatatcagtagctaatagcatttctgttgctaaaagacacaccaaaaccatggttaatggtggaaaaaagaattatacattactgaaatgtatcaggcctgagaaacgtggaagcaagtgtcattaggtgaaattcccttctgctaaataggcagtccctctaaatgaactggtaagctagagaaacacacaccatcagatagatgtctgagcctaagataaacaggctgcctttagggatagatttgggatagatttggaggcaattgtgattcatagttaatatcactttataacaaggtcttttaagtaagtatttgattgcccaagagacactttggggtctgtggccaggttgcgtgtaaagagcctgcacggtaactggtgtagcctaccagctcaattagtatgaatcagtattaaagcatctattgtcccgaaccacatctgcccagaaacagctcacttgctcttcctcagtcaccaagaacagctggggtttttgttttgttttgttttattttgttttgtttttgagacagaatttcactctcgttgcccaagctggagtgcagtggtgcgatcttggttcaccgcaacctccgcctcccgggttcaagcaattctcctgcctcagcctcccgagtagctgggattacaggcatgcaccactacgcatggctaatttgtgtatttttagtagagacggggtttcaccatgatggccaagctggcctcaaactcctgacctcaggtgatccgcccacctcggcctcccaaagtgctgggattacaggtgtgagccactgcatccaaccaacagctggtttatatatactctccatgacatttcctttatcatccacagctttggaggagaaaagctaactcctgagtgtaaggcaggaatctgtgcttagactgctccatgccactttggctgagacccatcattcctcctgggatcacatcctgagatttttgtaccaaggagcattttgtaggagggtatcgctatccatcaggttgctaacctggaaggtgaagaagacctctttgcctcttcagacattccattgtggatctattctgctctggtgtttagaacgtccctgatagataaagttgtacttccttttattggttctaaaacaaaggcttcaaggttccagagtacccattagtgccaagagtcagggtccagacttttcctagcattataggatttttacatccaatacagttaaagtcatcgtggctaagaagtagtgcctctaactgataacatgataggtttctgtcaaacaagatttccatacactagggagatgcagaggtctattgagatctttgaagatatgtagggatcttgaaaggtttctagcttagccataactgagagcaaaaagtacatttccagcactacttggaagtcagacccgtccagcctccctcgaagcgtgggaaaatgccagccatcatatagggttccattgggaaaagactctaattgtcagatggctattccttacgccaagcccagacccactatcttaggtctggcaaatgaaagcctcttacaaattgctaaaagaatttttacttgtggtaaaatacagataatctaaagtttactgtcttagccatttctaagtataaacaataacttgtataagaattctaattaggaattatttcaaacatgcagaaaagtacagaggaaaagaaaacaaacaaacatatgcatgcacatgctgaagttaatgttttgccatattttcttatttcttttacattttaagaaatatggtgtaagcccacagaaagtcctgctttcaaagaatcccattcccttctcttctttcccaaggtaactgctccccaggcaatgctatgtgcctttgggtaccactaccttttgatgttggaatattcataggtgtcttagcatattctgtgtgtgtgtgtgtgtgtgtgtgtgtgtgtgtgtgtgtgtgtgtgtgtgtgtgtggttggtgaggctggaggcagagagagcttagcccaagcagagtcccttcaggtcaaagttcaggtcatgctcaaatggggttacagcctcacaacctagcactttgctgtgatttgactgtgagaattttcagcgttctagcttatcttccttcttaccttttgtaccttggcacccacgctgacaagtgtgggaaaaggtcatggtcttgattctgcactacagaggagaggcacctcacctctttttctcttctccctaatgaagacagcgattctagcccccttccttacgccaactgtggttttcaggtgacacaatggatcccctccttctccaaaataatttcaggtattctgctgtgtctgctgaggctggggtccccaaagatgcaggcacagcacatacttccatgctgcagtaggagcaggtcttctgtgttactcccacccagcactctggagtctgttttggccactgtggtgcactgaaccatgtcaccagggacagagtacaccgactcctctccctgggttgtaatggatagcacaaagccctcattttataagtatcatttttctaaataacatgctaggccagaacaaaggccactgcaaagccacaggctcttccacacagtgaggacaccgctctagaatgttccacttttaggtggtcagggggacagtatttgctcttgtgcttccaattagttaatttttcattagtcactttaaaagtagcactcttaatttgggattctaattgagggacttacgctgccacgatctctgctgtagttggggctgtaaaatgctttccccgtgagaaatgcaagcaggaagtggtggacagccggagagctgccagagccttctgcctccccgcatttttattttgatgacctgagaaaaggcatcacatttctggcttattgatttctttttttctttgtgtatgtggttggagtggggaagttggtgggggatgaaaagaaaggaaaataaagccattcatcattgcaactagctattttgtgtagaaaatgttttcttggtttctgttttatgtgaccaagcacttacttactctgcataataatgcaaagatgttctgcgtgtaacctcagtgtcccatgtaaggctccatgtgccctttctacaacatgccgggtgatgctgctagggtgttgaaggccctcgtggctttccacgtgatttacttggggcagattcactcaacagaagcgtccgatgctgcttttttttttttttcccctccagctttgttgaggcacagttgacaaataatgatgcttctctttaaaagccttcctcagaatgaggtcttcctttttttttctttattttattttttatttatttcagtagctttgggggtataagtggttttgggttacatggatgaattatatagtggtgaattctgagattttagtgcacccatcatctgagtagtatacattgtacctaatgtgtagtttttttatccctagactccccccacccttcctcttctgactctctgaagtccattatatcactttgtatgcctttatgtgcttatagcttagctcctacttacaagtgagaccgtgtggattttggttttctactcctgtgttacttcacttagaataatggcctccaggtccatccaaattgctgcaaagacattatttctttccttttcatggccaagtagtactccatggtgtataggtactgcattttctttatccactcagaatgaggacattcagttttcagtcatccatttatctataccagcaagcatgtatctgttactcagcttccaagttcgagggtttcctaagctttccccagcttttacttatatgcaggagacaaaaatgtgctggcacaagacaaaaggagaagcagaaaagaaaaaacaacctctaactcatcccaaacaacaaaaacaaaagaagatttgccactggcctgtcctgagttttggggtttgtgcctcgtcttgccagccttactcttgctgagctaatacaagagccctcagcacgtgttgctgagggctaagaatgctcctaaatgctaataaaatttatttcatttgacactttaatattagctcccaaatttggaaagttggcaacataactgtcttcaagcacaagtcttacagatctccgaaaaacatatgacctaatctcaccttgtgaatggggcgtttattctttctttgcttctccttgatggtgccatcactcagaagggtctgggagccccactgccaaaacaacactctacctttctcctttcctcatagccccaaggccagagtcagcttctgttcgcataactaacttaaaaggtgtcaacatattccaactgtgtgctctctccaaacttatcttcgtgcgatgaataccttattggaagaaaagttgtgatcacactagttcattttgatctcatctattttaagataaattgttctcttccaaaagctcagggcagtaactgaggataaagtcgagatctgttgactctgaaacctctgcttttcactcaccttgttgatttcatgccgtgttctctcctctaggtaacagcgaccagtcaggatcccaggagaagctgctcgttgacagccagggcctgagtggatgctcaccccgagactcaggatgctacgaaagcagtgagaacctggaaaacggtaatgtcagcatgagtcgctgggaacctgctttgacaagtactgatttcaaagcacagttttctgcaaaaggacgattctattcctgtcatgaactcagcaatcatcgtttcctttctcacctctacaccattctagtccaagttagcctccctatctattctcctggctgctgggtgaggttaataaattctgtgtcaaatacctgcagctgtaaaacctaaattgtgtgtctcctatgcccttttctgtatgcaataaaaaccaacattggagtgttgggagctattaggtccataaggaaaacagtttaccaggtagaccatccatcagggtcataccagcagcagtgtcttaaatgcctcggctgcatggcctgaatgtcgaggcagttactgcaggagagaaggattggatggccacatgtcttgtttgtggcctctctgtacagccagtcaggaagtgtaatcagtatgaaatttcagaaaaggtacttgtctcaaacagaagaggagtcttaagtggtatggggtcaggtgggctaaacgttaccatggatggctttgtggtttcctgttgtgaccccagaattcccattgtagcaagatgagaaacagtggtaagaggcttacgctgccacagtgacctaaatctctgtcaaactcttgaaggccgtcataaaaaatgcccaggtttgatagcttttagcagccattggaatcctatctagtagcccatgtgttaagatatttactgagcacctactaaagcaaacttttttaaaacttaatgcaggttgtactttattagtaggtcatgaaagcagtttagtgggtcatggacagcagttttgtaagacaaaatagaatacaaaatatcagagagcatcccctaagataaaggttagtattgttagcactgtcacttgtaatccttgtttcagttatgtctgtgtgtgtgtttgtgcttgtgtacatgcatgtgtgtctctgtgtactacatgttgaatgtaaaatgtatttcttactgggaatcatgggaaaaaatagtttgagagccattgtgggtaccaaaactagggctaaggacaggaaagtgggtgtccaggatgcaaaccctaagcaagtgctcactctcgggtaccagccctgcactcacatgactctgggcattcacctccttagagtttgtcctctgggcaccttgtttgcctcactctaattccaattctaagaagcatcttggggacctcagaatttgagccatgatgccctgctattcaaggttttctatcaacttgggaagatagtagttctccccaaactatatataatattcagatagcctcggtcaagacaggatgcaaaactcacctagtatcccagtacatcctcagtttcagtaaacatcagaatccttatgtagctcatgtaggttctgaagaatttttttttctcttaataaccttttcatatccaaaacttttcaggaaattaattcccccaactgttggtgattggtaaggatctcacagatatcactggcagaatttttcatgcccaaatgaattcaggtgtacctgctgaagaactagattgctagcgaaccatactttgaactcaaagtaagttcagggatctttctaatgtaatgcagaatgcaaaaatggaacttatatatatagttttatattgggagttaagggaaaagaaagtcatatttctaaatttatgctaaagaggttctaataattttctatttcaacccacttttaaaatctgatgcaattttttttttctgaagaggtatttcttcatttatctgtgatgatttttcttttctttttatgaggcggagtctcgctctgtcgcccaggctggagtgcagtggcgcgatcttggctcactgcaaggtccacctcccgggttcatgccattctcccgcctcagcctcccgagtagctgggactacaggcgcctgccaccatgcccggctaattttttatattttttatgagagacggggtttcaccgtgttagccaggatggtctcgatctcctgacctcgtgatccacctgccttggcctccttaagttgtgatgatttttctaataatgaaaagtaggaccatggtcaatatcttcagtagtagcactaggctgatgatctttatgtaacaacaataatatcctacaaatgcatagcatgttggtgtttatcagtgtggaacatacaggtggacagggtcaaagcacacaacaaacatgttatcaaccaaaaatgtaacaagggacagtgtgtgtgtgtgtgtgtgtgtgtgtgtgcgcgcgcacatgtaagtactgatgagaacaaagcattcagcacattgtctggcccatgaattgtaagttcttggcaaagcttatccaacagcagcagtttagtatcaactaccagtcgtcagataagtagattatgtctggttgatagttcagttatcagtctggcagttgtaactaggactgttgctttgctgggacctaaaactttatcagtattttgtagattttctttggcaaagtactcacaaaagtttacctgtctgtgtccaggttggttgattgcttctaggataaacttactagaaggaggggcttcagggaaggtgggatttgagtattcacagatcactctgtaggggataccatttatagaacctgttgtgaaattcagtccagctctccttttccatcatgaccttgagaaattgtactcacccaacaaatctcatcaatatgcggtatgatgatcagcctctttccacgtcgattgcagtggggcacagacttaagccaagatttattttactgcttgacacagcgtatttctttcccatgtaacccaattaatttcagtcttcatgattcctttaataagactaagaattctttctaaaaataaaaatggaaccataataaccctctatcacccgatgtcataaatggtgattttatgtttttagtgtaattgaacaataggatgtgggtgttggagatttcaattatgttagcacaactttatgcatccgtttgattgatttgcttttaaaatgtgattgtaaaatattcccttgtctcacaggcaagactcggaaagctagcctcctatctgccaagtcatccaccgagcccagcttgaagtcttttagcagaaaccagttgggcaattacccaacattgcctttaatgaaatcaggggatgcactgaagcagggacaggaggagggcaggctgggtggtggccttgccccagacacgtccaagagctgtgacccacctggtgtgactggtttgaataaaaaccgaagaagcctcccagtttccatctgccggagctgtgagaccctggagggcccccagactgtggacacttggccccgatcccattccctggatgaccttcaagtggagcctggtgctgagcaagacgtgcctaccgaggtgacagaaccgccccctcagattgtacctgaagtgccacagaagacgaccgcctcttccacgaaggcccagcccctggagcaagactctgctgtcgacaatgcattgctactgacccaaagcaagagattttctgaacctcagaaattgacaactaagaaactggagggctcaatcgcagcctctggtcgcggcctgtcaccccctcagtgtttgcccagaaactatgatgctcagcctcctggagctaaacacggtttagcaaggacgcctctggagggccacagaaaaggacacgagtttgaaggaacacaccatcccctgggcaccaaagaaggggtagatgctgagcagagaatgcagcccaaaattccatcacagcctccacctgttcctgccaaaaagagcagagaacgccttgctaacggactccaccctgttcccatgggccccagtggggccctccccagtcccgatgcgccatgcctgccagtgaaaaggggcagccccgccagccccaccagccctagcgactgtcccccagcactggctcccaggcctctctcagggcaggcgcctggcagcccaccaagcacaaggccgcccccctggctctcagagctccccgagaacacaagcctccaggagcacggtgtgaagctgggcccggctttgaccaggaaggtctcctgtgcccggggagtggatctagaaacgctcactgaaaacaagctgcacgctgaaggcatcgatctcacggaggagccgtattctgataaggtatcaaaggtcctgggcccaccacgttcacaggcctttgtttgtagaagtcaggcagccaggtgagatgaacccacatctgaagccagcccggtagcccgcccagtggacaggagacacctgaatccacgtgtccacaccttacttgacatgcatgtgttcagatattgacaccaccccatttcatctctccgtaggtaaaccgaggttaaaaataacctgcatgaagacctcttagagggattactaggagcaaataaaataaatgtggacaaaagaaccctattcagatgtgataattgtattatacagttatctgtatgggtaatgggaaaaagataatataaaatcccccattgtaccaaaaacatttagctgtataatgaaaaattatttctcattcaaaaaaaatgagatctaccaataccaagtgactccaaagacaaagcaatgctaacagatacagcagtactttactcctggaaatacaggtcctattaggatgcattcctgagagtcctttattataaaattctcatgacaatgaatgccttagaatcagatcctcctccacctctctgaccctccttgatatttcctgagtgaatgtctttaaatgaaaggtagtgagaaagaccatacagtaaatgctggcctagtgagctggtggtatcacttgtagcagataaagtgcaaacagttgaatatctgtaaagcagaagttagcccttctctcctgcagtttagaagactctcttcagtaacattagaggagttgtattttgcaaaatgatctgattgaggcgaaggcattgtcctgaaaaatgtggaataattgtgttctgccttaactatgcttcagaacattttcctagagctcatcagtactttaagataaagatgtaaaagtattccctctaaagcattcatcctgaccaataaagaaaatatattcatttcaaattcaaacttttgggttgggtgtggtggcttacgcctggaatcccaacactttgggaggccaaggcgagaagatcgcttgagcccaggagtttgaggctgcagtgagccatgatcacaccactgcactccagtctaagtgacagtgagaccctacgttatatgtggtgtatcttagggaaagaaaaacaaaatccttatgactcttgatgtcatattcctgttctccctggcagcatggccgctgtgggattcctgaagccctggtgcagagatacgcagaggacttggatcagcccgagcgggacgtcgccgccaacatggaccagatccgggtgaagcagcttcggaagcagcaccgcatggcggtgagcagcccacagttctccagcttcctgaggcacatttagtgatcacgcttagtgatgaccatactaacaactgccaagtaggcaagggcttgcgtagctatggaaaggagacagctggggagaaagtaatatgtggtcagcctagaaatgtttaaaaatacactttcagaaagaaaaaaaaaatgaaaattatccgtaatcccaacactgtgaaaaactttttaaagatccgtctagtgctgggcgtgatagtgcacacctgtaatcctagttacttgggaggcagaagcaggaggattgcttgagcccagaattttgatgccggcctgggcaacatagtgagaccccatctcttaagaaataaaataaaatccgtctgaatgacacagtttcagttagaagcataacttccaaagatctattgttcaacatggtgactacagttaataacaatgtatacttgaaaattgctaggacagcagatcttaagtgttctcaccacaaaatatagtatatgaggtaatgcatatgtcaaatagcttgatttagccattccacaatgtgtacatttatcaacacaccacgttttacaccataaatacacacaatttttacttgtccattaaaactctgtctagtcatttctctgcacatgcgtaatgtatgcgtaaatgtatagtaccgaaacctgattgttggctattatcagatcatgaatctgtttccctgttacttaaaaaaaaaaaaattgatatcatcaatacagtagtctccccctatccatgagggattatggtccaagacctccaagtggatctcttgaaagcttgctgagtaccaaaccctgtatatattatacacaaatttctttttccttcacaatttcatggatagaagattcgttttcactgtaggtcttaggaacctcagcatacaattttttttcttttcttattaagtcaagaactctcacctttttacttaaaggaagcacttaagggcttctctttgccacgtgcgaatggccagcatcgttactcttgcacttgggggccattgtaaggtcaaataagagtgacttgaatgcaagtactgcattaccgcaacagttgatctgatgactacgggctactaagtgactgcggggctggtggtgtaggcagcgtggatttgttagacaaagggatgattgtcaggtgggacagagctgggtggtgtgagatttcttcagactactcagaatggcatgcaatataagacttatgaattgtttatttctggaaattcccatttaatattttcaggctgtagaaagcaaaaccatggataagcaggggggtggctattgtatttcaaagtattctagtaggtcagtgtactctagtagtgagtctcatagttaaaacatttagatttttctaaccttttattttaaataatgtaatgaagaacatccttgttaataaatctttgtagactttaaaggttaatttctgagtagatattcctggaagatggtttgcttcatcaaaattgtataaaatcccaaagattttcatactcgttagcaaatcacctttctgaaaggtgcaggccctttatatacccagtagtcaaggttaaatgtccacttccctgttccagccaacccttgatattattgtattttaaattcttcataacttgtattgactaaacatgtaattttctggttgttaacatagattcaaaatacagtggaaagtctcctttataaaaaccctacccactgaatgctacatttcacacgatcacccagatttgtcccttcagactaccttagggctctttgtcaagagcatatccacagtgaaacaaaatagcagaatatgtaaatgcttatagtttgaagactcggacacataaatgggatttgacctcattccaacaccttcgagaaccttgtggaactcttccttaaagatttgtttcatcttagagaagaatttttcctgctagtcttgatctctgacactcattgcattgtcgctttctgataatagtctagcaatgcagtatttcagtgctgttccttttagacatacgcgaagtagtcctcgatgacacatggagcgtttctatcatattctttcttaatttatccagattccaagtggtggactcacggaaatctgccgaaagcccgtctctcctgggtgcatttcgtctgtgtcagattggctcatttccatcggtctgcccatgtacgccggcaccctctccaccgcgggcttcagcacactgagccaagtgccttctctgtctcacacttgccttcaggaggccggcatcacagaggagagacacataagaaagctcctatctgcagccagactcttcaaactgccgccaggccctgaggccatgtagccaggcccggaatgggcctctctggacaagagccaccctttcactgtgcatatgatgctgatgcaattcctccatcatctctggacgtgcagaccagatccagaagaaaggcctggcgtgtggccaaacagcgtgaaaccttggcacaggactgaggatcctctcctccagaaaagccccctcgaggaaataaattagtgcggttctctttgacccccaaagacaagacaagcacttatttttattttcagaagacaaaagaaccaagatgccaactggctgcgaatgctctatctccagtctgtctctgtgtactggtagaggctgggaggagtagggggcagcctgttccatttctgatagtgcccttgctcttctgtctgtcatcttgcaggatgcccgagggccagatgggcttagctaggccaaagtaacagactcaagagttattgtacattactgaccacgctcatttgttcaaaagttagaacatctggctgcaccaggaaaaaaaaaaaaaaaaa

SEQ ID NO: 1314 - DNA, 2939 bp, Homo sapiens
ggcatattcaactgaagaaatttatttacttttttctaggtacatagatgacataattatagacaagttttgatacataggaaaacccttccgtccacctctctttatgctaaatgaatcatcacaataatttttacaatttttaaaacaatacacagctttcttgggctgaagcaattgcaagaacatattggtactggtatattacagctacttacaatgtttttaagaacagcaatggagaaaaataagttatttaaatattgatttcatatacagaaagtgcaatgttgttagttgttatataacttgctcgacagtttcttttctctatcaattttaaatcaagataacttggactcagactattatatttttttctgaaaataatacagtacacacatggcagcagtgacttggcaagttgaccttttttgctgcagttatgaaagcaaactttactatgtcaggaactgatttccaatagattagtaatttccaatttcacccatacctgggggttcaggacagagaaaagggcctctgactaaggcaaggccatgaaacaatatcttagttatctgggtacataaatagtactagctggagctgactgcatttccttccagacagctttgaagtgaaaatcatacacaatgttatgtgtagctacctgagccgaactgcctttccaggtttcttttgtgctttccaaagacaacaattttcaccattactcaaaattctgtaccaaatgcaactgattaaaactggatattcctgaagcctaccacctgttcactaatgtccacaggcagccccaatccacctcagtcaaacgtcacacccaaacattcagcttttctcagaccaaattaaatgtttacagaaaaaaaaaagaccaaacgctaaagatatttttaaaatatttaaacaacacaataaagtaaaaacaacctcagacccctcagactagacattcccactgaaaattctttgtggtccctgaatttgattttctatgcaaaggcattgatttccaaagaagtgtgataaaaatgtggtttggcattctcaaaaactccagaaagttccctcttctgctgcgactttcactgaaatgaaaatccttcatggagaacgaattaaaacttggaaattcacatgagatttctctcgctcctttgttatctcatctcttacacaacttttgtgtggttttttgctcagcttaaacaatgacaggatctgtccaaatgtcaagccgaggtattttgagagcaggaagagaagaagcctgtctacagcacccacatccaccacagcacgtgaaatgcattgaacgctttagctatacaagaaccctgcagcttcattacattgcaaataggctaggccacaacccgagaggacaaacaaacatgagctgtttttaagagttcaacagaaatttggcagctttagctttttattctacatttccacaacttcttcacatggcatcttatagaagatgaaaattaattattaaagaaacatgcattattttttaaaaatgcatactaatgcatgaaaaaaatacatcacctgagaatgtctttttcctcagaaacatggatccagacataagcaatatgctaaagatggctttctaattaatttatgaaatcacttcccctccaacccaagggaaattatttgttttaataagtagatgaaatattataaaatgttcaatcaagggcttgtggtcaaggtgtttctattataaatgattgacctttatattttagatgattgcatttgatgcttaaaatagtgttcatgataagaatgtaaaggaaaatcattttgtaagcaatggaaaccataatagtttacttgtttaaatttactgtttgctagaaaaccagacactagactaaaagaggacagaggccaggtgcggtggctcacacctgtaatcccagcactttgggaggctgaggcgggtggaccacctgaggtcaggagttgagtttgagaccagcctggccaacatggtgaaaccctgtctctactaataatacaaaaattagctgggcgtggtggtgggtgcctataatcccagctactcgggaggctaaggcaggagaatcacttgaacctgggagactgaggttgcagtgagccaagatcgtgccattgcactccagcctgggtgacaagagcgaaactccatttcaaaaaaaaaaaaggatagaatgtgctgaaatcagttgtaaaacaatttaaagtagcaaatacttaacacatggctaatgagatttgtctggttccatagtgaacctttgtttaaattaaaagaattatctaaataaaaaaagaaggataataatagtattagttgtaatactgaaaagtcttttagaaaacatcttatacatgacttcccttattaaggacatctttctgaaatatgcagcctcacagtgaccttttgcaaacatgatccgttaactgaggactgaattttgggatggacatggtcaggattccaagtcaatactgcagcgcgacgatccacacagtaacgatactaaactggttaaaaccaaaagcagtcactatgaatacagacacacacgcgcacgcacgcacgcacacacatgatatttgtgaatttcagatagctttttactagatttgtagttagcttaaaaaccaaaaaccaacatgaagtgtgtggctgatgaatacctctacaaaataagccatgttacaatgagacgattagaaaagctcacttttgctggaaacatcccagagaggttcgatgtctgcctaagctgaagatgtggaagtatggttacagggttgtggacactagttagataactgcttaaaagcttatattaaggcaaataaaagctgattgctagaaagcaattatgaaaatg

SEQ ID NO: 1315 - DNA, 2939 bp, Homo sapiens
cattttcataattgctttctagcaatcagcttttatttgccttaatataagcttttaagcagttatctaactagtgtccacaaccctgtaaccatacttccacatcttcagcttaggcagacatcgaacctctctgggatgtttccagcaaaagtgagcttttctaatcgtctcattgtaacatggcttattttgtagaggtattcatcagccacacacttcatgttggtttttggtttttaagctaactacaaatctagtaaaaagctatctgaaattcacaaatatcatgtgtgtgcgtgcgtgcgtgcgcgtgtgtgtctgtattcatagtgactgcttttggttttaaccagtttagtatcgttactgtgtggatcgtcgcgctgcagtattgacttggaatcctgaccatgtccatcccaaaattcagtcctcagttaacggatcatgtttgcaaaaggtcactgtgaggctgcatatttcagaaagatgtccttaataagggaagtcatgtataagatgttttctaaaagacttttcagtattacaactaatactattattatccttctttttttatttagataattcttttaatttaaacaaaggttcactatggaaccagacaaatctcattagccatgtgttaagtatttgctactttaaattgttttacaactgatttcagcacattctatccttttttttttttgaaatggagtttcgctcttgtcacccaggctggagtgcaatggcacgatcttggctcactgcaacctcagtctcccaggttcaagtgattctcctgccttagcctcccgagtagctgggattataggcacccaccaccacgcccagctaatttttgtattattagtagagacagggtttcaccatgttggccaggctggtctcaaactcaactcctgacctcaggtggtccacccgcctcagcctcccaaagtgctgggattacaggtgtgagccaccgcacctggcctctgtcctcttttagtctagtgtctggttttctagcaaacagtaaatttaaacaagtaaactattatggtttccattgcttacaaaatgattttcctttacattcttatcatgaacactattttaagcatcaaatgcaatcatctaaaatataaaggtcaatcatttataatagaaacaccttgaccacaagcccttgattgaacattttataatatttcatctacttattaaaacaaataatttcccttgggttggaggggaagtgatttcataaattaattagaaagccatctttagcatattgcttatgtctggatccatgtttctgaggaaaaagacattctcaggtgatgtatttttttcatgcattagtatgcatttttaaaaaataatgcatgtttctttaataattaattttcatcttctataagatgccatgtgaagaagttgtggaaatgtagaataaaaagctaaagctgccaaatttctgttgaactcttaaaaacagctcatgtttgtttgtcctctcgggttgtggcctagcctatttgcaatgtaatgaagctgcagggttcttgtatagctaaagcgttcaatgcatttcacgtgctgtggtggatgtgggtgctgtagacaggcttcttctcttcctgctctcaaaatacctcggcttgacatttggacagatcctgtcattgtttaagctgagcaaaaaaccacacaaaagttgtgtaagagatgagataacaaaggagcgagagaaatctcatgtgaatttccaagttttaattcgttctccatgaaggattttcatttcagtgaaagtcgcagcagaagagggaactttctggagtttttgagaatgccaaaccacatttttatcacacttctttggaaatcaatgcctttgcatagaaaatcaaattcagggaccacaaagaattttcagtgggaatgtctagtctgaggggtctgaggttgtttttactttattgtgttgtttaaatattttaaaaatatctttagcgtttggtcttttttttttctgtaaacatttaatttggtctgagaaaagctgaatgtttgggtgtgacgtttgactgaggtggattggggctgcctgtggacattagtgaacaggtggtaggcttcaggaatatccagttttaatcagttgcatttggtacagaattttgagtaatggtgaaaattgttgtctttggaaagcacaaaagaaacctggaaaggcagttcggctcaggtagctacacataacattgtgtatgattttcacttcaaagctgtctggaaggaaatgcagtcagctccagctagtactatttatgtacccagataactaagatattgtttcatggccttgccttagtcagaggcccttttctctgtcctgaacccccaggtatgggtgaaattggaaattactaatctattggaaatcagttcctgacatagtaaagtttgctttcataactgcagcaaaaaaggtcaacttgccaagtcactgctgccatgtgtgtactgtattattttcagaaaaaaatataatagtctgagtccaagttatcttgatttaaaattgatagagaaaagaaactgtcgagcaagttatataacaactaacaacattgcactttctgtatatgaaatcaatatttaaataacttatttttctccattgctgttcttaaaaacattgtaagtagctgtaatataccagtaccaatatgttcttgcaattgcttcagcccaagaaagctgtgtattgttttaaaaattgtaaaaattattgtgatgattcatttagcataaagagaggtggacggaagggttttcctatgtatcaaaacttgtctataattatgtcatctatgtacctagaaaaaagtaaataaatttcttcagttgaatatgcc

SEQ ID NO: 1316 - DNA, 1190 bp, Homo sapiens
ttttggtgccaatataagaatcttatttactgctttagtcaagaaggagatgttatttcacttgtgacttcctcccaagtgaatgagtatacaatttaacaaactaacacagttcagtttattaagttacaatctgtaaccacctaatgtagctcagtgtatggtggatactagatataaacaagagtagggaagtctttggcacctgcatgatgcgtgccggcttttaaattcagaaagatgagaagctacaatgcaactttttttttaatctacagataccgccaaaagaagaaatgtttatcagattttgaatgacatagctgtaagttggcggttggcagctttccacataaaatttcatcagcaagtgaaacttgattacagcccaaactagacaaggcaattcaggtgcccagaccctgaagtccacgtgagactacaggagaacgtgcattatggtgcttgccagccagtctcttgaggaactgcctgtaacagtcatggttgtggggagaaacaactccattttttttaagttttttttttttatggtattaaatataagtcttagcacctttggcatttttgtccaaacagacttcgacatatgaagtggggacataaccctcttcatcttcatttctccgaatgcgggtccagccatcgcctttgtcttcctctatgacatacaatgtttctccttcaactacggaaatcgttccttcattctgacctgaaaaagcaatatcaggatatgttagatgtcttggcaaatgcagggaggaagcaaacagtggccttcgcaatgaaacaagtgtcgtcgaagatgaagtccacacaaaattcaccccactcggaccttctcagatgcacggacccctcacccactgcctcaaaaccatctccttctgcacagaaatgtccaggttcttacctctgtctctctagggaccctctctaagtcctccagggccctctttctcctccctcccagaatggtaagtatttctcactggataaatctttggttctcttctctagtcttcttctgtctcacttggatctctctcaggagaaaggtaccctcgtggctccaactgcttctcttttgtctgttattttttgggggggttgtgggggatggagtcttgctcttgttgcccaggccagagtgctgtggtgcaatc

SEQ ID NO: 1317 - DNA, 7734 bp, Homo sapiens
  SITE (648): n equals a,t,g, or c
ttttggtgccaatataagaatcttatttactgctttagtcaagaaggagatgttatttcacttgtgacttcctcccaagtgaatgagtatacaatttaacaaactaacacagttcagtttattaagttacaatctgtaaccacctaatgtagctcagtgtatggtggatactagatataaacaagagtagggaagtctttggcacctgcatgatgcgtgccggcttttaaattcagaaagatgagaagctacaatgcaactttttttttaatctacagataccgccaaaagaagaaatgtttatcagattttgaatgacatagctgtaagttggcggttggcagctttccacataaaatttcatcagcaagtgaaacttgattacagcccaaactagacaaggcaattcaggtgcccagaccctgaagtccacgtgagactacaggagaacgtgcattatggtgcttgccagccagtctcttgaggaactgcctgtaacagtcatggttgtggggagaaacaactccattttttttaagttttttttttttatggtattaaatataagtcttagcacctttggcatttttgtccaaacagacttcgacatatgaagtggggacataaccctcttcatcttcatttctncgaatgcgggtccagccatcgcctttgtcttcctctatgacatacaatgtttctccttcaactacggaaatcgttccttcattctgacctgaaaaacatatcaggatatgttagatgtcttggcaaatgcagggaggaagcaaacagtggccttcgcaatgaaacaagtgtcgtcgaagatgaagtccacacaaaattcaccccactcggaccttctcagatgcacggacccctcacccactgcctcaaaaccatctccttctgcacagaaatgtccaggttcttacctctgtctctctagggaccctctctaagtcctccagggccctctttctcctccctcccagaatggtaagtatttctcactggataaatctttggttctcttctctagtcttcttctgtctcacttggatctctctcaggagaaaggtaccctcgtggctccaactgcttctcttttgtctgttattttttgggggggttgtgggggaatggagtcttgctcttgttgcccaggccagagtgctgtggtgcaatctcaactcactgcaacctccacctccccggttcaagcgattctcctgtctcagcctcccgagcagctgagactataggtgtgcaccaccacacccggctaacctttctatttttagtagagatggggtttcaccatgttggtcaggctggtctgactcctgaccttaggtgatccaccagcctcagcctcccaatttttttgttgtgtgtttgtttgttttgagacagagtcttgctctgttgcccaggctggagtgtgatgccacttgtcccgggttcaagtgattctcctgcctcggcctcccgagtagctgagattacaggcatgtgccaccacgcccggctaattttgtatttttagtagagacgaggtttcaccatgttggtcaggctggtcttgaactcctgacctcaggtgatccacccgcctcggcctcccaaagcgctgggattacaggcgtgagccaccacgcccggcccaactgctcctctttaaacactgtcctcacatattgcttccattctggtactttctgcagccaagattccacttttcccactgtctgcagcacactgccacctagacatggccccaacacctgaaacaacatagatgaacctggattcactgttcttcctcctaactatatcctcctgcttttccacttccctagacctctctgtcctcccaggaatgcaactctgggagccgtcttggatttcctctcctttttgttcctggcttttgatcagccccgaatatatgcagtttgtcaatggcggcatctctgtatccattccttgaacaaggcccccaagaccttctgctaggatcatttcaaaggctgcccaccaccccccagttttctgcaaggcaaagagtttagggagctgttaacagggcaacagggtacggtgggggatggttggaatatgaagtaaaactgggaacgtttaaactggtacgtctttcttattttgtcacaatgaacatttagtctattaaaggctctgaaaagtcctgtagtaaagaaatctgtaaaatttatttatcccagggcttcccaaacttacttgagctctgattgctagttttaaaaatttattcattatattaaaatgcaactttttcgtaattttatttatttatttatttattttttagagagggtttcacactatcgcctaggctggagtgcagtggtacgatcatagctcactgtagccctgaactcttggcctcagcctcccaaagtgctgggattacaggtgtgagccactgagcctggcctgagagcttctttcatggcctccttattaacgctctgcaggacatcgtttcaaggttcattggtttagaaacactaagctagtttatcttttctttcttttttttgagacagagttgccctctgttgcccatactggagtacaatggcacgatcttggctcactgcaacctctgcctcctgggttcaagcaattctcatgcttcagcctcccgagtagctgggattacaggcgcccgccaccacgcctcactgatttttgtatttttagtagagacggggtttcatcatgttgggcaggctggtctagaactcctgacctcaggtgatctgcctgcctcagcctcccaaagttctaggattacaggcgtgagccaccatgcccggcctgggctagtctttctaaccatcctccatgtcttccagtggatcctacacatctgacgatgactttcctaaggtacagctctgactgcatcgacaccctgctaggggacctcccatagctcctcaatgtttgccacataaaacccagatgtttccctacctcgcccccattggcacttcccactctttagtgccacatttcactattaggacttaagacatctaagctccagccacaccacacccatttctggccacaccccccatgccatggcaagttctccaaacttccttaaggaagcgacctcattctcccctgtcctccccgttcctctgtatccctcttctggcaaacactgcaaactgcctgctttttttttttgagagggagtcttgctctgttgccaggctggagtaaagtggcacgacctcggctcactgccacctccgactcctggtttaagtgagtctcctgcttcagcctcccaagtagctggaattacaggcatgcgctaccacgcttagctgatttttgtatttttagtagagatggggtttcaccatgttggccaggatggtctcgatctcctgacctcacgatccgcctgcctcggcctcccaaagtgctgggattacaggcgtgagccactgcacccagccgctgcttgctccttaagtgtgtctgcctgatttccctctgggcaggtgccatatcatacgacctgcatccccccacttcatgggcctttacaagacaggagcgctatagatactagatattaaatgaatggatgaaatgatcatcctccctatcgtctgctgcagtgaagcaagctctctggaagctgttaagttatacgaaccaaaagtcaaaatatacaaccaaataataatcataccatgagtaggataaaagcatagtagagaaggatctggaaggctgctgctgcagctttttttttttttttgagacagagtctcgttctgtcacccaggctggagtacagtggcgctatctcagctcactgcaacctccgcctcccgggttcaagtgattctcgtgcctcagcctcccgagcagctgggattacaggcgcctgccagcatgcccagccagtttttgtatttttagtagagatgggatttcaccatgttggcgaggctggtcttgaactcctggcctcaagtgacctgcccgcctcagcctcccaaagttctaggattacaggtgtgagccaccatgcccggccagatctggaaggcttctaaagaaagttctggtcacagaaagagaagagtgtggctaggcacagtggctcacacctgtgatcacagcactttgggaggctgaggcaggagtactgcttgaatccaggagttcaacaccagcctgggcaacatagtgagaccctgtctctactgaaaagtacaaaaagtacaaaagtacaaaaatgagccggacatggtggtgcttgcctgtagtcccagctactcaggaggctgaggttggaggatcacttgagcccaggaggtcaaggctgcagtgagccatgattgcaccactgcactctaacttgggcaagagagcgagaccctgtatgaaaaaaaggaaggaaggaaggaagggaaggaagggaaggaagggaagggagggaagggaagggaaggaaggaaggggaaggggaaggggaaggggaagggaaggtaggaaggaaggaaggaaggacaaaggaataaaaatgatcagaaggaaggaaggaaggaaaagtgaaagaagagtaactcagatattatggtttataaaaggcaggggaatccagcagacatgaaatgtcaccttcaaatgtgtagagagctttgcacgtccctatggcagggaggggctcctcatcatcaaactcgtcgtcaaaatccgtggccagcaccttcatctcactctcctgactctgctcctctgtgtaactgccatctgggctgctcaagaaaggaaaacacaaagcaactaaagcgactgaccccagggaggactcagattgagtccctgcgactggagagcacttgcaaccccgcccctcagcgagtgctgtaactgaggccatggtaaatcatcgcacgctcagatcacccatcccatgtggaattataaatctgcatcatggaaaaagtgacaggtcaatcgcaacagacattttggcattgaacaagtgccttatggtcattccagattccaaaatttagaaataaatacaaagccaacaggctcccttgccagaggcaggcgctgtgcagatactgtacctctcacggtcctgggcgcagttgttgactgtgggtgggttctggctgtcgtacagtccgctctgccggcgcgcctgctcgctgcgtgctgggagccggccttcaacctcagccagccaggcctggagacaaaagcaatgagagactccaacctaaggccatctgagggtcagcccagagtgtcctaaggtcccaaaggccatctgagggccagcccggagcatcctaaggtcccaaactcaggggctactcttggccatttaacccaatgtgaggaagtccacgtgggggcagaatggccacgttttctgccttcgactgttcaaatgtactgaaggacggttgcttccatttcacccgaagttggagacatagaaacaaactcatatttatgtggttgcccacgatggggcagaaagcacactggactatgctatccccttgggcttttaagcagcagtgcagtcttggataagtcacttctagttccttcttgaccatgaggtcgccctgtgatacctgaaggtacagccatgcttaaagcagtgactcagtttgaaagccacacttcctattttttaggagtgtaacttttttttttgatagaaatgaaacttgtacttaaaaattaaagtagataaaatgaccttcagcatttgaaacagtataaacaagtcaaaggaataaaaatgacgagaaggccgggcgcggtggccacacctgtaatcccagcactttgggaggccgaggtgggtgaatcacttcaggttgggagtttcagaccagcctggccaacatggtgaaacgctgtctctactaagagtacaaaaattagctgggggtggtggtgagcgcctgtaatcccagcactttgggagaggtgggcagatcacctgaggtcaggagttcgagaccagcctggccaacatggtgaaactccatctccattaaaaatacaaaaattagctgggcatggtggcacatgcctgtagtcccagctactcgggaggctgaggcacgagaatcactggaactcaggaggtggaggttacagtgagtcgagactgcaccactgcactccagcttgggtgacagagcgagactctgtctcaaaaaaaagaataataataagaaaaggaccgttctaagttctaaatgctcaaatgaacattaatgatggattctgaaaagaatggaaaaagctggccaggtgtggtggctcacgcctgtaatcccagcactttgggaagccaaggtgggtggagcatctgaggtcaggagttcgagaccagcctggccaacatggcaaaaccctgtctctaccaaaaatacaaaaagtagccgggtgtggtggtacacacctgtagtcccagctactcaggaggctgaggcaggagaatcacttgaacctgggaagtggaggtcacactgaggtgagatcacgctactacactccagcctgggcaacagggcgagacttcatctcaaaaaaaagaatgaaaaaagccatagttgacccttcattgctggaaacaatctattctgactggtagaatcggttgctaatgtatttttccatgctctgtagtctttaaacgtggtagggagagtgggttcaggaggcttttgttgacagcttttgagtgctcctctccctccctcaagctttgattatttatgtttcctgcttgtttctcctttgtgtttgctgctggttctcacacacaccctttccataatgggcctgctgagagaacaattgtatatttcaggggatttttttcattgcttctttgattcactgggataacggatcgctctatactcccaattttattaccatgagatgaagcagaataacttaaagtacaaaaaatactggccaggcacagtggctcacagtggctcacagctgtaatcccagcactctgggaggccaaggtgggaggatggcttaaggccaggagttcaagaccagtctgtgcaacagagcaagacctcaactctaaaacaaataaaaaattgaaaaataaaagttagccaggtatggtggcatgtgcctgtaatcccagctcctcaaaggctgagccaaggagatcaaggctgcagtgagctacaagcatgccactgtactccagcctgggcaacaaagcaaaatcctgtctctaaaattaaaaaacaaccccgccaaccccgcaccgtatacagatacaacattaaacattgtcaggttttacagccacgattaagataggctatgatgagtaggagaatgttcaacggcgaagagtgtatttttcctttgaccataactcctgaaacagcctgccattcccactgtgtacctcccagtgagaggatcgtcagggccccacaccattctacaccgaggaacacctgttcttcgtttccaacaaagctttccacaacagaagtttcatacctcaaatttctgggtctctactcgcagtttctctatattttggctgacttctgctaatttgtgatccaaactggctgggtctcccatctgaggattctttaggtagacatctttcatttttgttatggc

SEQ ID NO: 1318 - DNA, 371 bp, Homo sapiens
cgttctctttatagccccacctgggcaagcgtgagtgcagctctacttggaaaaccaacagaaaccgaaccaagtgtgagaggaaatcacagccaaaaggagctgatgcagggacacgctctgccttttaagtaactccatctaaacagcactagcacatctgatcaactgtcaatttgggccaggtgcggtggctcacgcctataatcccagcactttgggaggcagaagcaggcagatcacttgaggtcaggagtttgagaccagcctggccaacagagcgaacccgtctctactaaaaatacaaaaattagccaggcgtggtggtgcacacctgtaatcccagctactcgggaggctgaggcaggaga

SEQ ID NO: 1319 - DNA, 477 bp, Homo sapiens
aaaaattgtgtctgtctttcttccttaaacaatacagtataacagtaatttgcatagcatttacattaggcattttgtgtagcattgtattaggtataagtaatctagaaatgatttaaattatacaggaggatgtgcataggttatatgcaaatactaggacatttcatatcaaggacttgagcatctgcatgcagattttggtatccatcagagttcctggaaccaattcaccacagataccaagggacaactgcacagattaaaaccttaatgcattactaccgtgtacccaccataataactaaaatggaagaaatagaaatgctaggtattggtgacgatatggagcaactggaactcgagtactggtgaatatacccatgacctagcattccttccctaggtattttctcaacagaagtgtgtatgcctttttaccacaagacatatactagaacattcataatggcatta

SEQ ID NO: 1320 - DNA, 650 bp, Homo sapiens
agccttcaggaggaggaaattctgacacatgctgcaacatggatgaaccttgaggacattatgctaagtgaaataaaccagtcacaaaaggacaaatacatgattggacttacataaggtacctagagtagcaaggtctcttcatagagacaaagtagaatggtggttggcagagggagggagagagggatggggagttagtgtttaatgggcccagagtttcagttgaggaagatgaaaaagctctggagacagatgttcttacaacaatgtgagtgtacttaatgccacagaactttacacttaaaaatggttgaaatggtaaattctatatgtattttgccacaataaaaaatccagatacaaactagtacatactgtgcaattctttttatatacagttcagaaccaaggaaacctactctatgatgttaaaagtcagggcaacgattgcctttgttggttgtggggtagtgactggatgtgagtatgaggagggactacagtgctactcaggttctaattctttgagtgcttgttacacaagtgtgttcatgatgagaaaatttatcaatgtgaactcttaggatctgtgcttttttttcccatatgtattttatacttgaataaacaagactttttgccttcta

SEQ ID NO: 1321 - DNA, 1310 bp, Homo sapiens
caattcatacacatgcaatcatacatgcacactgactctgaactgggtgaactctgtggagggaggcccagaatgggtgctttcaccaagaatttgtctgtgtacaactctagatggagtgggccagcagtagctgccagtctttctcccctgcagcttcctctgcttctggaatgaaccatgtatcctggagaccctcccaatggatgagagtggaaagacatcagtacaactggacttggcttccggaaaaagattgcttttgaactttggctctcttcacttgtatgctatcattgatattcccagtggtgcccgtggaaagagggagaaagagaagctgaacaggagaaagacaaacagaaagaatagagaacaggaacgaggtggagagcaagactgacagagaaagtgtgagcaatgatgagaattttaattcaccaaggagacgtgtttttggtttgtccccccaaaccccgcccgccccactacaggttatggaaagaatcatggcattactgaggagtaaacctctctggcacactgagcatggtcagggcattggtcagagggacagagcaaggaatgcatcctgagcccacagctttgaccactgtgatccagaagagaggtgcactacgtgggaagtgctgattccacagcatgcagcctggtaggggaaggaaaataaaagggtgtgaagaaggaatagttttataatctcggaagatgataccaagagcagaggcaacaaatagaggcctggcctccaggtgccggatccagacacctgacctagaatgcctgcccgctatccctgtggcaggaaatatcccctcatgtcccagggaattgcagatgggtcttctatacccttctacctgcccttagatctccatttttatcaaatagtacattgcattttgaagttttgggttttgtccttcatctttccctttcccttcaaatcttttaatggtaagaaagcaagtgaagcttggtgcaagctaaaatttttaaatggtgtggaaatgcaaataataccaagtaaaataatacagatattattaaagtttctggttttgaggtgttgtagataaatgtatttatgtgcctagtggggaatccaatattatgaatatgaaaaagggggcaataaaagggtatgtaaaatatgtatgaagaaaaggtgtacaaaaatttgcccttatgcacggaactctgtttctaagtgccaagcacagaaagccgctaaataaaatctttgcaattgttttctgcatgtttgttcatacagaaaaatcaaataa

SEQ ID NO: 1322 - DNA, 1310 bp, Homo sapiens
ttatttgatttttctgtatgaacaaacatgcagaaaacaattgcaaagattttatttagcggctttctgtgcttggcacttagaaacagagttccgtgcataagggcaaatttttgtacaccttttcttcatacatattttacatacccttttattgccccctttttcatattcataatattggattccccactaggcacataaatacatttatctacaacacctcaaaaccagaaactttaataatatctgtattattttacttggtattatttgcatttccacaccatttaaaaattttagcttgcaccaagcttcacttgctttcttaccattaaaagatttgaagggaaagggaaagatgaaggacaaaacccaaaacttcaaaatgcaatgtactatttgataaaaatggagatctaagggcaggtagaagggtatagaagacccatctgcaattccctgggacatgaggggatatttcctgccacagggatagcgggcaggcattctaggtcaggtgtctggatccggcacctggaggccaggcctctatttgttgcctctgctcttggtatcatcttccgagattataaaactattccttcttcacacccttttattttccttcccctaccaggctgcatgctgtggaatcagcacttcccacgtagtgcacctctcttctggatcacagtggtcaaagctgtgggctcaggatgcattccttgctctgtccctctgaccaatgccctgaccatgctcagtgtgccagagaggtttactcctcagtaatgccatgattctttccataacctgtagtggggcgggcggggtttggggggacaaaccaaaaacacgtctccttggtgaattaaaattctcatcattgctcacactttctctgtcagtcttgctctccacctcgttcctgttctctattctttctgtttgtctttctcctgttcagcttctctttctccctctttccacgggcaccactgggaatatcaatgatagcatacaagtgaagagagccaaagttcaaaagcaatctttttccggaagccaagtccagttgtactgatgtctttccactctcatccattgggagggtctccaggatacatggttcattccagaagcagaggaagctgcaggggagaaagactggcagctactgctggcccactccatctagagttgtacacagacaaattcttggtgaaagcacccattctgggcctccctccacagagttcacccagttcagagtcagtgtgcatgtatgattgcatgtgtatgaattg

SEQ ID NO: 1323 - DNA, 627 bp, Homo sapiens
agctacccagggctgagtgacagtggctacaacaggcttcagagtggcaccacttcagccactcagccctctgaaaccttcatgcctcagaggactccatccctgatctcaggaataccaactcctccctcgttgcctggcaacagcaagatggaagcctacggtggccagctggggtcctttcccacttcccagtttcagtatgtcatgcaggcaggcaatgctgcctccagctcctcatcaccacacatgttcgggggcagccacatgcagcagagctcctacaatgccttctcccttcacaacccttacaacctgtatggatacaatttccccacttcccctaggctagctgcaagcccggaaaaactgagcgcctctcaaagcactttactctgttcttctccttccaacggggcctttggagagaggcagtacctgccgtcagggatggagcacagcatgcacatgattagcccttcacccaataaccaacaggcaaccaacacttgtgatggccggcagtatggggcagttccaggctcctcctcccagatgtccgtgcacatggtttaaaggccagtccaaacaccacggagcatttggcaatcaaggccccagagtctc

SEQ ID NO: 1324 - DNA, 627 bp, Homo sapiens
gagactctggggccttgattgccaaatgctccgtggtgtttggactggcctttaaaccatgtgcacggacatctgggaggaggagcctggaactgccccatactgccggccatcacaagtgttggttgcctgttggttattgggtgaagggctaatcatgtgcatgctgtgctccatccctgacggcaggtactgcctctctccaaaggccccgttggaaggagaagaacagagtaaagtgctttgagaggcgctcagtttttccgggcttgcagctagcctaggggaagtggggaaattgtatccatacaggttgtaagggttgtgaagggagaaggcattgtaggagctctgctgcatgtggctgcccccgaacatgtgtggtgatgaggagctggaggcagcattgcctgcctgcatgacatactgaaactgggaagtgggaaaggaccccagctggccaccgtaggcttccatcttgctgttgccaggcaacgagggaggagttggtattcctgagatcagggatggagtcctctgaggcatgaaggtttcagagggctgagtggctgaagtggtgccactctgaagcctgttgtagccactgtcactcagccctgggtagct

SEQ ID NO: 1325 - DNA, 9392 bp, Homo sapiens
ggcttcctccagttccggagtccagtggctgaccgccttgctggagcggagatgcagccgccgccccgaaaagtgagcttggccctgaatggggactcctggcgggctgggggaacggagggagctaagggggcatccgacttgtggtaggagacggaaagtcggaaggggtcagaccccaaaccagaagtaacagaggaaagagctcagcacccccccggccccgccccctcaccgctccctgcgcggagtgttttttaggtccttgcgctggggtcttcatcctctctttgcccccacaggtgaagccggcccaggaggtgaagcttcgcttcctggaacagctgagcatccttcagacctggcagcagagggaggcggatctgctggaggacatcaggtagctcccccaacccccttcatttacactcaccttcgtcgttgtgcgccacttctccccaatatacatgtgctggggtggaggaacaggggccaagagctccccagccgacccatccacagccctcaccctaggcctggcctctccagatactggataggaatgctcccccacctaacccctcccaaccccctcccacccacataaacacacaggaaccctccctcaaagcccttgactccacaccactgcccccaaccccacaatcaaccttagggcagaatccctctccctcttccagacctgttggaaggctggcagacatcgtacccaggcccccatcagtcttcacctctaagcctacagatgaacctctggggtggggaggatcctgctggggcccggggcagtaaggtgagggtttcctgtgttgcagctgcccgaggtgatctcaaggactcccatcagtcccattccctctgggtgtagttacactctaggaacctggctccccccaaccgctccctcctgcccagagtagaggactgaggatgggagaacaggaccaaacataaccttatcccccacctcacccccgacctgcaatctccgcagatcctacagcaagcagagggcagccattgaacgggagtatgggcaggtatgggacttttctctggaccttacctcttgttccagcctctcttatatcaccagtaatgtctgtccatacctatccctattgtggtcaagagcagatgcctagagtcaagcagactggtgtcagatccctgctgtgtaattatagccatgtgaccttggacaagttacttaacctttcttgacctcagtttctttctctgtgaaatgggaataataataataccttaccttcatgtagggttgttgtaaggattaaacaaattaatgactataaggcatttagcaaagcaagtggcacataatgtacccaaagaatggtatgattatactctgatgtcatattctgccagttggggtgggtctttgaaagggaacttggttctgtgatggctttttcaccaggcactccagaaactggctggcccattcctgaagagggaagggcaccggagcggtgagatggacagcaggtgggccctatggagggggagggccacagaggccaaaaagtgatggggagctcagccccaggaacctgtggggatgaaggcctagcaagtggggaaggcacgtgagctgtaggtagagctgacacagcagcagcagaggagctgacccagcaaggacactgtgggtggggtggagggcaggagtgaggcttgtggctgagctaatgggctgatcgattgatgggctcccagacaagggaggatgggaaagcactctgtctcccatggtgttggtcagggggcagggggtgggggtggtctcatgaagctgtggagtgctctcctcctcaacacagaccttctctggggaggggcaggacagtgttcggtgcctggcgctgcctgctggatgccaccgtggctgggggccaaacccgactccaggcgtctgaccgataccgtgacctagcagggggtacagggcggagcgccaaggagcaggtgcttaggaaggtatggctcagaggttggggtgaaggaagagctggcttgggaccaaaggtggtctaggtaaggactttgtgtatgcatcccaatagggaacagagaacctccagagggcgcaggctgaggtgctgcagtctgtccgggagctgagccgaagtcggaagctgtatgggcagcgggaacgtgtgtgggccttggcacaggagaaggcggctgatgtccaggccaggtggggtcatggagagtgaggaagcccaaggttggggaacagggaggtggggctgtctaggggtggagccaagtcaccaaagctgggcctgactctgatctcatattctcccacttggggtgggcctgactcctttctctcatctgcacaggctaaaccgaagtgaccatgggatcttccactctcggaccagtctccagaaactgagcaccaaggttcgagggatgagggcatgagtgggggcagggaagagggaggcagagtagtctagtggtttggaacataggtgcatatgtatgaaagactgggttgaatccaggctctcctacttcctgggtgggtaaccttggttaatttacttgatctctgtgagccttattttcttctataaaatggagagaatacccttctttttcagtcctttaatatgcatttattgaggatctgtatataataggcactgttctagacattatggatacagtggagaacactaccaatggagttcctgccctcacagtctggttaagagagacagacagcaaataaatacttagattaagatgaaaataaaacaaggtactatgataaagaataacaagggggtagaatttagagggaggcctctctgaataggtggcctaactgtcaagaaggagctggccttgcaaagatctaggggaagaacattccagagagaagaaatggtgagtgcaaagggtctgaggtgggaataactttgtaggctcgaggaactgagagagggccagtatggctggagtactgtgagcaagggaacaagcgcttgaaaagaggtcagagagattgcgggggccagctcatattgaacctggtggaccatggtaaggaacagtggattttattttaaatgcgtgcagaaggcactagaagattttgagcaggagttgtgtgtatgcaacatttttagtgtagtgccaggcacatagtaagcactcaataatgtgagaatccattctggatctggcttctcaattggtcttggaaggactctgggggtctagggcttcctattgacatcagtttaccctcctagctgtccgcccagtcagcccagtactcccagcagctgcaagcagcccgcaatgagtacctgcttaacttggtggctaccaatgcccacctcgaccattactaccaggaggaactgccagctctgctcaaggccagttttaacccagacacccctatccctcagcagggagggaaaggaggacctccccctgcttcttgatccccatgacagtgggtggtgcaggggatcttgtctgtttagagtgagtagatgatacatacatgcactctggttctgctcctagctggctgcatggcattgtacagtacacttaaactcttccgaaccccagattcctcatcagggataaccctttctctgcctatcttatagcactagtggggctcaaaggagagaatggatgtgaacgtgttttaaacttctaagtgctctgcacacgagggcctttctcatgaagaatgtcttcttctctccttcctatacctcatgcccatcacctgtcaaatctggaacgagcctattttacagtagaggtctgggggaagggtggtgtcagtatcttggggttctctctaggccctggtcagtgagctgtcagagcacttgagggaccccctgacctccctgagccacactgagctggaagccgcagaggtcatcctggagcatgcccaccgcggggagcagacaacctcccaggtgagggctgtggcctctaagagcttccccggggatcctttttacccttccctcccaatgcagccctctttgcttcacacattgtcctttttcttccaagaagtgctagggacagggttggagagtgagtcagtgaatgagtgactttgacttttcccaacccctaggtaagctgggagcaagacctgaagctgtttcttcaggagcctggtgtattttcccccaccccacctcagcagtttcagccagcacggactgatcaggtgagatcttcctgcttgttggaaccaggccacatataaaggcgattatgatttaggcctcctccattatctttgttttgtgttaacttagtgagtgtacaccgtggagagggggtttcagaactccagctcacctccctcccaacaggacacacacaaaaaaacacacctcagtccacctttcagtcacttgactgcgccatccttttcattctacctctgtcccttgacctggatcccatttctgaagctctgtatctctgtgtccacattacctgtgtccatgactgtaggcatgtgcccctttctctttgtccttgtccttggaggtcaagatagagtggaaaaaggagggaactggagagaaggagcagcctcaggtcctcctcacagcaccccctgacccattcaggtgtgtgtcctggagtggggagcagaaggcgtggctggcaagagtggcctggagaaagaggttcagcgcttgaccagccgagctgcccgtgactacaagatccagaaccatgggcatcgggtgaggtgggggggcacaggtgtcatgtgcaccttcttgtctcagcaagaagagctgagagaggggatcttggagccattgagggtgtcatggagctacagaggggagggaaaggtattttaaggtaacagtgtggcacaatagttaagagcacagtttttggagctagaccgacataggttcaaattctcttctgttgcttcctagttctgtagccccaggtaagggagtgacttaacctctctggacttcaatttcctcatcactaaagtagggccaataatagcacccacctcatagggaagattaaatgacataatgtatgtgatgcaactagcaaagtaccagtcccatagtaagtcatgccccacagtatttccacccacccctgttctctgccttcccaaccaggtactgcaacgactggagcagaggcggcagcaggcttcagagcgggaggctccaagcatagaacagaggttacaggaagtgcgagagagcatccgccgggcacaggtgaggcacacccctgaggttagagatcccaccttctcaggcaagccccactccctctactcctctttctgatggtgggaggaaggaagggagaagcagagagtaaacactgccgtcagccaggttccactaacttacttcctccccatggcaggtgagccaggtgaagggggctgcccggctggccctgctgcagggggctggcttagatgtggagcgctggctgaagccagccatgacccaggcccaggatgaggtggagcaggagcggcggctcagtgaggctcggctgtcccagagggacctctctccaaccgtgagctcctcccccaacactacccatccttacttagaagggaaaaactccagtggaaggcaaaccctataaaactggaatcacagttgtgcctaactcaaagggttattacgaggcttaagtgaaatcatcatatatcattctttgcataatttctggcatagagtcctcagtacatttttattatgagcataatagaatgattaagaagtagggttctggggcagtctgtaagggctttgagtaccagccactccacttatgagctgtgcaatctcgaaaagtgacttaacctttctgaaccccagtttccttgtaaataaagtgaggttaatagttgtgcaaaactattaacactgggtcattatgaagattaaatgagacaatatacacaagatactttgcattgtacctggcacatagtatgcactcaattactgtaactctattactgttagtattatcctgctctgtggtgactgtggttgtgtacatggtgagtggatgggtgcacctgccttggaggatccatggtgtcctttagaggaaagatggaagagtgggagatagaaccagtgcttgagagtgggccccatatgaggtctgttctttgcccctctaggctgaggatgctgagctttctgactttgaggaatgtgaggagacgggagagctctttgaggagcctgccccccaagccctggccacgagggccctcccctgccctgcacacgtggtatttcgctatcaggtatgaatgggggtggggacctctgatgggcaagggtgggggacagccaagtcctgaatccttcgtgtgtggcccaggcagggcgtgaggatgagctgacaatcacggagggtgagtggctggaggtcatagaggagggagatgctgacgaatgggtcaaggtgggtatgggaccccgggctctgaccttgggttgggggcagtaggagggacttctctgtggcctccatagacccttctaggcaaagctagaagcctgagtagaagagagccagggtcatggactgctgaggtaagtctaatatctgttcacattgctgggtgagcaggctcggaaccagcacggcgaggtaggctttgtccctgagcgatatctcaacttcccggacctctccctcccagagagcagccaagacagtgacaatccctgcggggcagagcccacaggtacgaaagggaaattttgggttagaggaccctgggtatggagaaaaattgttaggggttgtagccctggggtgtcatggtcctggggcaccgctacccacctccctctcaccgtctctcctgggcctctgtagcattcctggcacaggccctgtacagctacaccggacagagtgcagaggagctgagcttccctgagggggcactcatccgtctgctgccccgggcccaagatggagtagatgacggcttctggaggggagaatttgggggccgtgttggggtcttcccctccctgctggtggaagagctgcttggccccccagggccacctgaactctctgaccctgaacaggtgaggcttaccttctccctgaactccccaggcacctctgggttgaccctctcaccccaatgaagcctcatattcatcttaatgcctcctctgctccccagttttacctcctacagtggcctgggcctcccatctcctatgggggggcagggaaaagggaaaccaaggcagccttcataggagtttggggggtcctactttagtgctggatagatctgagttcaaatttctattgtatgacttgggcaatgatttaacctctctgagcttgtttcttcacatgtaaaatggggataatacctactttagcaggctcactgtcataattagagataatcgaggtaaagccttcttttttttttttttttttgagacagagtttcgctcttgttgcccaggctggagtgcaatggtgcgatctcagctcaccgcaacctctgcctcccgggttcaaacgattctcctgtatcagcccctcgagtagctgggattacaggcacgtgccgccacgcccggctaattttctatttttagtagatacagggtttctccatttggtcaggctggtctcaaactcctgacctcaggtgatccacctgccttggcctcccaatgtgctgggattataggcatgagccactgcgccccgccgaggcaaagcctttagtgcagtggaatgcagaaggtgtttcaatataagatatctgttgttataatgtatatacatacagcagaaagagaataggagtgggcatcaggagaactgggttctagccagcactctgccaataactggcttcgtgattttggacagctggcttaacctgggtctcacttctaacataggagtcatattattaaaaatgcctacctcatggggtagtggtgaggattgaatgaattagtacacgtgaagtgctagcagaacacttgagacgtagtaaacataagcgttcaatacatattggctgttgaaatatttgtcagctacacccccccccccaccgaatgcaagcatttggccacttcctgtattgagaagtgatgaggaaggaactggagatgggatgagaggaaaagctggtaaaacctccccacatgccaggaataactctgtgcccaccccacctccagatgctgccgtccccttctcctcccagcttctccccacctgcacctacctctgtgttggatgggccccctgcacctgtcctgcctgggggtgagtggaaggaactgggagccctgggaggctaacagacaggaagaaggaggaagcttggactcccaggtcacgctctggtcctctccgtgccttcaggcatcttgcttggtggagagcacttgcctgggctctggagccaggctgactggttcaggtcccgctctgtcatctccaagtgtgtggtgggattctgaacctgtcttggcctcagtttatgttctttatgaggtaaggaaaaggtactagcttattgaattcttatgagagttaaaaaagatgcctgtggactacacagcattgtgcctggcacacagtaagtatgcagtcactgttattattttaaaaattagctaacttctctcacggtgtcctcccaatatgcaccttttgctcctagtgtccagatacctagctttgtatcattattttttctgatgcccacttttttttttttaaatgtctatagcagttttattttattatttattttagattcaggaggtacatgtgcttgtttgtcatatggatatattgcatactggtggagattgggcttctagtgtacctgtaactcaaatagtgaacattgtacctgataggtaatttttcaaccctcgcccctgcctccactcctacctttgccccctttggagtcctgggagtctgttatttccatctctatgtccatgtgtacccgttgtttagctcccacttataagtgagaacatgcaatatttggttttctgtttctgagttagttcacttaggataatggcatccaactccattcatgttgctgcagaggacatgatttcattcttttttatggctgtggaatgcctgccttttctaaaactttctggtacttccaccttgtccacaaggagtctccctccctggagttaccaccatctccaccaccccaagttcactttgcatgacttagcacttagtcatttattgtg

SEQ ID NO: 1326 - DNA, 5645 bp, Homo sapiens
taacatcttaatattgagtttattagataaagacaagaaaaaatggggcttggggaaattggggcttctggggttttaaggagcatgctgaaagaacgtaagaaacaaaacatgaagggaaatggaaatgttaccctcactcccctcctccctgctgtccagtgtggatgccacctccagcctgcaggacggagccccctcccatcatcacacagtgcacctgggctctgcagccccttgcctccattgcagccgcagcaagaggcctccacttgtccgtcagggacgctccaaggaaggaaaaagccgcccccggacaggggagaccactgtgttctctgtgggcaggtggggcaggtgctccagggaaaggggggctgaggtagggggcccagtgatcaggcacctgatcccaaaagtgggccttggctctttcctcctggactgggagctccggcagaagtcaggctacacaatgtgccccacaatctgagaaggcctcccctaccttaggccagagggaagtagccaccaaactcaggatgtccctggtcagaggggagggccaagcagcctctgagttgtggtcctaaaccccagtgttccctcccctcccaggttccgggtgacacacattgagaagcgctatggactgcacgaacaccgtgatggctcccccacagacaggagctggggctctggtgggggacaggacccagggggtggtcaggggtctgggggagggcagcccaaggcagggatgcctgccatggagaggctgccccctgagaggccacagccccaggtcctagccagccccccagtacagaatggaggactcagggacagcagcctaacccctcgtgcacttgaagggaaccccagagcttctgcagagccaacactgagggccggagggaggggcccaagcccagggctgcccactcaagaggcaaatgggcagccaagcaaaccagacacttctgatcaccaggtaggaaaacacagccgggactgcactgggctgggctcttattgctctctactctggggggcactgataggacctactcctggtctctcattgttgacccctcccctttctctcaggtgtctctaccacagggagcagggagtatgtgaggtgagtctgcctgagccctaaatgaggtaatctcatcttcccatcacctacttaaactatttaagcctttcggctccctgaaccccccgagtaaactgcaggcttagcctttgctataaatcccttggtttggtggtggaggtagggaaggtcctggagccccaggggaaaagctggacacagcttgaacaggaagcaacagtgttattcttcctcttctccaagtctccttcattgtgctgatggactaccagctggcagggccagggggtgggtgggcgtgaaagccctcccctccactggacagcactgccccccagctgagggaccagctctacttccacctggagttgcacagtctcaggctgggggcctcaggagaggtcacagcccctcagtctcttctccttcccctgcctgcaacaggctgcctgccccgccttccccaacacctcgctccatatgatagagcgtggcagctgggagcaggcccctgcccgtggtgggcccctaaagcaatagcaccgtaggccccctgccctcttagcacaagaggcccaggccctggcctggccttcgtgccctttattcattgtcaataaatccgctcagaccattacagctgcttcgcatcctggctccagctcctgattcccaaggcctgttcctctccccagcccaaccccagtgaccctggcatccagagtggggtgggtcatggagccagggtggggaaagaggtgggccagaactactagagaccttgatggatggtttccagccccagagatttcaggcatttcaccaccctagatagggtcatgacagaagagaaggtagttccggtcctagagatgatagaacaatgggaaaaaaaggagtgggttccagctctagaaatgggaaggggcaaggtttccacccttggaggtgagggtggaaataagggcgattccagcttttggctgtgttgctctggatcattgatggtgtggtctgacagcttgaagatagggacagcagcatcactgggggtcaaggcttccctggccttcaggtgaggggatctgggtggccaggatccggggctttagccggcgggggaggtggtggacgcatctgtagggaacacacagttagtgctccagagttctcccttaagggtatccctgtctattccctcagccctgcagacaaaacaggactggttggaataacccctctacatacaatctcctccaaggcaagggcccttaccggcctgagtcgaggtgccatcatgtccaggaacccagggaagtccagggctttgtctggaaataagaaccacaagtcagtcttcagactttgttttgttcaatgctgtatctccagcacttaggacagtggcattctataaatatttgttaaattaatggtcaccatcctagaccataaaatccatcactctatccactgtcctcaacatttattgggcaactgctgtataatcagctctgctcaaggtacaaaactaagggagataggatgcatagtgctcccacccccaatggctgtcaagaaaccaataatgaaacctcaacaaacacaataaatgactaagtgctaagtcatgcaaagtgaacttggggtggtggagatggtggtaactccagggagggagactccttgtggacaaggtggaagtaccagaaagttttagaaaaggcaggcattccacagccataaaaaagaatgaaatcatgtcctctgcagcaacatgaatggagttggatgccattatcctaagtgaactaactcagaaacagaaaaccaaatattgcatgttctcacttataagtgggagctaaacaacgggtacacatggacatagagatggaaataacagactcccaggactccaaagggggcaaaggtaggagtagaggcaggggcgagggttgaaaaattacctatcaggtacaatgttcactatttgagttacaggtacactagaagcccaatctccaccagtatgcaatatatccatatgacaaacaagcacatgtacctcctgaatctaaaataaataataaaataaaactgctatagacatttaaaaaagaaaaaaagtgggcatcagaaaaaataatgatacaaagctaggtatctggacactaggagcaaaaggtgcatattgggaggacaccgtgagagaagttagctaatttttaaaataataacagtgactgcatacttactgtgtgccaggcacaatgctgtgtagtccacaggcatcttttttaactctcataagaattcaataagctagtaccttttccttacctcataaagaacataaactgaggccaagacaggttcagaatcccaccacacacttggagatgacagagcgggacctgaaccagtcagcctggctccagagcccaggcaagtgctctccaccaagcaagatgcctgaaggcacggagaggaccagagcgtgacctgggagtccaagcttcctccttcttcctgtctgttagcctcccaaggctcccagttccttccactcacccccaggcaggacaggtgcagggggcccatccaacacagaggtaggtgcaggtggggagaagctgggaggagaaggggacggcagcatctggaggtggggtgggcacagagttattcctggcatgtggggaggttttaccagcttttcctctcatcccatctccagttccttcctcatcacttctcaatacaggaagtggccaaatgcttgcattcggtgggggggtgtagctgacaaatatttcaacagccaatatgtattgaacgcttatgtttactatgtctcaagtgttctgctagcacttcacgtgtaccaattcattcaatcctcaccactaccccatgaggtaggcatttttaataatatgactcctatgttagaagtgagacccaggttaagccagctgtccaaaatcacgaagccagttattggcagagtgctggctagaacccagttctcctgatgcccactcctattctctttctgctgtatgtatatacattataacaacagatatcttatattgaaacaccttctgcattccactgcactaaaggctttgcctcggcggggcgcagtggctcatgcctataatcccagcacattgggaggccaaggcaggtggatcacctgaggtcaggagtttgagaccagcctgaccaaatggagaaaccctgtatctactaaaaatagaaaattagccgggcgtggcagcacgtgcctgtaatcccagctactcgaggggctgatacaggagaatcgtttgaacccgggaggcagaggttgcggtgagctgagatcgcaccattgcactccagcctgggcaacaagagcgaaactctgtctcaaaaaaaaaaaaaagaagaaggctttacctcgattatctctaattatgacagtgagcctgctaaagtaggtattatccccattttacatgtgaagaaacaagctcagagaggttaaatcattgcccaagtcatacaatagaaatttgaactcagatctatccagcactaaagtaggaccccccaaactcctatgaaggctgccttggtttcccttttccctgcccccccataggagatgggaggcccaggccactgtaggaggtaaaactggggagcagaggaggcattaagatgaatatgaggctttattggggtgggagggtcaacccagaggtgcctggggagttcagggagaaggtaagcctcacctgttcagggtcagagagttcaggtggccctggggggccaagcagctcttccaccagcagggaggggaagaccccaacacggcccccaaattctcccctccagaagccgtcatctactccatcttgggcccggggcagcagacggatgagtgccccctcagggaagctcagctcctctgcactctgtccggtgtagctgtacagggcctgtgccaggaatgctacagaggcccaggagagacggtgagagggaggtgggtagcagtgccccaggaccatgacaccccagggctacaacccctaacaatttttctccatacccagggtcctctaacccaaaatttccctttcttacctgtgggctctgccccgcagggattgtcactgtcttggctgctctctgggagggagaggtccgggaagttgagatatcgctcagggacaaagcctacctcgccgtgctggttccgagcctgctcacccagcaatgtgaacagatattagacttacctcagcagtccatgaccctggctctcttctactcaggcttctagctttgcctagaagggtctatggaggccacagagaagtccctcctactgcccccaacccaaggtcagagcccggggtcccatacccaccttgacccattcgtcagcatctccctcctctatgacctccagccactcaccctccgtgattgtcagctcatcctcacgccctgcctg

SEQ ID NO: 1327 - DNA, 12121 bp, Homo sapiens
ggcttcctccagttccggagtccagtggctgaccgccttgctggagcggagatgcagccgccgccccgaaaagtgagcttggccctgaatggggactcctggcgggctgggggaacggagggagctaagggggcatccgacttgtggtaggagacgggaagtcggaaggggtcagaccccaaaccagaagtaacagaggaaagagctcagcacccccccaggccccgcacccctcaccgctccctgcgcggagtgttttttaggtccttgcgctggggtcttcatcctctctttgcccccacaggtgaagccggcccaggaggtgaagcttcgcttcctggaacagctgagcatccttcagatcctggcagcagagggaggcggatctgctggaggacatcaggtagctcccccaacccccttcatttacactcaccttcgtcgttgtgcgccacttctccccaatatacatgtgctggggtggaggaacaggggccaagagctccccagccgacccatccacagccctcaccctaggcctggcctctccagatactggataggaatgctcccccacctaacccctcccaaccccctcccacccacataaacacacaggaaccctccctcaaagcccttgactccacaccactgcccccaaccccacaatcaaccttagggcagaatccctctccctcttccagacctgttggaaggctggcagacatcgtacccaggcccccatcagtcttcacctctaagcctacagatgaacctctggggtggggaggatcctgctggggcccggggcagtaaggtgagggtttcctgtgttgcagctgcccgaggtgatctcaaggactcccatcagtcccattccctctgggtgtagttacactctaggaacctggctccccccaaccgctccctcctgcccagagtagaggactgaggatgggagaacaggaccaaacataaccttatcccccacctcacccccgacctgcaatctccgcagatcctacagcaagcagagggcagccattgaacgggagtatgggcaggtatgggacttttctctggaccttacctcttgttccagcctctcttatatcaccagtaatgtctgtccatacctatccctattgtggtcaagagcagatgcctagagtcaagcagactggtgtcagatccctgctgtgtaattatagccatgtgaccttggacaagttacttaacctttcttgacctcagtttctttctctgtgaaatgggaataataataataccttaccttcatgtagggttgttgtaaggattaaacaaattaatgactataaggcatttagcaaagcaagtggcacataatgtacccaaagaatggtatgattatactctgatgtcatattctgccagttggggtgggtctttgaaagggaacttggttctgtgatggctttttcaccaggcactccagaaactggctggcccattcctgaagagggaagggcaccggagcggtgagatggacagcaggtgggccctatggagggggagggccacagaggccaaaaagtgatggggagctcagccccaggaacctgtggggatgaaggcctagcaagtggggaaggcacgtgagctgtaggtagagctgacacagcagcagcagaggagctgacccagcaaggacactgtgggtggggtggagggcaggagtgaggcttgtggctgagctaatgggctgatcgattgatgggctcccagacaagggaggatgggaaagcactctgtctcccatggtgcttggtcagggggcagggggtgggggtggtctcatgaagctgtggagtgctctcctcctcaacacagaccttctctggggaggggcaggacagtgttcggtgcctggcgctgcctgctggatgccaccgtggctgggggccaaacccgactccaggcgtctgaccgataccgtgacctagcagggggtacagggcggagcgccaaggagcaggtgcttaggaaggtatggctcagaggttggggtgaaggaagagctggcttgggaccaaaggtggtctaggtaaggactttgtgtatgcatcccaatagggaacagagaacctccagagggcgcaggctgaggtgctgcagtctgtccgggagctgagccgaagtcggaagctgtatgggcagcgggaacgtgtgtgggccttggcacaggagaaggcggctgatgtccaggccaggtggggtcatggagagtgaggaagcccaaggttggggaacagggaggtggggctgtctaggggtggagccaagtcaccaaagctgggcctgactctgatctcatattctcccacttggggtgggcctgactcctttctctcatctgcacaggctaaaccgaagtgaccatgggatcttccactctcggaccagtctccagaaactgagcaccaaggttcgagggatgagggcatgagtgggggcagggaagagggaggcagagtagtctagtggtttggaacataggtgcatatgtatgaaagactgggttgaatccaggctctcctacttcctgggtgggtaaccttggttaatttacttgatctctgtgagccttattttcttctataaaatggagagaatacccttctttttcagtcctttaatatgcatttattgaggatctgtatataataggcactgttctagacattatggatacagtggagaacactaccaatggagttcctgccctcacagtctggttaagagagacagacagcaaataaatacttagattaagatgaaaataaaacaaggtactatgataaagaataacaagggggtagaatttagagggaggcctctctgaataggtggcctaactgtcaagaaggagctggccttgcaaagatctaggggaagaacattgcagagagaagaaatggtgagtgcaaagggtctgaggtgggaataactttgtaggctcgaggaactgagagagggccagtatggctggagtactgtgagcaagggaacaagcgcttgaaaagaggtcagagagattgcgggggccagctcatattgaacgtggtggaccatggtaaggaacagtggattttattttaaatgcgtgcagaaggcactagaagattttgagcaggagttgtgtgtatgcaacatttttagtgtagtgccaggcacatagtaagcactcaataatgtgagaatccattctggatctggcttctcaattggtcttggaaggactctgggggtctagggcttcctattgacatcagtttaccctcctagctgtccgcccagtcagcccagtactcccagcagctgcaagcagcccgcaatgagtacctgcttaacttggtggctaccaatgcccacctcgaccattactaccaggaggaactgccagctctgctcaaggccagttttaacccagacacccctatccctcagcagggagggaaaggaggacctccccctgcttcttgatccccatgacagtgggtggtgcaggggatcttgtctgtttagagtgagtagatgatacatacatgcactctggttctgctcctagctggctgcatggcattgtacagtacacttaaactcttccgaaccccagattcctcatcagggataaccctttctctgcctatcttatagcactagtggggctcaaaggagagaatggatgtgaacgtgttttaaacttctaagtgctctgcacacgagggcctttctcatgaagaatgtcttcttctctccttcctatacctcatgcccatcacctgtcaaatctggaacgagcctattttacagtagaggtctgggggaagggtggtgtcagtatcttggggttctctctaggccctggtcagtgagctgtcagagcacttgagggaccccctgacctcctgagccacactgagctggaagccgcagaggtcatcctggagcatgcccaccgcggggagcagacaacctcccaggtgagggctgtggcctctaagagcttccccggggatcctttttacccttccctcccaatgcagccctctttgcttcacacattgtcctttttcttccaagaagtgctagggacagggttggagagtgagtcagtgaatgagtgactttgacttttcccaacccctaggtaagctgggagcaagacctgaagctgtttcttcaggagcctggtgtattttcccccaccccacctcagcagtttcagccagcagggactgatcaggtgagatcttcctgcttgttggaaccaggccacatataaaggcgattatgatttaggcctcctccattatctttgttttgtgttaacttagtgagtgtacaccgtggagagggggtttcagaactccagctcacctccctcccaacaggacacacacaaaaaaacacacctcagtccacctttcagtcacttgactgcgccatccttttcattctacctctgtcccttgacctggatcccatttctgaagctctgtatctctgtgtccacattacctgtgtccatgactgtaggcatgtgcccctttctctttgtccttgtccttggaggtcaagatagagtggaaaaaggagggaactggagagaaggagcagcctcaggtcctcctcacagcaccccctgacccattcaggtgtgtgtcctggagtggggagcagaaggcgtggctggcaagagtggcctggagaaagaggttcagcgcttgaccagccgagctgcccgtgactacaagatccagaaccatgggcatcgggtgaggtgggggggcacaggtgtcatgtgcaccttcttgtctcagcaagaagagctgagagaggggatcttggagccattgagggtgtcatggagctacagaggggagggaaaggtattttaaggtaacagtgtggcacaatagttaagagcacagtttttggagctagaccgacataggttcaaattctcttctgttgcttcctagttctgtagccccaggtaagggagtgacttaacctctctggacttcaatttcctcatcactaaagtagggccaataatagcacccacctcatagggaagattaaatgacataatgtatgtgatgcaactagcaaagtaccagtcccatagtaagtcatgccccacagtatttccacccacccctgttctctgccttcccaaccaggtactgcaacgactggagcagaggcggcagcaggcttcagagcgggaggctccaagcatagaacagaggttacaggaagtgcgagagagcatccgccgggcacaggtgaggcacacccctgaggttagagatcccaccttctcaggcaagccccactccctctactcctctttctgatggtgggaggaaggaagggagaagcagagagtaaacactgccgtcagccaggttccactaacttacttcctccccatggcaggtgagccaggtgaagggggctgcccggctggccctgctgcagggggctggcttagatgtggagcgctggctgaagccagccatgacccaggcccaggatgaggtggagcaggagcggcggctcagtgaggctcggctgtcccagagggacctctctccaaccgtgagctcctcccccaacactacccatccttacttagaagggaaaaactccagtggaaggcaaaccctataaaactggaatcacagttgtgcctaactcaaagggttattacgaggcttaagtgaaatcatcatatatcattctttgcataatttctggcatagagtcctcagtacatttttattatgagcataatagaatgattaagaagtagggttctggggcagtctgtaagggctttgagtaccagccactccacttatgagctgtgcaatctcgaaaagtgacttaacctttctgaaccccagtttccttgtaaataaagtgaggttaatagttgtgcaaaactattaacactgggtcattatgaagattaaatgagacaatatacacaagatactttgcattgtacctggcacatagtatgcactcaattactgtaactctattactgttagtattatcctgctctgtggtgactgtggttgtgtacatggtgagtggatgggtgcacctgccttggaggatccatggtgtcctttagaggaaagatggaagagtgggagatagaaccagtgcttgagagtgggccccatatgaggtctgttctttgcccctctaggctgaggatgctgagctttctgactttgaggaatgtgaggagacgggagagctctttgaggagcctgccccccaagccctggccacgagggccctcccctgccctgcacacgtggtatttcgctatcaggtatgaatgggggtggggacctctgatgggcaagggtgggggacagccaagtcctgaatccttcgtgtgtggcccaggcagggcgtgaggatgagctgacaatcacggagggtgagtggctggaggtcatagaggagggagatgctgacgaatgggtcaaggtgggtatgggaccccgggctctgaccttgggttgggggcagtaggagggacttctctgtggcctccatagacccttctaggcaaagctagaagcctgagtagaagagagccagggtcatggactgctgaggtaagtctaatatctgttcacattgctgggtgagcaggctcggaaccagcacggcgaggtaggctttgtccctgagcgatatctcaacttcccggacctctccctcccagagagcagccaagacagtgacaatccctgcggggcagagcccacaggtaagaaagggaaattttgggttagaggaccctgggtatggagaaaaattgttaggggttgtagccctggggtgtcatggtcctggggcactgctacccacctccctctcaccgtctctcctgggcctctgtagcattcctggcacaggccctgtacagctacaccggacagagtgcagaggagctgagcttccctgagggggcactcatccgtctgctgccccgggcccaagatggagtagatgacggcttctggaggggagaatttgggggccgtgttggggtcttcccctccctgctggtggaagagctgcttggccccccagggccacctgaactctctgaccctgaacaggtgaggcttaccttctccctgaactccccaggcacctctgggttgaccctcccaccccaataaagcctcatattcatcttaatgcctcctctgctccccagttttacctcctacagtggcctgggcctcccatctcctatgggggggcagggaaaagggaaaccaaggcagccttcataggagtttggggggtcctactttagtgctggatagatctgagttcaaatttctattgtatgacttgggcaatgatttaacctctctgagcttgtttcttcacatgtaaaatggggataatacctactttagcaggctcactgtcataattagagataatcgaggtaaagccttcttcttttttttttttttgagacagagtttcgctcttgttgcccaggctggagtgcaatggtgcgatctcagctcaccgcaacctctgcctcccgggttcaaacgattctcctgtatcagcccctcgagtagctgggattacaggcacgtgctgccacgcccggctaattttctatttttagtagatacagggtttctccatttggtcaggctggtctcaaactcctgacctcaggtgatccacctgccttggcctcccaatgtgctgggattataggcatgagccactgcgccccgccgaggcaaagcctttagtgcagtggaatgcagaaggtgtttcaatataagatatctgttgttataatgtatatacatacagcagaaagagaataggagtgggcatcaggagaactgggttctagccagcactctgccaataactggcttcgtgattttggacagctggcttaacctgggtctcacttctaacataggagtcatattattaaaaatgcctacctcatggggtagtggtgaggattgaatgaattggtacacgtgaagtgctagcagaacacttgagacatagtaaacataagcgttcaatacatattggctgttgaaatatttgtcagctacacccccccaccgaatgcaagcatttggccacttcctgtattgagaagtgatgaggaaggaactggagatgggatgagaggaaaagctggtaaaacctccccacatgccaggaataactctgtgcccaccccacctccagatgctgccgtccccttctcctcccagcttctccccacctgcacctacctctgtgttggatgggccccctgcacctgtcctgcctgggggtgagtggaaggaactgggagccttgggaggctaacagacaggaagaaggaggaagcttggactcccaggtcacgctctggtcctctccgtgccttcaggcatcttgcttggtggagagcacttgcctgggctctggagccaggctgactggttcaggtcccgctctgtcatctccaagtgtgtggtgggattctgaacctgtcttggcctcagtttatgttctttatgaggtaaggaaaaggtactagcttattgaattcttatgagagttaaaaaagatgcctgtggactacacagcattgtgcctggcacacagtaagtatgcagtcactgttattattttaaaaattagctaacttctctcacggtgtcctcccaatatgcaccttttgctcctagtgtccagatacctagctttgtatcattattttttctgatgcccactttttttcttttttaaatgtctatagcagttttattttattatttattttagattcaggaggtacatgtgcttgtttgtcatatggatatattgcatactggtggagattgggcttctagtgtacctgtaactcaaatagtgaacattgtacctgataggtaatttttcaaccctcgcccctgcctctactcctacctttgccccctttggagtcctgggagtctgttatttccatctctatgtccatgtgtacccgttgtttagctcccacttataagtgagaacatgcaatatttggttttctgtttctgagttagttcacttaggataatggcatccaactccattcatgttgctgcagaggacatgatttcattcttttttatggctgtggaatgcctgccttttctaaaactttctggtacttccaccttgtccacaaggagtctccctccctggagttaccaccatctccaccaccccaagttcactttgcatgacttagcacttagtcatttattgtgtttgttgaggtttcattattggtttcttgacagccattgggggtgggagcactatgcatcctatctcccttagttttgtaccttgagcagagctgattatacagcagttgcccaataaatgttgaggacagtggatagagtgatggattttatggtctaggatggtgaccattaatttaacaaatatttatagaatgccactgtcctaagtgctggagatacagcattgaacaaaacaaagtctgaagactgacttgtggttcttatttccagacaaagccctggacttccctgggttcctggacatgatggcacctcgactcaggccggtaagggcccttgccttggaggagattgtatgtagaggggttattccaaccagtcctgttttgtctgcagggctgagggaatagacagggatacccttaagggagaactctggagcactaactgtgtgttccctacagatgcgtccaccacctcccccgccggctaaagccccggatcctggccacccagatcccctcacctgaaggccagggaagccttgacccccagtgatgctgctgtccctatcttcaagctgtcagaccacaccatcaatgatccagagcaacacagccaaaagctggaatcgcccttatttccaccctcacctccaagggtggaaacttgccccttcccatttctagagctggaacccactcctttttttcccattgttctatcatctctaggaccggaactaccttctcttctgtcatgaccctatctagggtggtgaaatgcctgaaatctctggggctggaaaccatccatcaaggtctctagtagttctggcccacctctttccccaccctggctccatgacccaccccactctggatgccagggtcactggggttgggctggggagaggaacaggccttgggaatcaggagctggagccaggatgcgaagcagctgtaatggtctgagcggatttattgacaatgaataaagggcacgaaggccaggccagggcctgggcctcttgtgctaagagggcagggggcctacggtgctattgctttaggggcccaccacgggcaggggcctgctcccagctgccacgctctatcatatggagcgaggtgttggggaaggcggggcaggcagcctgttgcaggcaggggaaggagaagagactgaggggctgtgacctctcctgaggcccccagcctgagactgtgcaactccaggtggaagtagagctggtccctcagctggggggcagtgctgtccagtggaggggagggctttcacgcccacccaccccctggccctgccagctggtagtccatcagcacaatgaaggagacttggagaagaggaagaataacactgttgcttcctgttcaagctgtgtccagcttttcccctggggctccaggaccttccctacctccaccaccaaaccaagggatttatagcaaaggctaagcctgcagtttactcggggggttcagggagccgaaaggcttaaatagtttaagtaggtgatgggaagatgagattacctcatttagggctcaggcagactcacctcacatactccctgctccctgtggtagagacacctgagagaaaggggaggggtcaacaatgagagaccaggagtaggtcctatcagtgccccccagagtagagagcaataagagcccagcccagtgcagtcccggctgtgttttcctacctggtgatcagaagtgtctggtttgcttggctgcccatttgcctcttgagtgggcagccctgggcttgggcccctccctccggccctcagtgttggctctgcagaagctctggggttcccttcaagtgcacgaggggttaggctgctgtccctgagtcctccattctgtactggggggctggctaggacctggggctgtggcctctcagggggcagcctctccatggcaggcatccctgccttgggctgccctcccccagacccctgaccaccccctgggtcctgtcccccaccagagccccagctcctgtctgtgggggagccatcacggtgttcgtgcagtccatagcgcttctcaatgtgtgtcacccggaacctgggaggggagggaacactggggtttaggaccacaactcagaggctgcttggccctcccctctgaccagggacatcctgagtttggtggctacttccctctggcctaaggtaggggaggccttctcagattgtggggcacattgtgtagcctgacttctgccggagctcccagtccaggaggaaagagccaaggcccacttttgggatcaggtgcctgatcactgggccccctacctcagcccccctttccctggagcacctgccccacctgcccacagagaacacagtggtctcccctgtccgggggcggctttttccttccttggagcgtccctgacggacaagtggaggcctcttgctgcggctgcaatggaggcaaggggctgcagagcccaggtgcactgtgtgatgatgggagggggctccgtcctgcaggctggaggtggcatccacactggacagcagggaggaggggagtgagggtaacatttccatttcccttcatgttttgtttcttacgttctttcagcatgctccttaaaaccccagaagccccaatttccccaagccccattttttcttgtctttatctaataaactcaatattaagatgtta

SEQ ID NO: 1328 - DNA, 12126 bp, Homo sapiens
taacatcttaatattgagtttattagataaagacaagaaaaaatggggcttggggaaattggggcttctggggttttaaggagcatgctgaaagaacgtaagaaacaaaacatgaagggaaatggaaatgttaccctcactcccctcctccctgctgtccagtgtggatgccacctccagcctgcaggacggagccccctcccatcatcacacagtgcacctgggctctgcagccccttgcatccattgcagccgcagcaagaggcctccacttgtccgtcagggacgctccaaggaaggaaaaagccgcccccggacaggggagaccactgtgttctctgtgggcaggtggggcaggtgctccagggaaaggggggctgaggtagggggcccagtgatcaggcacctgatcccaaaagtgggccttggctctttcctcctggattgggagctccggcagaagtcaggctacacaatgtgccccacaatctgagaaggcctcccctaccttaggccagagggaagtagccaccaaactcaggatgtccctggtcagaggggagggccaagcagcctctgagttgtggtcctaaaccccagtgttccctcccctcccaggttccgggtgacacacattgagaagcgctatggactgcacgaacaccgtgatggctcccccacagacaggagctggggctctggtgggggacaggacccagggggtggtcaggggtctgggggagggcagcccaaggcagggatgcctgccatggagaggctgccccctgagaggccacagccccaggtcctagccagccccccagtacagaatggaggactcagggacagcagcctaacccctcgtgcacttgaagggaaccccagagcttctgcagagccaacactgagggccggagggaggggcccaagcccagggctgcccactcaagaggcaaatgggcagccaagcaaaccagacacttctgatcaccaggtaggaaaacacagccggcactgcactgggctgggctcttattgctctctactctggggggcactgataggacctactcctggtctctcattgttgacccctcccctttctctcaggtgtctctaccacagggagcagggagtatgtgaggtgagtctgcctgagccctaaatgaggtaatctcatcttcccatcacctacttaaactatttaagcctttcggctccctgaacccccagagtaaactgcaggcttagcctttgctataaatcccttggtttggtggtggaggtagggaaggtcctggagccccaggggaaaagctggacacagcttgaacaggaagcaacagtgttattcttcctcttctccaagtctccttcattgtgctgatggactaccagctggcagggccagggggtgggtgggcgtgaaagccctcccctccactggacagcactgccccccagctgagggaccagctctacttccacctggagttgcacagtctcaggctgggggcctcaggagaggtcacagcccctcagtctcttctccttcccctgcctgcaacaggctgcctgccccgccttccccaacacctcgctccatatgatagagcgtggcagctgggagcaggcccctgcccgtggtgggcccctaaagcaatagcaccgtaggccccctgccctcttagcacaagaggcccaggccctggcctggccttcgtgccctttattcattgtcaataaatccgctcagaccattacagctgcttcgcatcctggctccagctcctgattcccaaggcctgttcctctccccagcccaaccccagtgaccctggcatccagagtggggtgggtcatggagccagggtggggaaagaggtgggccagaaccactagagaccttgatggatggtttccagccccagagatttcaggcatttcaccaccctagatagggtcatgacagaagagaaggtagtagttccggtcctagagatgatagaacaatgggaaaaaaaggagtgggttccagctctagaaatgggaaggggcaagtttccacccttggaggtgagggtggaaataagggcgattccagcttttggctgtgttgctctggatcattgatggtgtggtctgacagcttgaagatagggacagcagcatcactgggggtcaaggcttccctggccttcaggtgaggggatctgggtggccaggatccagggctttagccggcgggggaggtggtggacgcatctgtagggaacacacagttagtgctccagagttctcccttaagggtatccctgtctattccctcagccctgcagacaaaacaggactggttggaataacccctctacatacaatctcctccaaggcaagggcccttaccggcctgagtcgaggtgccatcatgtccaggaacccagggaagtccagggctttgtctggaaataagaaccacaagtcagtcttcagactttgttttgttcaatgctgtatctccagcacttaggacagtggcattctataaatatttgttaaattaatggtcaccatcctagaccataaaatccatcactctatccactgtcctcaacatttattgggcaactgctgtataatcagctctgctcaaggtacaaaactaagggagataggatgcatagtgctcccacccccaatggctgtcaagaaaccaataatgaaacctcaacaaacacaataaatgactaagtgctaagtcatgcaaagtgaacttggggtggtggagatggtggtaactccagggagggagactccttgtggacaaggtggaagtaccagaaagttttagaaaaggcaggcattccacagccataaaaaagaatgaaatcatgtcctctgcagcaacatgaatggagttggatgccattatcctaagtgaactaactcagaaacagaaaaccaaatattgcatgttctcacttataagtgggagctaaacaacgggtacacatggacatagagatggaaataacagactcccaggactccaaagggggcaaaggtaggagtggaggcaggggcgagggttgaaaaattacctatcaggtacaatgttcactatttgagttacaggtacactagaagcccaatctccaccagtatgcaatatatccatatgacaaacaagcacatgtacctcctgaatctaaaataaataataaaataaaactgctatagacatttaaaaaaaaaaaagtgggcatcagaaaaaataatgatacaaagctaggtatctggacactaggagcaaaaggtgcatattgggaggacaccgtgagagaagttagctaatttttaaaataataacagtgactgcatacttactgtgtgccaggcacaatgctgtgtagtccacaggcatcttttttaactctcataagaattcaataagctagtaccttttccttacctcataaagaacataaactgaggccaagacaggttcagaatcccaccacacacttggagatgacagagcgggacctgaaccagtcagcctggctccagagcccaggcaagtgctctccaccaagcaagatgcctgaaggcacggagaggaccagagcgtgacctgggagtccaagcttcctccttcttcctgtctgttagcctcccagggctcccagttccttccactcacccccaggcaggacaggtgcagggggcccatccaacacagaggtaggtgcaggtggggagaagctgggaggagaaggggacggcagcatctggaggtggggtgggcacagagttattcctggcatgtggggaggttttaccagcttttcctctcatcccatctccagttccttcctcatcacttctcaatacaggaagtggccaaatgcttgcattcggtgggggggggggtgtagctgacaaatatttcaacagccaatatgtattgaacgcttatgtttactacgtctcaagtgttctgctagcacttcacgtgtactaattcattcaatcctcaccactaccccatgaggtaggcatttttaataatatgactcctatgttagaagtgagacccaggttaagccagctgtccaaaatcacgaagccagttattggcagagtgctggctagaacccagttctcctgatgcccactcctattctctttctgctgtatgtatatacattataacaacagatatcttatattgaaacaccttctgcattccactgcactaaaggctttgcctcggcggggcgcagtggctcatgcctataatcccagcacattgggaggccaaggcaggtggatcacctgaggtcaggagtttgagaccagcctgaccaaatggagaaaccctgtatctactaaaaatagaaaattagccgggcgtggcggcacgtgcctgtaatcccagctactcgaggggctgatacaggagaatcgtttgaacccgggaggcagaggttgcggtgagctgagatcgcaccattgcactccagcctgggcaacaagagcgaaactctgtctcaaaaaaaaaaaaaaaaaagaaggctttacctcgattatctctaattatgacagtgagcctgctaaagtaggtattatccccattttacatgtgaagaaacaagctcagagaggttaaatcattgcccaagtcatacaatagaaatttgaactcagatctatccagcactaaagtaggaccccccaaactcctatgaaggctgccttggtttcccttttccctgcccccccataggagatgggaggcccaggccactgtaggaggtaaaactggggagcagaggaggcattaagatgaatatgaggcttcattggggtgagagggtcaacccagaggtgcctggggagttcagggagaaggtaagcctcacctgttcagggtcagagagttcaggtggccctggggggccaagcagctcttccaccagcagggaggggaagaccccaacacggcccccaaattctcccctccagaagccgtcatctactccatcttgggcccggggcagcagacggatgagtgccccctcagggaagctcagctcctctgcactctgtccggtgtagctgtacagggcctgtgccaggaatgctacagaggcccaggagagacggtgagagggaggtgggtagcggtgccccaggaccatgacaccccagggctacaacccctaacaatttttctccatacccagggtcctctaacccaaaatttccctttcgtacctgtgggctctgccccgcagggattgtcactgtcttggctgctctctgggagggagaggtccgggaagttgagatatcgctcagggacaaagcctacctcgccgtgctggttccgagcctgctcacccagcaatgtgaacagatattagacttacctcagcagtccatgaccctggctctcttctactcaggcttctagctttgcctagaagggtctatggaggccacagagaagtccctcctactgcccccaacccaaggtcagagcccggggtcccatacccaccttgacccattcgtcagcatctccctcctctatgacctccagccactcaccctccgtgattgtcagctcatcctcacgccctgcctgggccacacacgaaggattcaggacttggctgtcccccacccttgcccatcagaggtccccacccccattcatacctgatagcgaaataccacgtgtgcagggcaggggagggccctcgtggccagggcttggggggcaggctcctcaaagagctctcccgtctcctcacattcctcaaagtcagaaagctcagcatcctcagcctagaggggcaaagaacagacctcatatggggcccactctcaagcactggttctatctcccactcttccatctttcctctaaaggacaccatggatcctccaaggcaggtgcacccatccactcaccatgtacacaaccacagtcaccacagagcaggataatactaacagtaatagcagagttacagtaattgagtgcatactatgtgccaggtacaatgcaaagtatcttgtgtatattgtctcatttaatcttcataatgacccagtgttaatagttttgcacaactattaacctcactttatttacaaggaaactggggttcagaaaggttaagtcacttttcgagattgcacagctcataagtggagtggctggtactcaaagcccttacagactgccccagaaccctacttcttaatcattctattatgctcataataaaaatttactgaggactctatgccagaaattatgcaaagaatgatatatgatgatttcacttaagcctcgtaataaccctttgagttaggcacaactgtgattccagttttatagggtttgccttccactggagtttttcccttctaagtaaggatgggtagtgttgggggaggagctcacggttggagagaggtccctctgggacagccgagcctcactgagccgccgctcctgctccacctcatcctgggcctgggtcatggctggcttcagccagcgctccacatctaagccagccccctgcagcagggccagccgggcagcccccttcacctggctcacctgccatggggaggaagtaagttagtggaacctggctgacggcagtgtttactctctgcttctcccttccttcctcccaccatcagaaagaggagtagagggagtggggcttgcctgagaaggtgggatctctaacctcaggggtgtgcctcacctgtgcccggcggatgctctctcgcacttcctgtaacctctgttctatgcttggagcctcccgctctgaagcctgctgccgcctctgctccagtcgttgcagtacctggttgggaaggcagagaacaggggtgggtggaaatactgtggggcatgacttactatgggactggtactttgctagttgcatcacatacattatgtcatttaatcttccctatgaggtgggtgctattattggccctactttagtgatgaggaaattgaagtccagagaggttaagtcactcccttacctggggctacagaactaggaagcaacagaagagaatttgaacctatgtcggtctagctccaaaaactgtgctcttaactattgtgccacactgttaccttaaaatacctttccctcccctctgtagctccatgacaccctcaatggctccaagatcccctctctcagctcttcttgctgagacaagaaggtgcacatgacacctgtgcccccccacctcacccgatgcccatggttctggatcttgtagtcacgggcagctcggctggtcaagcgctgaacctctttctccaggccactcttgccagccacgccttctgctccccactccaggacacacacctgaatgggtcagggggtgctgtgaggaggacctgaggctgctccttctctccagttccctcctttttccactctatcttgacctccaaggacaaggacaaagagaaaggggcacatgcctacagtcatggacacaggtaatgtggacacagagatacagagcttcagaaatgggatccaggtcaagggacagaggtagaatgaaaaggatggcgcagtcaagtgactgaaaggtggactgaggtgtgtttttttgtgtgtgtcctgttgggagggaggtgagctggagttctgaaaccccctctccacggtgtacactcactaagttaacacaaaacaaagataatggaggaggcctaaatcataatcgcctttatatgtggcctggttccaacaagcaggaagatctcacctgatcagtccctgctggctgaaactgctgaggtggggtgggggaaaatacaccaggctcctgaagaaacagcttcaggtcttgctcccagcttacctaggggttgggaaaagtcaaagtcactcattcactgactcactctccaaccctgtccctagcacttcttggaagaaaaaggacaacgtgtgaagcaaagagggctgcattgggagggaagggtaaaaaggatccccggggaagctcttagaggccacagccctcacctgggaggttgtctgctccccgcggtgggcatgctccaggatgacctctgcggcttccagctcagtgtggctcagggaggtcagggggtccctcaagtgctctgacagctcactgaccagggcctagagagaaccccaagatactgacaccacccttcccccagacctctactgtaaaataggctcgttccagatttgacaggtgatgggcatgaggtataggaaggagagaagaagacattcttcatgagaaaggccctcgtgtgcagagcacttagaagtttaaaacacgttcacatccattctctcctttgagccccactagtgctataagataggcagagaaagggttatccctgatgaggaatctggggttcggaagagtttaagtgtactgtacaatgccatgcagccagctaggagcagaaccagagcccatgtatgtatcatctactcactctaaacagacaagatcccctgcaccacccactgtcatggggatcaagaagcagggggaggtcctcctttccctccctgctgagggataggggtgtctgggttaaaactggccttgagcagagctggcagttcctcctggtagtaatggtcgaggtgggcattggtagccaccaagttaagcaggtactcattgcgggctgcttgcagctgctgggagtactgggctgactgggcggacagctaggagggtaaactgatgtcaataggaagccctagacccccagagtccttccaagaccaattgagaagccagatccagaatggattctcacattattgagtgcttactatgtgcctggcactacactaaaaatgttgcatacacacaactcctgctcaaaatcttctagtgccttctgcacgcatttaaaataaaatccactgttccttaccatggtccaccaggttcaatatgagctggcccccgcaatctctctgacctcttttcaagcgcttgttcccttgctcacagtactccagccatactggccctctctcagttcctcgagcctacaaagttattcccacctcagaccctttgcactcaccatttcttctctctggaatgttcttcccctagatctttgcaaggccagctccttcttgacagttaggccacctattcagagaggcctccctctaaattctacccccttgttattctttatcatagtaccttgttttattttcatcttaatctaagtatttatttgctgtctgtctctcttaaccagactgtgagggcaggaactccattggtagtgttctccactgtatccataatgtctagaacagtgcctattatatacagatcctcaataaatgcatattaaaggactgaaaaagaagggtattctctccattttatagaagaaaataaggctcacagagatcaagtaaattaaccaaggttacccacccaggaagtaggagagcctggattcaacccagtctttcatacatatgcacctatgttccaaaccactagactactctgcctccctcttccctgcccccactcatgccctcatccctcgaaccttggtgctcagtttctggagactggtccgagagtggaagatcccatggtcacttcggtttagcctgtgcagatgagagaaaggagtcaggcccaccccaagtgggagaatatgagatcagagtcaggcccagctttggtgacttggctccacccctagacagccccacctccctgttccccaaccttgggcttcctcactctccatgaccccacctggcctggacatcagccgccttctcctgtgccaaggcccacacacgttcccgctgcccatacagcttccgacttcggctcagctcccggacagactgcagcacctcagcctgcgccctctggaggttctctgttccctattgggatgcatacacaaagtccttacctagaccacctttggtcccaagccagctcttccttcaccccaacctctgagccataccttcctaagcacctgctccttggcgctccgccctgtaccccctgctaggtcacggtatcggtcagacgcctggagtcgggtttggcccccagccacggtggcatccagcaggcagcgccaggcaccgaacactgtcctgcccctccccagagaaggtctgtgttgaggaggagagcactccacagcttcatgagaccacccccaccccctgccccctgaccaacaccatgggagacagagtgctttcccatcctcccttgtctgggagcccatcaatcgatcagcccattagctcagccacaagcctcactcctgccctccaccccacccacagtgtccttgctgggtcagctcctctgctgctgctgtgtcagctctacctacagctcacgtgccttccccacttgctaggccttcatccccacaggttcctggggctgagctccccatcactttttggcctctgtggccctccccctccatagggcccacctgctgtccatctcaccgctccggtgcccttccctcttcaggaatgggccagccagtttctggagtgcctggtgaaaaagccatcacagaaccaagttccctttcaaagacccaccccaactggcagaatatgacatcagagtataatcataccattctttgggtacattatgtgccacttgctttgctaaatgccttatagtcattaatttgtttaatccttacaacaaccctacatgaaggtaaggtattattattattcccatttcacagagaaagaaactgaggtcaagaaaggttaagtaacttgtccaaggtcacatggctataattacacagcagggatctgacaccagtctgcttgactctaggcatctgctcttgaccacaatagggataggtatggacagacattactggtgatataagagaggctggaacaagaggtaaggtccagagaaaagtcccatacctgcccatactcccgttcaatggctgccctctgcttgctgtaggatctgcggagattgcaggtcgggggtgaggtgggggataaggttatgtttggtcctgttctcccatcctcagtcctctactctgggcaggagggagcggttggggggagccaggttcctagagtgtaactacacccagagggaatgggactgatgggagtccttgagatcacctcgggcagctgcaacacaggaaaccctcaccttactgccccgggccccagcaggatcctccccaccccagaggttcatctgtaggcttagaggtgaagactgatgggggcctgggtacgatgtctgccagccttccaacaggtctggaagagggagagggattctgccctaaggttgattgtggggttgggggcagtggtgtggagtcaagggctttgagggagggttcctgtgtgtttatgtgggtgggagggggttgggaggggttaggtgggggagcattcctatccagtatctggagaggccaggcctagggtgagggctgtggatgggtcggctggggagctcttggcccctgttcctccaccccagcacatgtatattggggagaagtggcgcacaacgacgaaggtgagtgtaaatgaagggggttgggggagctacctgatgtcctccagcagatccgcctccctctgctgccaggtctgaaggatgctcagctgttccaggaagcgaagcttcacctcctgggccggcttcacctgtggggcaaagagaggatgaagaccccagcgcaaggacctaaaaaacactccgcgcagggagcggtgagggggcggggccgggggggtgctgagctctttcctctgttacttctggtttggggtctgaccccttccgacttcccgtctcctaccacaagtcggatgcccccttagctccctccgttcccccagcccgccaggagtccccattcagggccaagctcacttttcggggcggcggctgcatctccgctccagcaaggcggtcagccactggactccggaactggaggaagcc

SEQ ID NO: 1329 - DNA, 292 bp, Homo sapiens
gcgcgaacaagctggaaaggggaacgctcggggcgtcggggaagcgggaccagggtcgtggtagagagcttgcgttgccgctgacctcttgccgaaaggcgaaacagcactcctggcccggacagctccctggttgggtagggggtggggccggacctcagccggacgtcttagacgtgcttgtttcagatcctgaggacggcattcctacccctcccccattcccagctgcagccccctaaacccaggaggcgccctggcccgcgctcgccccccagggcctcatgtcgga

SEQ ID NO: 1330 - DNA, 13467 bp, Homo sapiens
ttttctctgcttttcgctaccccggtcactctcatttctctcccctattccttgtctcttcccccatccccctttctcctgtcctccccctgcctctacagtggttctccccgctgagctgccaccagctgctgggccccgggctgctgcggctgggccgcctatggctgcggtccccctcccatacagccccggcccctggtctctggctgtcagggtttggcctccttcgtggtgaccacctcttcctgtgctcagcgccgggcccaggccccccagcccctgaggacatggtgcatctgcggcggctacaggagatcagtaagcggggaggtttggggggacagggatgaagggtggccatgcgggtgcatggaagcagacctttattatttgggggttcttatgggaaacagcagaacatggtggcttcaggtacaagctctgaagggaaactgcccagctttagaccccaccttcatcacttcctagctgtatatcctggacaagttatttaacctctctgtgccttagtttcctcatctttaaaatgggcacaataataacaccttcctcagagggttgtagtgaggttcaaatagggtaatgcatctaaaacatgtatcgcagagcctgacaagcattttttaagtgctcaataaatgttgttattattattattattattatttttttttttttttggagacagagtcacgctctgtcccccaggctggagtgcaagggcatgatctcaactcctcaactcactgcaacctccgcctcccaggttcaagcaattctcctgcctcagcctcccaagtagctgggattacaggtgtccgccaccacgcccagctaatttttgtatttttagtagagaaggggtttcaccatgttggccaggctggtcttgaactcctgacctcaggtgatccacccaccttggcctcccacagtgctgggattacaggagtgagccactgcgcccggtctataaatattattattatttggaatcacttgctggttgggtcctgggagaggggactgggtgccctcactgctttcctttctcctaaaagaggaacaatgtaagataatattttaggactttggaaacaagagacctgggtttgtgctcagccttgccattttatagcaagtaatctggggcaagttacttaaactttctgagattaatgtgtcacctataaaatgggaataatagtacataactcataggattcaactgaacgttttttgtaatgctcctagcctggcatctatgcacgttaagcatttaataaataatagtctctataatgaagacgataatcatgaaaatgtccactgattctcctcccaggtgtggtttctgcagctgacaccccagataagaaagagcatttggtcctggtggagacaggaaggtaaattgcccctgcccttgacctggggctccccttcctggagcagagcccatactctgcaacctggcctgctgggccattgcccacttcctcaaagtttcttcccttgctccaggatgatttgggttgggtgttgctgccctctgctggtggctctgggaagtctggtccccatgcatctgggcctgtcggagctggctctgattcaggcctctggggtctcaggaccctgtatctgcaaggagagggccggctggacttcacggcatggaacgcagccattgggggcgcggctggtgggggcggcacagggctgcaggagcagcagatgagccggggtgacatccccatcatcgtggatgcctgcatcagttttgttacccagcatggtgagtaggcactggctggtactgagccaatgggggtggggggtgggggtgatgagggggtggagaacgtgagcacagccagggtggaacgtgagcacagcctggaagagctttgcctccagaaactgcagctggaccccagctggtcatttgactcttggcaggctgctttgcttttctgaacctcagttccatcatctgtaaaatggggccaacggtcctcattttccaggataattgtgacagtgagacaatgcctgtcaagccttgagcgcagggcctggcatgtagtaagtgttcagaagtttcgtcagagtgtggagtaggggaggagcactgaaaatgtgactgaggacacagagccatggcaaacagcgagcagctgcgaggtgagagctgagctgtgcagcacattcccagaagttttaagcagaattattctgtgtgggaggttttctgggcttaaatggtcagctgtgcaagtggcccccataattctttgtgagtttttttggttgttgttgtttgctttttttttgagatggagtcttgctctgttgcccaagctggagtgcagtggcatgatctcagctcactgcaacctccgcttctcgggttcaagcaattctcctgcctcagcctcccaagtagctgggattgcaggcgtgccccaccacacctggataatttttatatttttagtacaggtgagttttaccatgttggccaggctggtctcaaattcctgacctcaggtgatccacccaccttggcctcccaaagtgctgggattacaggtgtgagccaccacacctggccctttgtaagttttttatcctaaataaggaccgaaaagaatctatttctcctgtgaaccctctttagaaggctggactcttaagaaggaaaattcacagaaaactaaggtgggcagatccctagatcatttataatacctaatacaatgcaagtgctgtggaaatagttgttatgctgtattgtttttatttgtattttgttgttgttatattgttatcttggggtttttttccaaatatttttgatgtcggttgaatctgcagttgtggagcccatggatacagagggctgactgtaaggaaaaaaacagcgcctccacaaacatacacataattgttactagtcatgggacatggaaagtcagtggctaataacattttccatgccttggcagtggccttgttcagtgacctcccccactcgctacatccttatcctcttctcagcctctctcgtgttcgaaggaggaaataagtcagaggcccagtgagaaagccctgaagaaagaatatggggccgggcgtggtggttcaagtgtgtaatcccagcactttgggaagccgaggcaggtggatcacctgaggtcaggagttcaagaccagcctggccaacatggtgaaaccctgtttctattaaaatacaaaaattagccagccatggtggcgggtgcctgtaatcccagctacccaggaggctgaggcaggagaattgctgtgaggtgaggttgcagtgagctgagatggcaccacttcactccaccccgggtgaaagagcaaaactctgtctcaattaaaaagaaagaatctgggtgttcatcccctcccctccaaggttcctgcaccaccattgtttagtcagcatacattggttgagctgctaccgtgtgtcagacactggggatatggcagtaagcagggtgggtcctaggagggtcctaggaagcttatttattacccatctcttaggtaataaataagaaaacaaatatagtctgttcttgttatttgtggtagttatgctctaagtcactgcaaacatttaattagtgaatactggatcactgccccagaggaaatacagggttagcttcctgctagcctctggttacaataacattttagtcaagtgatcaatatgtatccttgttttgtgtgtttttctgtgtaaagagaccttattttatatatattgtttgatttgttaacactgaactcaaggccaacagcactgtaactcaagctaatctaacacatgtattttctctgtaaggcatgtcacagctttctcacacgtagaaacactagacagcatttcagcactatacttgggccattttaaacagtgaagtcaccaacaaaaagcacaaaaatatggctgtaaatataccattaaaaggatacacttgtttagagtaagaacatgcacattggggaggggacttaaatttttcttcactctgttcataaatgatgatgaaaatgccaaaagtattgattttggggttacaaataacttttagcaagtaggagaatgtgcagatatggaatccacagataataagggtggactataaagtgatttcagagagtgctatttaaaaataaaagtggtgaggagatacagtgtgatgggggttgtacttgtgacagtgaggtcagggaaggactttctgaggatgaggactccagcagagacctgagaatcaagaacatggaggcatagatctcctcctctctgaatcccatgcccccatcagccacataccacatagggaggccacagatgggccgtggtgggtggtggtagcctttgcaccatggtgagcagagacggctggctctcctcagggctccggctggaaggtgtataccggaaagggggcgctcgtgcccgcagcctgagactcctggctgagttccgtcgggatgcccggtcggtgaagctccgaccaggggagcactttgtggaggatgtcactgacacactcaaacgcttctttcgtgagctcgatgaccctgtgacctctgcacggttgctgcctcgctggagggaggctgctggtattcctaagatccctgagagccaaggcccaaccaggatctctgccttcccccaccagaatccatggtttggcagccctccgccccatcacttcccaccctgggggatcatccagagacttggctcagggggaggtgggaagggggcagagacacatccatcctgcatttgtgcctaaaaatccctccctctgtaccagctgccactctttcttcccgggtcctccccaaccctcctccattccatccccagagctgccccagaagaatcagcgcctggagaaatataaagatgtgattggctgcctgccgcgggtcaaccgccgcacactggccaccctcattgggcatctctatcggtcagtatggctagaccctctgcagaacccttcctcacttcaatctgaccctgcactttcattcatttattcattcattcattcatttgttcattccacaaacagttgttaagtgaaggtatcatagcactaaggttcagagaatggatttgagggatcaggcagacctaggctttaatctggtgccgtcattctagctgtgtgactttgggtaagttacttgttctctctgggcctcaatttcttcatttctaaaaggaagtaatggatgatgtaatgaatcatatccacctcatagtttatgagagagttaaatgaaggctgggcgcgtggtgtctcacacctgtaatcccaacactttgggaagcaaggtgggcgggtcatctaaggccaggagtttgagactagcctggccaacatggtgaaacccagcctctactaaaaatacaaaaattagcctggcatggtggtacataccagtaatctcagctactcaggaggctgaggcacgagaatcgcttgagcacaggaggtggaggttgcagtgagccaagattgtaccacttcactccagcctgggtgacagagggagatcttgtctcaaaaaaaaaaaaaagaaaaaagaaaaaaggaaaaaaaaagaacaaaaagagttaaaattcataaaattcttaactatagtacatgccagtacatccggcatgtcataagccttcagaaatggttagcaatcaatattattttgttttattatgcgatgtcagggaaagggttagatataagaaacacaaaaatgaataagatgcacatctacctttaccaatctgttagggagacaggcctttgagcaattctggggagaagccatttctgtattgcactgattatactatattacaggggccaggtatggtggctcacacctgtaatcccaacatgttgggaggccaaggcaggaggatcatttgagcccaggagttggagaccagcctgggtaacatagtgagacatcccatctctataaaagataaaaataaataaataataaaaatatactatattatagggattggtcaactacaggcccatgggccaaatccagcttgttgcctatgtttgtaaataaagttttgtacataaagtgtaaagccacacccattcatgtatatattttctttttttttttttttgagacggagtcttgctctgtggcccaggcgggagtgcagtggcgcaatctcggctcactgcaagctccgcctccagggttcacgccattctcctgcctcagcctcccgagtagctgggactacaggcacccaccatcacgcccggctaattttttttgtatttttagtagagacggggtttcaccgtgttagccaggatggtctcgatctcctgacctcgtgatccgcctgcctcggcctcccaaagtgctgggattacaagcgtgagccaccgcgcccggcccatgtatatattttctatagctcctttcatgatgcagcaacagagctgagagttagaacagagactgtctgtcctgcaagcctaaaatgtctactatctgtccctttacataaaaagtttgctgattcttgccttatctgtctcccctagactgggagctccttgaggccaatattatcttactgctgtattccaagcacttagcccaggcatacaatagggactcaataagtgtttgctgaatgagtggctacactgatgaagaccgtggcacccctctgcagggtgcagaaatgtgcggctctaaaccagatgtgcacgcggaacttggctctgctgtttgcacccagcgtgttccagacggatgggcgaggggagcacgaggtgcgagtgctgcaagagctcattgatggctacatctctgtctttgatgtaaggctttcctgacccctaacccacaacccctttcccctacccttgcaggacccagagactctggatcctgatcaccccaacaagcccccagcccaggcctctggtggccagctataccaggaactacctcccagagccctggcccttcttctcccacaacttcacttccaacatcctcacccccttggttcttagctcttctggcctccagccctcttaaacaggtcctccttggccttgagatcttcccggcagatcctcttccagcaccccaacactctcttttggctctttcacagatcgattctgaccaggtagctcagattgacttggaggtcagtcttatcaccacctggaaggacgtgcaggtaactcgtcctgaccttagtctcctgaatggggcaggaggagacatcaggacaggaagctgactttctgcccagttgaggaagtttccagcctgtccttctggacactagcactcagctctttgggagacagggggaacccaatgagagaagtgctttggggagtggggtttggttagggtttgctccatttgttccaccatgaggattcttcctggtgataatcttggcactggatagttggttttggttttctgtgggaacatcaagtgagaccatactactaagtgtaagagatccaaggacgagttagtaaagtcagacaaagcagtgagaataataataataaatataatagcaaacatagctgaggacttactatattccaagcatctctaatctcatgttagtatgatacaactccatgaagtaggtaatctcatttttttcaaataaacgggttcagcgggtcatttattcaaggtcaccctgtagcgagtggcagagagaccaggcagtctgactccacatctgtcctcccaaccactatgatgccttgggaagtacatgtgcagcctaaagatgcagttctgccactcccagaggtctcccttttaagagcctgagtgacattggggttgggaggagacctttgttggaagagtcacttatgaggcaacacgaggaaccctctgactttgatgtcttttgcaccctttttttgcccttctgacttttttacccctcccctcagctgtctcaggctggagacctcatcatggaagtttatatagagcagcagctcccagacaactgtgtcaccctgaaggttggtcctgaggggactggaggggaaataagaggatagtgaggttccaggggcaatagcctgaccagcatgaattctctgctcttgccctgaccccaggtgtccccaaccctgactgctgaggagctgactaaccaggtactggagatgcgggggacagcagctgggatggacttgtgggtgacttttgagattcgcgagcatggggagctgggtgagtatgaccacgcctgtgtgttcatgcatgtgtatatgcgtgtgtgtggttgtgtggtcaaggtcatcagtgacttcatgttaccaaatatgaatggtaactcatggatgactcatccactcatccatgcgaggggacattcaacacagttgactcactccctctttctcagtattcttccatcttggccttagtgacccccacaagctcgtagtttaccttctaccttaaagggagcttctcttcctcttttgcccagactccaaatgttggagagacccacggctcaatcctaggcccttttctctcatctatctacatttctccttggatgaattaacccattctcatggttttaaatgccattaataacctgacacccaaatttgtatatctggcccacatctctcctctcagctccagactcacatatccaaatgcctactcaacacctccacttctgacaagcaactcaaatgtaaaacatctaagaccaatttagatgatgtctagtcccctttcctcaaaaaaaaagcctaggccattctccaatttttcccaactcagtaaatggtaccacaattcacccagtgattaaggccagaaacctgggagtcctctgggactcctccctttgtgtcatcttcatacacaactcaccaactagtcttgtcgattccattagaatcaatcacttctctccatctccactgctaccaccatcctagttgaagtcatcattatgtttttgtctgtcaacagtaaccactaaaatgtgtggccccagaaaggggatagctggacaatgttccatgcttgcctccctacaatccattttccatgcagcagccaagtgaatatttcaagcataaatcagctcatatccttcctatggttaaaacccttcagtggcttcccattgaacttaaagtatcattccagtcccttaccatggcccacatggccttgaatgtctgacccctgcgtcctccatgcctcatctcacatcacctgttctcgtatctatcctctttgctgtagctacattggctgtttagttccccaaatacatctttcctgattgccagcctttgttcttgcattttgtcatgcttgaaatcttctaccacccaatcttagcatggcttgctcttcctaatccttcagatctctgagtctcatcttcaagtgccacttttgaaaggtcttgcctgactaccctatctcagttgctgtcctgttgcttgctcagtttattgtttcttgcaaagcaattatttgtctgcaattatttttttgtctgtaccctcactagactgtgtgctttgtgaagggaggccatgtgtatcatgctcaccaccgtatcccagggccagcacagttcctggcatagagacagtgaaaaataaatgtctgtggttggatagttgaatggatgaatgaatgactggtgagagctgggggcttagtatggatattctgattgatatataaaccctcacctttccccttaagagcggccactgcatcccaaggaaaaggtcttagagcaggctttacaatggtgccagctcccagagccctgctcagcttccctgctcttgaaaaaagtccccctggcccaagctggctgcctcttcacaggtgagcctccttcctctgcccagcatcccccaggtctctcccctagcatcctccacccaggattgcccatctatgcccaggtatccgacgtgagagcccacgggtggggctgttgcggtgtcgtgaggagccacctcgcttgctgggaagccgcttccaggagaggttctttctgctgcgtggccgctgcctgctgctgctcaaggagaagaaagtgaggccctggggccagaggtgtgggatgctgggtggccatggagaggagccatgactgcacccaccctctgactccacagcccatactctcatcaatctcattgcttccctgcccccgacttctgtgaccctgtgaccacagaccccattgcttccatgacgtcttgacctcattaaccatgatctctcatctctccatctcgctgactctgtttctgttctcagagctctaaaccagaacgggagtggcctttggaaggtgccaaggtctacctgggaatccgcaagaagttaaagcccccaacaccgtgagttttcttccccagcccgcacttccagggccttcctgccttcacccccctgccctttctgactgccccatcactgttctttgtctcccaggtggggcttcacattgatactagagaagatgcacctgtgagtacctcctgccctggcttctcctctggcccacctctgcaccctgtcttttctcttccctctttgtatgctccattcctatagctgtgaccctctctctccctctgattccattctgatcaccccagctacttgtcctgcactgacgaggatgaaatgtgggattggaccaccagcatccttaaagcccaggtgaggggaaagaaaaggctgagggctgggtctgtggtccccctggggcccagctgtcctcctcagtgcctttcatgcccactgatgccaacccctcacgctcccaccagcacgatgaccagcagccagtggtcttacgacgccattcctcctctgaccttgcccgtcagaagtttggcactatgcctttgctgcctatccgtggggatgacagtggagccaccctcctctctgccaatcagaccctggtaaggcaccccaccctgccccaacccgattcctgtcgtgtagcccttgtcacattgcagtaggcagtggtgtgcctgctagcctggtgccaccctatgctcactggtccccctcccttctgccttcttcacccccattccccacccctgtctcctgttgctagtcctcactgtgtctttatgtctttccttccccttgtccccaccccacctgtgtccagcggcgactacacaaccggaggaccctgtccatgttctttgtgagtattgtgcctgctccagcggtgtgcctgtcaaccctgtattcctctgtgctgcctgagccccgggtgtgctgttttcctcatgtaggccatcagggggtgtgtgtgtgtgtgtgtgtgtgtgtgtgtgtgtaggccatcagggtgtgtgtgtgtgtgtgtgtgtgtgtgtgtgtaggccatcagggtgtgtgtgtgtgtagagagagagagagggagagcgaggaaaagggagagggagaagggacaggacagagagagagaggagccagaaagaatgagaaaatgagggatgtaagatgcagtaataaaaggagaaaggtcgggcacagtggctcatgcctgtaatcccagcactttgggaggctgaggtgggtggatcccctgaggtcaggagttcaagaccagtctaatcgacatggtgaaatcccgtctctactaaaaatacaaaattagctaggtgtggtggtgcatgcctgtgatcccagctacttgggaggctgaggcaggagaatcacttgaacctgggaggcggaggttgcagtgagccaagatcgcaccactgcactccagcctaggcaacaagagtaaaactctgtctcaaaaaaaaaaaaaaaggaaaaagttgtcacagaatctgtgaaatagaaggaaagtgatgaagtgaatgcattttggagttagacagacctgggttcaaaccccagctctaccattcactcattatgtgatgctgggcaacttacttaacccctttgcattcagttgactcagtgtaacccactgcacagggttgttccagaatcatacatgccaagtattttacagcatctggcccagaggaagagctcagtaaatgttagtgattcataatctggtaactttaactatgtgcccactcctgccattccattcccatccagccaatgaagtcatcccaggggtctgtggaggagcaagaggagctggaggagcctgtgtacgaggagccagtgtatgaggaagtaggggccttccctgagttgatccaggacacttctacctccttctccaccacacgggagtggacagtgaagccagagaaccccctcaccagccagaagtcattggatcaaccctttctctccaagtcaagcacccttggccaggaggagaggccacctgagccccctccaggccccccttcaaagagcagtccccaggcacgggggtccctagaggaacagctgctccaggagctcagcagcctcatcctgaggaaaggagagaccactgcaggcctgggaagtccttcccagccatccagcccccaatcccccagccccactggccttccaacacagacacctggcttccccacccaacccccatgcacttccagtccaccctccagccagcccctcacatgaccctaggaccagcagtctgagagggtaggtaccagaagacccagaaactcttatcgtggcactgttgcagcttcctctgccctggctggaaagactccagaatccagtgtggtgctgtggaaggagcactggactaaaggcttcagtggctgcgtgtcccaggacaggtcatggcccctctctgggcccagcccatttatctataccatgaggtaactgaagtaaggagagcagtgaatgtcaaactgtgtttcttagagccataagccccacatattatccctgaacaagggcagctcctgctttatatatttgatacgtaggggttccatgagagattttgggttttaaaggaatggttttactgcattaaagaaaaaaaatgctttggaaaccagaggcctgggtgatgttaaagtctatcctgtcccacttcctacattctgggactaccgtgaagcctggagtagggagagcgagtttgggagctgggactcggggagtcaaaaatagatgagtaattgtcaataaacctgggaaccaaaagactaccattctcattcattcattcaacaaatatgtattgtgcacctaattggtgccaggtctggggatatagcatgaacaaaacaaacagggcccctgctcttatgaatcctccgttgtggaggg

SEQ ID NO: 1331 - DNA, 292 bp, Homo sapiens
tccgacatgaggccctggggggcgagcgcgggccagggcgcctcctgggtttagggggctgcagctgggaatgggggaggggtaggaatgccgtcctcaggatctgaaacaagcacgtctaagacgtccggctgaggtccggccccaccccctacccaaccagggagctgtccgggccaggagtgctgtttcgcctttcggcaagaggtcagcggcaacgcaagctctctaccacgaccctggtcccgcttccccgacgccccgagcgttcccctttccagcttgttcgcgc

SEQ ID NO: 1332 - DNA, 292 bp, Homo sapiens; identical to SEQ ID NO: 1329

SEQ ID NO: 1333 - DNA, 2009 bp, Homo sapiens
ctgaaagctcgtttggaggttctagcaggggagcgcagctactcttatactcttgactgaagaccgatcgtcctctatcggggatggtcatcctcttccattgagcacacagcttctggagggacgcacatggagtggtgcgggaggaaggggatacccgcctagtcagccagatcagccgaatcaaccctgatgatcaatggggtgacacatgtcgcagccagatcaccctcacatcccaaaaataacactcagattgctttttcttttttaagatgtagacttttcttgagactttcgtacaaggcaatggacagataaccttaacctcccagagaaaacacacattggccacagaaaaaggcgcttctccgtatacctgccatagttatcagcaactttgaaatggcttctcagactctcaggggttggcttgttgtgtttgcttttgcaaataactcaggcttaagtcctgctactttcagagcctaggggacgcttaaggactaccatcagtttaacacagtggcacttggagcacatgctacttatggtggtgaggaggggtgctggtgtgagggtctgaacgcttgcttctcctctggcagggtgtgagcagccagaggccactacctgggcaaggatgcttgctcagtgtccatggagggacatgtgatccagcaggtgggcaggaaccaggcccctgtggccgcccaactctccataatagaatccttggtcatccatgggcccgtaaaccatgaccacgtctcctgccctcagcgccagcctgcccttcccctggccccccatttgcccatccccaggatcatagtccagagctgctatcatgatctttggagtccacagtgggagtctcttggagttcccctggagcaccagggaggaaccctgggggatggtgagcccctgaaagtcctcgaggtgggccacagaaggcaggtgcccttgggccggagaacgccacctcctatcagtctgctctgtccccacctccatctcagccactaggcgcccggggatattgcccacttgcctgttgcactcgctgaggtagaaatcatgggtgtcctgagagccccacactcttagcaactgccttttctggaagaccagctcctcctctgcagccttgaggttggcagacatcaccagggggttgtaatcagagagggccacaaagaccctggctggagtgttggcccccgtccccagctgttgggggccacccctgggcatcttgatgactttggcggatggagctggacacagtgccgagctgggctcatggagctggcaccctctcttgacccccagagcttgtccttgcctgctgtggggctcaggctccctcctctcctctcgcctctctgtgccccacagatccaagcacagtgcctcctgctcctccttcaaaacgttatggaagtcagatgcatactgttggctggcacccagctggggaggtgtgaacccttgggcatcttgcttttgccgaagtaccctctcaagggcagccttttcctgacacggttctttcctgggcccacactcggtgcgtagatggatgaatcctggagcagggcttttgctggtgcccatgtgctggtagcaattttccttctccccagtctggtcactgactgaaggtggcctgtggttctggggactcttctgaaagagcaggtcctttctacagccctcccaggcctctgcaagctcctgggcttggctgccagcccctgaactcggacattctccttctgagcccaggttggacactggggattgcctccttgggggttcttcaaagaatgcttctaggaacttggcctggggctccccgcagcttccagggttgtgggggctggccttggcactcggaggagccagtgacagcttctgggggcagacggggaaggtgactctgtaggtggatgggtcgccacaagtgtagctaaagggtggagtctctggccatcggtgac

SEQ ID NO: 1334 - DNA, 1747 bp, Homo sapiens
gtcaccgatggccagagactccaccctttagctacacttgtggcgacccatccacctacagagtcaccttccccgtctgcccccagaagctgtcactggctcctccgagtgccaaggccagcccccacaaccctggaagctgcggggagccccaggccaagttcctagaagcattctttgaagaacccccaaggaggcaatccccagtgtccaacctgggctcagaaggagaatgtccgagttcaggggctggcagccaagcccaggagcttgcagaggcctgggagggctgtagaaaggacctgctctttcagaagagtccccagaaccacaggccaccttcagtcagtgaccagactggggagaaggaaaattgctaccagcacatgggcaccagcaaaagccctgctccaggattcatccatctacgcaccgagtgtgggcccaggaaagaaccgtgtcaggaaaaggctgcccttgagagggtacttcggcaaaagcaagatgcccaagggttcacacctccccagctgggtgccagccaacagtatgcatctgacttccataacgttttgaaggaggagcaggaggcactgtgcttggatctgtggggcacagagaggcgagaggagaggagggagcctgagccccacagcaggcaaggacaagctctgggggtcaagagagggtgccagctccatgagcccagctcggcactgtgtccagctccatccgccaaagtcatcaagatgcccaggggtggcccccaacagctggggacgggggccaacactccagccagggtctttgtggccctctctgattacaaccccctggtgatgtctgccaacctcaaggctgcagaggaggagctggtcttccagaaaaggcagttgctaagagtgtggggctctcaggacacccatgatttctacctcagcgagtgcaacaggcaagtgggcaatatccccgggcgcctagtggctgagatggaggtggggacagagcagactgataggaggtggcgttctccggcccaagggcacctgccttctgtggcccacctcgaggactttcaggggctcaccatcccccagggttcctccctggtgctccaggggaactccaagagactcccactgtggactccaaagatcatgatagcagctctggactatgatcctggggatgggcaaatggggggccaggggaagggcaggctggcgctgagggcaggagacgtggtcatggtttacgggcccatggatgaccaaggattctattatggagagttgggcggccacaggggcctggttcctgcccacctgctggatcacatgtccctccatggacactgagcaagcatccttgcccaggtagtggcctctggctgctcacaccctgccagaggagaagcaagcgttcagaccctcacaccagcacccctcctcaccaccataagtagcatgtgctccaagtgccactgtgttaaactgatggtagtccttaagtgtcccctaggctctgaaagtagcaggacttaagcctgagttatttgcaaaagcaaacacaacaagccaacccctgagagtctgagaagccatttcaaagttgctgataactatggcaggtatacggagaagcgcctttttctgtggccaatgtgtgttttctctgggaggttaaggttatctgtccattgccttgtacgaaagtctcaagaaaagtctacatcttaaaaaagaaa

SEQ ID NO: 1335 - DNA, 2009 bp, Homo sapiens
gtcaccgatggccagagactccaccctttagctacacttgtggcgacccatccacctacagagtcaccttccccgtctgcccccagaagctgtcactggctcctccgagtgccaaggccagcccccacaaccctggaagctgcggggagccccaggccaagttcctagaagcattctttgaagaacccccaaggaggcaatccccagtgtccaacctgggctcagaaggagaatgtccgagttcaggggctggcagccaagcccaggagcttgcagaggcctgggagggctgtagaaaggacctgctctttcagaagagtccccagaaccacaggccaccttcagtcagtgaccagcctggggagaaggaaaattgctcccagcacatgggcaccagcaaaagccctgctccaggattcatccatctacgcaccgagtgtgggcccaggaaagaaccgtgtcaggaaaaggctgcccttgagagggtacttcggcaaaagcaagatgcccaagggttcacacctccccagctgggcgccagccaacagtatgcatctgacttccataacgttttgaaggaggagcaggaggcactgtgcttggatctgtggggcacagagaggcgagaggagaggagggagcctgagccccacagcaggcaaggacaagctctgggggtgaagagagggtgccagctccatgagcccagctcggcactgtgtccagctccatccgccaaagtcatcaagatgcccaggggtggcccccaacagctggggacgggggccaacactccagccagggtctttgtggccctctctgattacaaccccctggtgatgtctgccaacctcaaggctgcagaggaggagctggtcttccagaaaaagcagttgctaagagtgtggggctctcaggacacccatgatttctacctcagcgagtgcaacaggcaagtgggcaatatccccgggtgcctagtggctgagatggaggtggggacagagcagactgataggaggtggcgttctccggcccaagggcacctgccttctgtggcccacctcgaggactttcaggggctcaccatcccccagggttcctccctggtgctccaggggaactccaagagactcccactgtggactccaaagatcatgatagcagctctggactatgatcctggggatgggcaaatggggggccaggggaagggcaggctggcgctgagggcaggagacgtggtcatggtttacgggcccatggatgaccaaggattctattatggagagttgggcggccacaggggcctggttcctgcccacctgctggatcacatgtccctccatggacactgagcaagcatccttgcccaggtagtggcctctggctgctcacaccctgccagaggagaagcaagcgttcagaccctcacaccagcacccctcctcaccaccataagtagcatgtgctccaagtgccactgtgttaaactgatggtagtccttaagcgtcccctaggctctgaaagtagcaggacttaagcctgagttatttgcaaaagcaaacacaacaagccaacccctgagagtctgagaagccatttcaaagttgctgataactatggcaggtatacggagaagcgcctttttctgtggccaatgtgtgttttctctgggaggttaaggttatctgtccattgccttgtacgaaagtctcaagaaaagtctacatcttaaaaaagaaaaagcaatctgagtgttatttttgggatgtgagggtgatctggctgcgacatgtgtcaccccattgatcatcagggttgattcggctgatctggctgactaggcgggtatccccttcctcccgcaccactccatgtgcgtccctccagaagctgtgtgctcaatggaagaggatgaccatccccgatagaggacgatcggtcttcagtcaagagtataagagtagctgcgctcccctgctagaacctccaaacgagctttcag

SEQ ID NO: 1336 - DNA, 2009 bp, Homo sapiens
ctgagagctcgtttggaggttctagcaggggagcgcagctactcttatactcttgactgaagaccgatcgtcctctatcggggatggtcatcctcttccattgagcacacagcttctggagggacgcacatggagtggtgagggaggaaggggatacccgcctagtcagccagatcagccgaatcaaccctgatgatcaatggggtgacacatgtcgcagccagatcaccctcacatcccaaaaataacactcagattgctttttcttttttaagatgtagacttttcttgagactttcgtacaaggcaatggacagataaccttaacctcccagagaaaacacacattggccacagaaaaaggcgcttctccgtatacctgccatagttatcagcaactttgaaatggcttctcagactctcaggggttggcttgttgtgtttgcttttgcaaataactcaggcttaagtcctgctactttcagagcctaggggacgcttaaggactaccatcagtttaacacagtggcacttggagcacatgctacttatggtggtgaggaggggtgctggtgtgagggtctgaacgcttgcttctcctctggcagggtgtgagcagccagaggccactacctgggcaaggatgcttgctcagtgtccatggagggacatgtgatccagcaggtgggcaggaaccaggcccctgtggccgcccaactctccataatagaatccttggtcatccatgggcccgtaaaccatgaccacgtctcctgccctcagcgccagcctgcccttcccctggccccccatttgcccatccccaggatcatagtccagagctgctatcatgatctttggagtccacagtgggagtctcttggagttcccctggagcaccagggaggaaccctgggggatggtgagcccctgaaagtcctcgaggtgggccacagaaggcaggttcccttgggccggagaacgccacctcctatcagtctgctctgtccccacctccatctcagccactaggcgcccggggatattgcccacttgcctgttgcactcgctgaggtagaaatcatgggtgtcctgagagccccacactcttagcaactgccttttctggaagaccagctcctcctctgcagccttgaggttggcagacatcaccagggggttgtaatcagagagggccacaaagaccctggctggagtgttggcccccgtccccagctgttgggggccacccctgggcatcttgatgactttggcggatggagctggacacagtgccgagctgggctcatggagctggcaccctctcttcacccccagagcttgtccttgcctgctgtggggctcaggctccctcctctcctctcgcctctctgtgccccacagatccaagcacagtgcctcctgctcctccttcaaaacgttatggaagtcagatgcatactgttggctggcgcccagctggggaggtgtgaacccttgggcatcttgcttttgccgaagtaccctctcaagggcagccttttcctgacacggttctttcctgggcccacactcggtgcgtagatggatgaatcctggagcagggcttttgctggtgcccatgtgctgggagcaattttccttctccccaggctggtcactgactgaaggtggcctgtggttctggggactcttctgaaagagcaggtcctttctacagccctcccaggcctctgcaagctcctgggcttggctgccagcccctgaactcggacattctccttctgagcccaggttggacactggggattgcctccttgggggttcttcaaagaatgcttctaggaacttggcctggggctccccgcagcttccagggttgtgggggctggccttggcactcggaggagccagtgacagcttctgggggcagacggggaaggtgactctgtaggtggatgggtcgccacaagtgtagctaaagggtggagtctctggccatcggtgac

SEQ ID NO: 1337 - DNA, 375 bp, Homo sapiens
gagcctgagaggattatgaaaacatggcaacggaagtgaggccaggggacacagcatgggggcatgaggagcaggggacagcgggtggggctagaggagagggaggtttagggaggcctctgctgctgtgactgtgagccccagccaatgatgacgtggccaccgcacaatctgagttctgggaaccatgtgatggaatgtgttctgggaatagactgcagccaggaaaaaaaaagcagaagggtgcaccctcccttcctcagccaggaaaacatttctgtagcccttgcggacccagtgcgcagaagtgagagggaggaaagccaggctcatgtttccttggttgtgcttcaacttctaaaatatgttttttct

SEQ ID NO: 1338 - DNA, 494 bp, Homo sapiens
gcagctcaccctcagggtgatcattgggcccctcaaatgggttgtagttatactgagccatgaagatcttgagcttgggggcagcaggagccgccgagccccccatttccagggccagggacacgctgtcaggctccaggtcatccacctcactggctgtgtccctgtccagagtaggggaggacggcacggtggcccacatcgacccctcagaggaggagtttgactgggagctggttttcttggacagaggttggctggcagggactgtctctgaaacttgggggacactggctgactccccaagggcaactgggctctcctcgagggaggcttcccttttctcctgtatgtctctgttgggctgtgacactgcgtagtcttcaggccgtgcgtggaacttgggccttctgctacctttaacttgggactccggcatttgactggtctcccagggctgttcaggagggtgaccaggccgacactggagcgcc

SEQ ID NO: 1339 - DNA, 205 bp, Homo sapiens
ttttttttttttttttgagatggagtcttgctctgttgcccaggctggagtgcagtggtgcaatctcagttcactgcaagctctgcctcccgggttcacgccattctcctgcctcagcctcctgagtagctgggactacaggcgcccgccaccacgcctggctaattttttgtatttttactagagacggggtttcactgtgtta

SEQ ID NO: 1340 - DNA, 494 bp, Homo sapiens
ggcgctccagtgtcggcctggtcaccctcctgaacagccctgggagaccagtcaaatgccggagtcccaagttaaaggtagcagaaggcccaagttccacgcacggcctgaagactacgcagtgtcacagcccaacagagacatacaggagaaaagggaagcctccctcgaggagagcccagttgcccttggggagtcagccagtgtcccccaagtttcagagacagtccctgccagccaacctctgtccaagaaaaccagctcccagtcaaactcctcctctgaggggtcgatgtgggccaccgtgccgtcctcccctactctggacagggacacagccagtgaggtggatgacctggagcctgacagcgtgtccctggccctggaaatggggggctcggcggctcctgctgcccccaagctcaagatcttcatggctcagtataactacaacccatttgaggggcccaatgatcaccctgagggtgagctgc

SEQ ID NO: 1341 - DNA, 375 bp, Homo sapiens
gagcctgagaggattatgaaaacatggcaacggaagtgaggccaggggacacagcatgggggcatgaggagcaggggacagcgggtggggctagaggagagggaggtttagggaggcctctgctgctgtgactgtgagccccagccaatgatgacgtggccaccgcacaatctgagttctgggaaccatgtgatggaatgtgttctgggaatagactgcagccaggaaaaaaaaagcagaagggtgcaccctcccttcctcagccaggaaaacatttctgtagcccttgcggacccaatgcgcagaagtgagagggaggaaagccaggctcatgtttccttggttgtgcttcaacttctaaaatatgttttttct

SEQ ID NO: 1342 - DNA, 375 bp, Homo sapiens
agaaaaaacatattttagaagttgaagcacaaccaaggaaacatgagcctggctttcctccctctcacttctgcgcactgggtccgcaagggctacagaaatgttttcctggctgaggaagggagggtgcacccttctgctttttttttcctggctgcagtctattcccagaacacattccatcacatggttcccagaactcagattgtgcggtggccacgtcatcattggctggggctcacagtcacagcagcagaggcctccctaaacctccctctcctctagccccacccgctgtcccctgctcctcatgcccccatgctgtgtcccctggcctcacttccgttgccatgttttcataatcctctcaggctc

SEQ ID NO: 1343 - DNA, 3347 bp, Homo sapiens
  SITE (2558): n equals a,t,g, or c
agggaacgaactggctctggacttagggagtgtgtcactatgggggcagccacaggggacacagcaactcctctcctggcttctttccagaccataaatctaacagctaaagctactcaagttcaaagccatggccttgctccttataaccatatgaaagacaagacacattgaccaatgatacaagtaacccaagtgatttgcatttatggaaaaaggctattactcctgagaaagagttgccattttatataaaagaaaagaagataggaaaaagaaaagcacacaagttttatttggaatgaaggcaattcacaggtcacaaaataattcatgctgaaagggcctgcagagttcttgcactgtgatgtcttcgagccatctttattgtcatgctgcatgcacgtatagaaaacggaataggtccattctatgtagccatttttgattttctgaaccacctaactacttgtacccacctgcaatgtgtaattcatggggcagtgccctccttacacaaccgcacacgctcacaggcaccaactcacagggattctccttgtccacgctacctgtgagccccaaagtgacagccccacaaaggagcttccacaacttcccaaaccgtctctgctccttgctttcttccacctgctccccagaggccccaagaaggagttggccctgatgagaacggtgctccatgggtgaccgcgaatccggcttagccttcactccggtcccacgtgtggcccagtccattctcagctcattccctgggaaagcaagatcatggtcttcagaggcctcccgcttctaacatttcctaactcagtggttgccgctctcctgtgaccagcccttcttcccacctcactgtgaaaaattcccagaagccaggatcacgactcacttgtcttcacataatggatatttacttaatatttattatcaatttccccacctccaaccctgtccctggcacacacttggcatcatttatccaataggggactgggaattttggtgaagtgaatcaaggctattcagggtcaagagagagattaacttgaatgggccaatttgctagataattaatgtcttaaaaaccaaaaccagagagaagcccacagccctgtcctctgtggcttgaaaaagaaacccagcatcagaggaatgagcgatgatgccccctggggcgcccacttctgtttgtcaggagggatggtcggaggggcagctcacctggcgaggtgatggctctgcatttcccacgaacatatatgtgacatgtacataaatataaatacttatgtttataaatgttgaatggttccttctagctgtggctgagtagacgttggtgtttctaacttctttcagtgtgttagagattgattacatgctagctataaaaagtaaaataaatattttaccatgctattaaagcttggaccattatcaaacacacacaaacacacactcattctgctgtttaaaaattcatctgcgttcgttctcccaggagtgctccagggaaccacaggcttcccggcacttgaaggctgaactgagcgtgagtgccctggtccccaggaagcaggcggatgctgcaggaaggtggcagacagcctgcatccaggagggccccaggaagtggggatgctgcaggaaggcggcacaaacctgcatccgggagggccccaggaagcagggggatgctgcaggaaggtggcagacagactgcatccaggagggcacagtgacctgtcactccgttctgcagaaattggcccagcagttgcgttatgcccaaccaaaagatgctcgttccagctttcaaatgtgatgatttcagcctgtgaggacaatgccatgtccccaccctaagccagcaaaatgcgaaatctctgttctggcccagaatggcacaagggaggagtctttgcagagttccacgccaccccccagcttactgcggccttcacctgctctgtctaggattgccagctgtggttccaagtgaggagcaaacccattttatgagccatgttcctgcggagacctgatgggccaggccttctgtggctttgaaaacccctaagctcttcacctcctgggcctaggccttcttgtctgactcaacagcaagaaaaatgaacttgccaaaattggcagtaggtgtccttgacacaggggcttctgatggcatcgcccagaaaatgctggaaccagaactggtcagagactttgaagggcacagcctggcgggctactccccaagggtctcaggtctctgcccacctgactaccctgcagcaaacgcttctctgtaacctgacttctcccttcagacctcagcctacaaccatcctcttcatgccaggaaccaactgcttctcagcctcggcttagggtcttaagttcaccagaagggatcggggtttgcgttgatattataaggaatcttcccagaaggagctgcccttcatccatccacaagaatacattgagttcatttagttcttgaccaggtaagaaaagaataaaggagaacnaatattaaatactcttttttaattgatgccttactactgttttgaagttgagccgaaatccaattgatgtttacattttctatcaagtacacatgagctgtgggagtctagcatatttttgtccaaaagagagaggctttcaaatgaattcctattcctcttggtcccctccacctattttggaggtctgcatgtggagttgtatgctattttccaaggtacctcatttaaaaaaaaaaaaaaaaaaaaactgcctctcatttgttcccttaaaacgtctctctctctcataaaactaagttatcattgaaatattaaacgatctgaagcgtctttttttttttcaaataaatgtcaaagatggtaatagtttgtaaatcagtaaatcctctgtccatctgcccattgtccatggtcctgataatagagccaagatggattttcacatgtaaggtgttagtccattaatccagccattaaaagtagttgggagattgaagattagatggtttctggagcaaccgaatttgcagctgccacaaaactagataaatagccacaactggagttattttttgatctcataaaccccaggaattacacacagaatggattgaaaagcagacaagcatcttgtgctattgcagagacttttctacccaggaagtgttgaatttttaaaagaaacttgatattggtgataaaggtatgaatgaacaactctcttacttgccctcgatgtttcaagatgcctggtgaaaccgagaggccacatggcatgtccaagga

SEQ ID NO: 1344 - DNA, 5377 bp, Homo sapiens
tttatgccattagcagtttttattgaaggagaaaaattttttaattcatctcaggtttaagataaattctgcaaacattgattaaaacatgaaaggcacttaaataagcatacgtatctctgaaaacatgaaatgttatgtacatgtgttcaccattgtttggatttagagctttgaattcactaagagtttaaaatgcttttttttttttccatgccaaaacgtttgactgtgaaatatcaacccagaatgctctgggaaaaagttagcaaggcttcaaccgtttttttttttttttttaattgcaggctaaaaccatctctattcatatagaacccaaaaagcatgtctccttggacatgccatgtggcctctcggtttcaccaggcatcttgaaacatcgagggcaagtaagagagttgttcattcatacctttatcaccaatatcaagtttcttttaaaaattcaacacttcctgggtagaaaagtctctgcaatagcacaagatgcttgtctgcttttcaatccattctgtgtgtaattcctggggtttatgagatcaaaaaataactccagttgtggctatttatctagttttgtggcagctgcaaattcggttgctccagaaaccatctaatcttcaatctcccaactacttttaatggctggattaatggactaacaccttacatgtgaaaatccatcttggctctattatcaggaccatggacaatgggcagatggacagaggatttactgatttacaaactattaccatctttgacatttatttgaaaaaaaaaaagacgcttcagatcgtttaatatttcaatgataacttagttttatgagagagagagacgttttaagggaacaaatgagaggcagtttttttttttttttttttttaaatgaggtaccttggaaaatagcatacaactccacatgcagacctccaaaataggtggaggggaccaagaggaataggaattcatttgaaagtctctctcttttggacaagaatatgctagactcccacagctcatgtgtacttgatagaaaatgtaaacatcaatttgatttcggctcagcttcaaaacagtagtaaggcatcaattagaaaagagtatttaatatttgttctcctttattcttttcttacctggtcaagaactaaatgaactcaatgtattcttgtggatggatgaagggcagctccttctgggaagattccttataatatcaacgcaaaccccgatcccttctggtgaacttaagaccctaagccgaggctgagaagcagttggttcctggcatgaagaggatggttgtaggctgaggtctgaagggagaagtcaggttacagagaagcgtttgctgcagggtagtcaggtgggcagagacctgagacccttggggagtagcccgccaggctgtgcccttcaaagtctctgaccagttctggttccagcattttctgggcgatgccatcagaagcccctgtgtcaaggacacctactgccaattttggcaagttcatttttcttgctgttgagtcagacaagaaggcctaggcccaggaggtgaagagcttaggggttttcaaagccacagaaggcctggcccatcaggtctccgcaggaacatggctcataaaatgggtttgctcctcacttggaaccacagctggcaatcctagacagagccggtgaaggccgcagtaagctggggggtggcgtggaactctgcaaagactccttcccttgtgccattctgggccagaacagagatttcgcattttgctggcttagggtggggacatggcattgtcctcacaggctgaaatcatcacatttgaaagctggaacgagcatcttttggttgggcataacgcaactgctgggccaatttctgcagaacggagtgacaggtcactgtgccctcctggatgcagtctgtctgccaccttcctgcagcatccccctgcttcctggggccctcccggatgcaggctttgtgccgccttcctgcagcatccccacttcctggggccctcctggatgcaggctgtctgccaccttcctgcagcatccgcctgcttcctggggaccagggcactcacgctcagttcagccttcaagtgccgggaagcctgtggttccctggagcactcctgggagaacgaacgcagatgaatttttaaacagcagaatgagtgtgtgtttgtgtgtgtttgataatggtccaagctttaatagcatggtaaaatatttattttactttttatagctagcatgtaatcaatctctaacacactgaaagaagttagaaacaccaacgtctactcagccacagctagaaggaaccattcaacatttataaacataagtatttatatttatgtacatgtcacatatatgttcgtgggaaatgcagagccatcacctcgccaggtgagctgcccctccgaccatccctcctgacaaacagaagtgggcgccccagggggcatcatcgctcattcctctgatgctgggtttctttttcaagccacagaggacagggctgtgggcttctctctggttttggtttttaagacattaattatctagcaaattggcccattcaagttaatctctctcttgaccctgaatagccttgattcacttcaccaaaattcccagtcccctattggataaatgatgccaagtgtgtgccagggacagggttggaggtggggaaattgataataaatattaagtaaatatccattatgtgaagacaagtgagtcgtgatcctggcttctgggaatttttcacagtgaggtgggaagaagggctggtcacaggagagtggcaaccactgagttaggaaatgttagaagcgggaggcctctgaagaccatgatcttgctttccaggggaatgagctgagaatggactgggccacacgtgggaccggagtgagggctaagccggattcgcggtcacccatggagcaccgttctcatcagggccaactccttcctggggcctctggggagcaggtggaagaaagcaaggagcagagacggtttgggaagttgtggaagctcctttgtggggctgtcactttgggctcacaggtagcgtggacaaggagaatccctgtgagttggtgcctgtgagcgtgtgcggttgtgtaaggagggcactgccccatgaattacacattgcaggtgggtacaagtagttaggtggttcagaaaatcaaaaatggctacatagaatggacctattccattttctatacgtgcatgcagcatgacaataaagatggctcgaagacatcacagtgcaagaactctgcaggccctttcagcatgaattattttgtgacctgtgaattgccttcattccaaataaaacttgtgtgcttttctttttcctatcttcttttcttttatataaaatggcaactctttctcaggagtaatagcctttttccataaatgcaaatcacttgggttacttgtatcattggtcaatgtgtcttgtctttcatatggttataaggagcaaggccatggctttgaacttgagtagctttagctgttagatttatggtctggaaagaagccaggagaggagttgctgtgtcccctgtggctgcccccatagtgacacactccctaagtccagagccagttcgttcccttctaggtgaccaatgaaagtgaacaaagtggtcattttcttaatttcattctgatcagtgtctaggaaggatgatgacctacatgatctcagcttagactgtaagccgatttctcctcctcattttctgatacctttactaggacctcaagttgcacttctgggattgagtgacacgttaacacagaaggaagcccagaagacgcccgacagaaccttctccctgagcgtcccctcccctctccctacttccgatcaactgttgcacggcaaactgcaaacgtagagcaaattccactaagatggtgtcaaaaagagataattaaagaaaataaatgatggaaaacttgcctcttatctaagaaattattctataaatatctcccagttcaaagatttgacttttggttgtctggggaccattcctcgctagggacatttcaagaaaaactctccccatctggatgactttgttttcatttatgctattaaggataaccgtacgcagatccaaaataacagaggacgtcattttattggctgtccacgggaagtttcatcacacacggaggtgaagactgtgggggttgtggcacacaatatctcaacacgagacctcatcgagcggccaaacagaaggtgaagtgacacccgacacgacggaaccccagccgccctctgcagccccggtgccacctctccacagacgcctcagcccagtaagctgagtgatgacactgtccattagtctcagttcgttgcactgtcttccaacaaaacagcacttgaaaattcacaaaattaaaaaaagaaaaagaaagcagcacttccttggaaatagcaacaccactgtaacacagacggcagcgtggcatgcagatccacacctggtcggttttttccctttaggattttttttttttttaattaacaaatggaatggcaggtctgtttcaaatattagtagcataacacataagtgcaattgcagtctggccacaagcgtcagaagccttccgtgtgtctgtcacaagggcgggcagacacactccgattccacccctggagggtcaccaaaagaaagcagccacttctctatttccattgttgtcaaagcactcaggttggggaagaaaattcaaatgaaaccaagctctcagcatccggggccagccaccctgtgccatcctaagtggtctctgtaccccagacctggggctgtcatctccaccgtggcattggctgggaaagtcgctgtgggacacacccctccgctcactcctgctgcccatggaggagcctctggtgtcccccggcctggggccatgtgggtcacacggagctgagcttcaccaggccgcgcacagagtcctcatgcagggagtcctggctggccaggcccagcacgtgcatggtgcggctgtgcgccagggggctgcccgccgccagtagcctggggggcgagggcgcctcatcgggcgtcaggaactggtggcccatgtgctcatctttccggggcatcacgtccgcgagcgtggcctcggcgaggttgggcatggaggcgggcggtgtgggcgggcccagtgtgaggctggcgcaagggcgtgccccagcccaggcttcccgggcaggtgcagctcgtcgctggtgaggctgggctcgctctgcagcaggggcgtg

SEQ ID NO: 1345 - DNA, 2643 bp, Homo sapiens
acaagcttgaagatgcttttattgagaaggagagggactgaacagattcttgacaagcctaggcataaatgctccaggtttgggaaagaggtaaaataaataggtggttactggggaggctccaacacagccagaagggacactgtttgcttcagcctctgggcctgtccattgtttttgctgtgtgagctggggtgtggggtttgctgcaaactgggatccagaagaggaattctcggggctctaatgggtatcagatctgccatcttgcatcagcggggcctggttcttggaggtgtctaagctggtgcctaagggcttatctgaggaaagacaaagattcagatgaggctgatggcaggtgagggatctgcagagcttatgccaccaataagcttggagcctcaaggtaagcctgaatgcatgaagctaagcccctgggggaatatcctgtgcccagcacccgccacactcagttctgccccagggctgggcctgcaggcttttccaactggccctctctctcacccaggagcaccagacactcccaatggttgtcaggaccccagggtgtcctcacccccagcatccttctgacagcctccagccgggacaggattcgtggggcctcctgtggacatagcatctgtagctccccaggtcttatgcgaagtagctggctccccgtcagggacccaagtgtcctcaccgtgctgtgaacaaaacagcaaaagccatccgtggtgggctggaaggaccctgggcctgagcgtttgggcagagacagggctctttgggctcggaggttggggttacagaaaaattcatggagtaggctatctgagattgaaggagtaaagtcagcatttggcttcagccaatttcagaacttccagatttgaaagaagtgctctgggagagaatcttctggctggggaggggcggctaagctggcagctggggttcttcccgagtccactcccctgatccttgctgcctttgccacagcagagctccccacttaatctctaatctaggcttggacacgcctctgctctgtcctctaactcagcagagacggtgctggatcggggtcatgtacaatgtaggccaggttgtatgttctgggtctctgggtttccttggttagccctttacaaagtttctccctccatatcctgtagggccaggcactcacgcagtggagaagttctctgcctgcagccagtctgtgacctcttcaggcctcgagctaagtcgaagcattggaacctagaatcagggggaaccagggatcagagtccatctcatctcacagccaaccacagcccctaacatctgggtcccttctccaggttcccatcaaatcacttctcttactctgtggctttctggtctggcagggagctggtcttgttctctgctctggccccatgataaagttggcacactaagcatgcaataatacggtccgaatcaaaccaagactatctcctctgcttgccactgaatcctccccaccccgacctccaactcaagacttagggctctggatagtccaggctgggtagtacccgagagggtgactggccctgggtcccaggggtccccggctgtaggggctccaggatgttgcttggaatgtagccgctccgtcccgcctcattcttcaccagccaccaccgcttgctgtggtccagaacctgccaagagtcaccacctcagtcccctgagcctctttccagccagccttccctccccacacaaggctttctccctccagctctttcctaccctccttctccctctctaggccacccaccttggcagctccatccctggaccatccacccttggctgcctgtagctcccaccaaccaccacctccttttctagcctatggcccaagcctcacctccagcttctctccctggaccacagtcagttcccgtgggttcctagcttcaaactcgtacaagacttgcattttcagggctggctgggcaggtttggggctggagggcctggagttggggtccccaggctgagggtcatggttgtgtgtcttctcctgaggaaagtgtgaggtgctccctaacctatgacttccccgcctaagaaacagagtcaggatggctggagaatggggcctcagaaattaagcctatgtcccagccctgagattcccctcaggtatctccggcctgcagtctgatggtgacttttgggtttctttagagtttgctggcaggtcagtgttaggtggggctttctgcaggcaggaggggtctgaaatgtcattgatttctgaagacatttccgggagtggaattttctacatctgagttctgccctaagcactttatacttgagtatgggaaatcagaagcatgtgtgggtagtatcatgagaagaagcaatgggagcctaggagggtagaacactgtttttcacccaaggtaggagagggatgtccttgtacatgtttttctggctaaaagagaccctcttggctctcttaagatgtagagagccagagatccaaaggaacagccctgtccctccctccccaggaccacgcagtccctattaagctcagagcataccgaagggaaacagggtcctggtatcctaagggtgcct

SEQ ID NO: 1346 - DNA, 396 bp, Homo sapiens
gggcccagacaatgttagggtcatggacacattcaggtaagagagatttaagggaacatcttaagaaccctcaaatccataagtacattgggccttatctgttgactaaatcaataaaagtatagctactggtatgtagagaggggactccactgagattaaagaaagctacttttactgaaaaatgtaagaagctatggacagtccaaactctttgcttaacccttgagaaaacagggacccaaagagtggaatgacttgctggagttcacccagccaactggtgcaactgaccaaagcctacagctgtcggtcctagtgcactttgctactgtgaagtggtgtgcctgcagctgtgctgggtgccttggaatgtactgagagacatgtgtgtgc

SEQ ID NO: 1347 - DNA, 24757 bp, Homo sapiens
cacgtaccgctgatgagtgagttccacgatcactgggctgaggagcactccaagctctcgttcccttggagactgcaggaccctgtcaaccctggcctgtttgggccacctctccccagattgtacctctcctactccaggggactgcccctacaaccccaccagggccaggcatggctacaacttaggtgctaccagcagctgctgagggacagtaagccacagggtgtcagagagccctaatcagaatccctgtgcccaaggcctaccccaccaggcctggagtcccgcaagagctcagcagggagaagcccaggcccacctgataccttgtgcctgttaccttgcacccacagagctgacctccgggccaaggccgtggagctggaacatgagacattccggaacgccaaggtggccaacctctacaaggccagcgtgctgaagaaggtgggcctggtgcaggcggacccagggtcgttgcaggggcccctccatactctgacgcagaagctgtctgccagctctctgggctcaggcagcccagaactcaccctccccagcccaccccagagacagtttatgggggtagagctccattctccactggctggacatgtttctagccaaccctgtgaggatgggaggcctaaaacttgcccagtggtcagttgcctgtggccactggccacagaaacccacttgtagtgcctagtagaaaaggagggctaggtggggcatgtcaggaggagctggcgggtgccacagcctccctgcctatccctgcccaggtggccgatatccacagagcctccaaggatgggcagccctatgacatgggaggcagtgccaagagctgcagtgcccaagctgagcccccggagcccaatgagtatgacattccaccagcctcccatgtgtactcggtgagctgtggcccagtggcctccagacctgtgaccaggaaaggcttcacttcccctctgccctcaggggtgcacctcttgccaaggcctggctccccaccagggtcctgcctgcctcttccctcccacactcctgagagccccgtcccaatgtgagttactgctccagccagcggtgccctcaagggggcctagtgggctgaacctcctctcctcctgctcacatttacagctcaaacccaagcgggtgggagctggtttccccaaaggctcctgcccgttccagacggccacggaactgatggagacaactcggatcagggagcaagccccccagcccgagcggggaggcgagcacgagcccccgagccggccctgtggcctcctggatgaggatgggagtgagcccctccctgggcccagaggggaggtccctggaggcagcgctcactatggggggccctcccctgagaagaaggcaaaaagttcctctgggggcagctcccttgccaagggccgggctagcaagaaacagcagctcctagccacagcggcccacaaggattctcagagcatcgcccgcttcttctgccgaagggtggaaagcccagctctgctggcatcagccccagaggcagaaggtgcctgcccctcctgtgagggggttcagggacccccgatggccccagagaagtacacaggggaggaagatggagccgggggacattcgcctgcccctccccagactgaggagtgcctcagggagaggccaaggtaagggtacaggtagtcatagaatcttctggaacctacacggcagcatcccctttgctcactgggcgtctgaagctcagagctcacccctgagatgggctctcctaggcctcctgggatgagggagccaccaggacccagtgctgtgatgcctgctcttccctctaccagcacctgcccgcccagagaccagggcacccctgaagtccagcccacccctgcaaaggacacatggaagggcaagcggcctcgatcccagcaggtgccggcagggatgagtctgttggggaggagagaagggctgtgggcgaggccaggagctgttgtgccctgctcaaggggtcagggaaaatcagctttctttccacacctggcagcagatgggctgggctggagagaggcagctggtgcggggacccagtcttctggaggaggggagcaggccagtggaagggagctcaggagtgaccctctgctgtggcccttctcaggagaacccagagagccagcctcagaagaggccacgcccctcagccaagccctccgtcgtagctgaggtcaagggcagcgtctcggccagcgaacagggcaccttgaatcccacggctcaagaccccttccagctctccgctcctggcgtctccttgaaggaggctgcaaatgttgtggtcaagtgcctcacccctttctacaaggagggcaagtttgcttccaaggtagggggagtgagtgggctctgccttctcccatgcctggggtatgtgggtgtagtgggggtgggaggcagggagtttgagccccagaacacagtgggcctaggccagccccacgcccgtcctccctggggcctgccttgccgttgggtcatggccgtgggttgctctgggggtcagggcagggtcctgctctcttttttttttttttttatctctgtcgcccaggctggagtgcagtggtgcgatttcagctcactgcaacctccgcctcccgggttcacgccattctcctgcctcagcctcccgagtagctgggactacaggcacccgccaccacgcctggctaatttttggtatttttagtagagtcagggtttcaccgtgttagccaggatggtctcgatctcctgacctcatgatccgcccgcctcggcctcccaaagtgctgggattacaggcgtgagccactgcgcccggccaccaagggtcctgctctctgcttctcttctccctctcccttccaggagttgtttaaaggctttgcccgccacctctcacacttgctgactcagaagacctctcctggaaggagcggtgagcgctggcattgccagggccaggaggcacttgggagggtggtctacagggaggaggctaacgctcacctcctcatgcccccaccctgaatctgtagtgaaagaagaggcccagaacctcatcaggcacttcttccatggccgggcccggtgcgagagcgaagctgactggcatggcctgtgtggcccccagagatgaccaactgctggctgggcagggcccgcgtcctcccccagattctagcatgggtcatcctgggcctcacctgctgatgccagggccatcgtcttttctcagtccttctcctttccaaccatacttggctttggggatgaccccagacaccccctgaatccaggtcagaggtcagcccacctttctttctgcttgcaaagcctatagacccttctcagagcggtcctcatggctgggttttctgggacacatgtcgaggacagaaggtggagggtggtggagctgctgctggaagaaggggaaggaagagtggcccctccccgagttctaagtcaggatgaggcccacctgtccaaggtatcggaacctacccaggggaccctcagatcctccacccactcccccatccattacgatgccagcttccagccttgcccaggtcagagctgtggcagaggagaggcagccaggccctgttcctgctcagctcctgctcaggaaggccaggcctgacagatgtttgggagaggaataaagttgtgttgttgtggggcatgcaggcgtgcacacagcccttttctccagggagttttatttcctcagcagctgtttctcccatgcctgggcttgtgctaatgtggggcctgggcggagcctggggtcgggtgggcatctccctcagactgggcaacctcaggtgccccagccgagttcctgcagcccgctttggccccaggccgtcctggagagggtctggctgttttctttgcctgctggtgacgtgatagcagcccctgcctcatggcctgcatgtgggccggctgggctgtgctgaggcaggttctagaacagtgatctgatagcatccaaggcagaccatgtgggtgagacttgggccgggggaggcctcatcctcttctctccccggcctgcactcctctcagttgatgctgggccactcagtgcaagaggcactgctgtctatcaggaagacagtggtgtatagcagctcctgggcctgcccagagaaaggcctgttacaagagggctccccagccagcccctcgcctctgccccggcccacagcactccggagcagtgggcatcggcctgggcctgggctcccactgcacgccatgctggggcaaggccctcacatccaccttcgcaaggtggccagaggcctggccactcacctgtggcagctcaaaccagatggtctgggggttgtcagctgagccatagttgacttccaggccagggggccccttctcctccagagggcttagcaggtggagccgctgcaggctcttcagggcaatgcggcagtacaggctctgggggcagcagagagcagggctggtctcctctccggggaggggtcattgtgggtgatggaacagcccaagggtccctaggccagtgctgaggcaagagctgtgcccacctgggagctggggtccatgaggatgagatgctggcggttgagccccaggagagtgggtccggacagggcctgcatgctcactcgcagcaccccatagacggtgtagccgaagaggggcagctggctcatggcctctgcgggtggagagggtgcaggcaggaaatctgactgctggggccctggaacctgctctgcttggtcccccaggtcagctgagagggacagggcaggcgcagacccctcctcgcccctctacctgcattccttccctcttggcctccagcccccacccagcggtcccctagtcccagacccaccaatgaagctgatctgtgcttcctgggggctgtgtccttccagccgtctcagctcctgacccatcaggttcttgatggaggccgtgttcacctgccgttgcagctgctttggcacgtaagctagcaggtcctgcctaggatgtgtgaccagggtcagtttggcccctgaccacctggtacagggctgggcatacagcacgtgccaaataaccagtgcctattgtgggcaagactagacatccatacacatgaatgaggtgagggtcctgcaccagaggagctcggggtggggtggagaggacagatgttcacaggccccgctgctcctggccagtccatttagggccaggaagggtaccagtcaaatggccttgaccttagagaaggggaggggcttaggggcgggaggtgcctccactcaccctgagggggtattcctgttggccttgctgaggtgctgcagggcggccagcctggcgagctgcgcgtctgccttggcgctgactggcagcttcccctgaaggtagtcccacagcacctgtgcggggagcacggtgaggagggcagcggtggtccaaagccccccatcagttggtggctctagaggctcaagcctccttttgccactgtcaccccccagccaccacagacccacacccttgtggggagaggggcttggaggtcgcccaggcaggaagccgcgccctcaaactgcagcagcagctcggaggcaggcaggctgacctggctgtagtgggtgctgatgtaggtggagttatcgaagtgcagtggggtctcccagtggagccgccggctgtgcaggctcacgtcctggtccactaccacgctgttgaggtattcggcgggctgcaggggccgcaccagctggcctgcatggggagcctaggtccactgctgctcagaccacacacacccggccctgccaccccagcagaaaccaaaccacctcacccctgggcaggggagtggccccaccgtgaggctccgtccccaagcttactcttctctttgatgaggaagagggcgaattcctgcacttcctgaggctccgtgatacccatttgccggcacagctcctcctgcacttctgctgctacctgggcatgtggacagactgtgatgagggggagggaggctgggggacccagaactgatgcccaaggcctcctcccttggtggcccccaagctcactgtgaaagtctggatattcgtcctataatccacaccccccggcaggtgaataagaagcaggcgaatcgcttgtcctttctgccaaggcaggttgcagggtcagtcggccagtggtctcctgtaggagacactccccaccccagggtgtcccacaatgcccatccgccacccccagtaccaggaaagccttcatttcacccggtgggggcatccgccggcgccccccatatttgactgtgcgctggaggtgctcctggctgctccgggccagctctgcagagaagccagcctggggttatgagatggccatgtctccccaagcccaccaagttcccagtcctagaaacccctgcctctcctccatctccccttcccacgggcaccttggctggggcctgaatcctgcagaaacttggtcaggtagggcatcagcctggtcgacggggggaagaagcctgtgagaaggctgaggaagctccagcctcgagtgcagtgttccctgcagggcagagcgctcgggcttcaggctggccaggccacagtgcccagctgcccccagaagccacccccagaagccaccggtccccactcacggccgggggtgtcccgtgacctgcttgataacctggcagtaaatctcatccctcagcttctcctgctggcacagctgtggggacaggaagggcaggtggggtgagggatggcagcggtgagcctggggtctgaagccctggagaaaccctgctaggccatgggctggggctggctcaagatgtctctctcagcttaagacatcactgcactggctactcagttactttcttcgctgctcccgtctccctctgtcacacaggctggaatgcaatggcatgatctcagctcactgcaatctgcttcccaggttcaagcaattctcctgcctcagcctcccaagtattaataggcgcgtgccaccacgcccagctaacttttgtatttttagcagagatggggtttcactacgttggccaggtttaatctcgaactcctgacctcaggtgatccacccgccttggcctcccaaagtgctgggattacagatgtgggcctccgtgcccggccttttcatttattttttatttttttgagacagtcttgccctgtcacccaggctggagtgcagtggtgccatcttggctcactgcaacctccaccctcctgggttctagcgattctcctgcctcaaccttccgagtactacaggtgtgctccaccacgcccagctaatttttgtgtttttagtagagacggggtttcaccatgttggccgggctggtctgcaactcctacctcaggtgatccacctgcctcggcctcccaaagtgctggggttacaggcgggagccgccgcgcccggcccctgcttctctgatctcttactcatctctgctggctccaccttaactccctgacctctgagcggtgctgtgcccttgaacctctctctgtctgcccttctccccgtgtcctcagctggtcccatttgatgactcctggtgcctgcctccagccttctcccttgaaccccagactcctccactgggaagtctgggatttcagacctcacgtgtccaaaacagatttcctccaccagccaagacctgctccttgaagacagtagttgtcctccttcccgtagcccacatgcaattggtcagcacactctgctggctcaatcttctgcttctcccttgctgccagcaccatccctcacctgggaccactgcaataacttccttttgcttttaaacttagacacccagaatctcaaacaacagccgagtgaccctgtgaaatgtaagccgagtctctctccagaatcctctggtggtttcccatctctccaaaaatcagaggccaatgatggctacaaggcctgtggtggcctggacccaccatccgctccccatcctcatcctccgttctccctgcagctcactaggctcagccacgctggtcccggtgcgtgatggtgccgaggcttccccccacatctgaactgttgcctgcccttctctgtcaccccgtgctcactccttccctccctgtaggaaggcttctgccacaaagccttctccactgcagcagccccttccctgcattcttactctccagtgacctctcactcccagacacataagttatctcattgtaagcactgcagagacttagcctgttggcttcacagccacacccccctgcacgcaatgggtgctcagtaaatactttggaatgatttgaaggacagtgaccaagagaaggggatctccttcaggcccagacaggaggacaggcacaggcgctgggggtcgcacagcccaggcttaccttcagcagttcatagagcagatccatctcatccttgccccggggcttggactggtcacccataaaccgcatcagggctgcaggcacgataagaaacagggcacatagctggggctgtgctggggctggccccggctcatgctgttgctgtgcagggccttcacctgccatctgatgcctcactctcaaaatgcatagatgccagccagggcagctggttgcagctcgactcatggggaaactgaggctcctgggtatccaaggccccacacagcacatagcatcctctggacccatggactgccttccaaccccagactccacacaacccacaacccttgagtgggagtagaagcgggtgagggccctggggtccaggaaccaccagtgagcttcccggagttggcagactgggacagagccaggcagagctcaaggagataaggggaccagacacccaggttcatggcactgcagacatggggacccaggatgcctgtggccactcacccaggaagctggctacagccagcttgctcacatcatcactgaggctgaggagcgactcctggatgggagcctgtggccaaagagaggaggccatgggtctggggggccgtgggggtcagagggcagatctacgggccagacccctccctgcctctctcccaccttggtgtactgcaccaggctgtccgtgtcctttcctgcggcacctccatcagtctggcccagcctgtggggggcagagggagacagcccagcttgtttggccctcctgccttcatcccagccagccaggcagggagagtgctaagagcacagcccagtggctctgagcagggtgctctctctcaggaagactgaggacagacaggcacaggggttggcccagtgcactcacaaggcctgggacctccggaagtaacgccgggcgaattcctgcatggtgtagctgtgggagtcgggcagaaaggcataggccacagaggacaggctggtggcctccgagtcgtcactgtgtgcctggctccaagggtgggcagggcgctgggatcacaagaaacctggtgccacctgagtgtccagtgccctgtcccaggggtcctgccccagccccatccctccccagccagacaccaaaggagcaagaccagaagccaggaaagtgaagagctgtttattaagcatctgctggggcagccttgaactaagtaccacgtgggacacaagagcagcatccagcccagcccctgcctgcaaggagtgcacagtcttgctggagagacaaggcgagccatcaggagcgggcagaggggcagccacaggagacggacagcagggtggtcccaccgcatggcagcctcgggagtggtcaaacccctttccttcctcagtctcaggcaggccttgcctctgcttgtccctctcccatcttcctcacctctgaggccctgtcccaccgagccagccctggttccccgttggacagctgacccttgtgccagccactcctctgctccttggagaaggaaaagtcgggagcggcagccggctgcactatgtcggcaggaaagagtccggaacggcccccggcagagccaaactgccagcctggaaggcacccagggatgtggctcacccactggaccctctgcccccgggcagcctctgccaagtggatgccctccctgtgtgagcccctgccggcctctggcgatacctggctccagggtggccaccggcagcagcttgatgaggtccccacggtggaagctgaggaggctgcagttgtcagtgatgtagctgcgcagggcgatgacatagccggagtcctgtgggcaagcaggcgagggcctggagcagcaagtctgcctgtgcctccctgtcctgcctgcccacctgctccccctgctggcctgcccctccacctagcaccccagacttccagggatttggcccaaactcccagcccctgcccccacagggaagacggacagggagatgcagcatcggtgagggctgtctgcccggcctctcaacccgtgccccacacttaccttcttaagctcattcaggaatagctcaaccagcgcctcgatggcccttgcccgggctgtgtgcagcaccagctgctcgctcttcagtgacagctccagggtggagccgccccggcactccacacccagcacctccgcaaagctgcgcagggatcgggcatgaactgaggtcaccttgccacctgcccccacctctagcccagggtcgtgggctagcgcacctgtatgagcagagaatcttcagctggtcggggcggagccggggccttgggtcaccttgagcagtcgcagcccacggtgggacacggctaacagctgcacgtcgctgccactctcgccctacaggaaggtggtgggtctcgggcagtctcctgggtcctgctactgcccaagatgccctggagctgcccagggccagtggctgggctttgtccttcccctggcgtctgctccccggctctcctgcttgtggtctgtgcccatgcaccccaggatccaggctgggggcctggcatccctactccctaccccagcgccactgaccgagacaggaaagaagcgggagaagtaattggcccagttgtcccgagcggccaccacgatgcgcttcttgacgctgtcttcggtggtggtgagagaatccaggtccacctccaagcctcctgtgggcaggaaggacccaggctgccctctgctcacacagagggggctctagagtttgctcccatgctgctccctccttcagggcaggcgcggcccccagcactcaagctcccaactccatggtccctggacccatacccagcaggtctttcattttccgccgctcattctgggaaatccggatacaggactcggagaaggtgtcccgtaggatctgggggcagagcgaggtggtcaccaccaggtcctgagacagagcccacccccagagcagccatccacatgcatgaaggaaaacctgaggaggccgatggagggcgccctgcccccatggcctgtgtgctcagcagagggcctaggtggggcagggagggatggagggcttgggccacctccattcacacgtctcacctgtcccctcccctgcaactgccagccctcccttttcactcactgcccagagaccccgtggtaactgcccttggatcagcccagatacaagattgttcggggcagggggcaggtgctactgcagaattagggggaacagaggctcactcctgggagcgttcagaggtggcaaagtgacaaccatttattaagtacctactgtgtgctagagcctgtgttgtgcactgtacgcactttgcttttaaactttatctataaaactagatgaataatggtccctacttcttgttgttgttgagacacagtctcgctctgtcacccaggcgggagtgcagtggcacaatctcggctcactacaacctctgcctcccgggttcaagcaattctcctgcctcagcctcccaagtagctggggttacaggtgcgtgccaccacgcctgatttttgtatttttaatagacatggagtttcaccatgttggccagactggtctcgaactcctgacctcatgatccacctgccttggcctcccaaagtgctgggattacaggcatgagccaccgcacctggccatggtccctacttctcaggaatgttgtgaaggttcaatgaaggcaggtctgggcacacagaagtgccccccagtgctggctgccaacatgccctacgtggtgttaacctggcccagccattagacaaagggcacgaaggatgctgtctctgcagatgtctcaggctggcaggtgggccagctctcacctgctcacagaggagcctcaggtagtagggatggctgaagttctcccgtgggtagaacacctggaggagggcacagaagggcaaagatcggtgggtctggtgcctcttcccagcaagcctctgccctcccaggcctggaaaatcagccttgagatggtgggctgtggggaggggatgctggggtcccaggctgggatgcacaaagcctgccgcctccctgccagcccaaagaggccaggccaaggccccaccctcatgcccacctccttgcgtaggaacaacttccagggcgtgccggtgtaggagaagcacacgctgccagagggcgcgagtagctgggtggagaccccctggtcctccacgggctgtgtcaagcctggcagagaggagggggtgaggagcctcagtgaggggctgcagagccagagtgatgggggcacgggagggaagaccttcatccccacgagccttccaagggcccggctctcccaacctccagctgccttactccttccatggcaccatctcctgcctccattttgggccctaaactttccctggcgtccgtgaggctcgtgggtcttctatgaccatgtcagccagggccactaacttcctcacagagctgtcgggtatgtgtcagggacaacaccctgtgtgtgacagcctctcgatgacagccccaaagatgcccaggccctgccctgggtgggaacgcggaagctgggactccccagctacgtatggctccaaagtccagaagcccgaacagctggcctcagccacgcagaaatgccttcagccctgggcaccgagagtctgtgcgaaccctgcctctgccccagtgaagcccacggcgcaggagaaatgtggttccttacaacgacgctctgctgaaagggtccctgggtcctcgggcagaggcagtggtggcgctggtggaggtgggggtgtgtgggcaataggcagcttctggccaaacaggtccagaaggggcccctgcttttccttgatggagctagagggcccaagctgtagcggggccttgggtcgaggagccacagctggcggggggccctttcctgggctgggggacagcatctggggggatacggagaaagtacacgggctgagtcacagcacaaggccaagttcgccccagagagccttgagctccccagtgcagcagcacacactctgggggagacaggctggggtgctcaccggcggggacgagtgggcaccgttgatacccagcttggccagagcctcgtccttggggtcgattttcctcaggaaagctttgggaggcctcgtgggagaagcaagaggtcactaagttcatagggtgattccccgaggagcgggacagccctggccacctccccgtgggggcccacctggatggctgcacgggcacaggcacggggcccgggcggctctggtacatgcggatgatgttgccaatttccctgctgggttgtggccgcttgggcttggagtctgagctgcgcaccacagtccccctgccttgggctgcccttggccatggccttggccgctgtctccttggctggctcagcctcagcctcttttggagctttggccccaccttgcttcaatggcttcttcacgatggggggaggaggaggggacggcactgaccaggaaacaggaaagactgttaaccgcgtgcagagccaccggagccccaggccctgcccagctccccacaacctgctcttgtttccacttcttgctcctcctgctcctcctcctcctcctcctcctcctcctcctcctgcgctctcccctgggggatgtggaccttggccgggggcttcatcgtcctcactgtgatctgtggctgccctgcaagtgtccagatggccttcaaagttacccatactgcgccagctgggctcctggatgggccgcaccaactccggggagcagagcacaccccacccttcctggcccgggccaggggcactggccatgtttctgcacggtcctgccaccccaagtgccctcacccatcctctggaaatagttccgtttctgctggaagctcttgggctgatagggcctgtcttcagcctcctcggaggtctcctggcagaagcagaaatgagtggcagctcagccagcctgggtgccacactcgccacacccctcgggtccccagtcctgggccagcagcctcttccctgtgtctgcctactcaccctgcccatgtcccctgcccctgcagtccccaccctcacatcccttcctgagaatatggtcacctcctcaccctcaggcagccaccctctgatcccaggtcacgctgtggcttctccgggggtgtggggggcttcctgggcttggaggtgacggctgagggtgaggcctgggacgcagcctcggaggcccgagcctgctgctgccgctgctgcatctgctgctccagggacagggacatggcctgggctgtcatctgctgggcctgaagcaggaggagcagccagttcagaccctcatccccgagccacagacctctcctccaccaggtggccccagggccctgccagcgctcaccaggattagcgcctgctgctggataaagttctgctgctggacggccagctgccctgcatccaggctgggaagcggtggctgcggcggcaccaccatggctgtgagggcggcaggcggccagagtggtgggcaccatggccagccttgaagctcgctgcccactgtgcactcgggactcctagcaggaccctccctcctccagtcccagagctggtggctgctctcctgagaagggactctggtgcccccagcccagacttacctggcatggcagggactgtgcccattgctggcatcatgggcatgggtgcagggaccatgcctggctggtatgcaggcatctgaatcattcctgggtacactgagggaacacgccctccctgtcagtccctgcctgggcccacatgccacctccctccagccccaggcacagagaagagcatcgggcaccggggtgctggccagggcatcgatcgccactgccagaggggtcccaggccatgcctgccatgctgccgggcccggaggccctgggtgaggaatcagcccctcactcacccatggggtagccctgctgtgtgggcccaatggcgccccctcccttcatgcggctgctcagagcccagctttgttccagatcctaaagggacaatggtcacaggtcagagtgagagccctgagaaaaatggaaggggcagcagaggccccggggggttggggcaggggcatttgggggctgtgcccgactcacgctgaggccggaggatatcactggctggaagatctggtccaggaagccgtccaggctccctgacctctggacctcccctgtggggcagggagagggttggagccatggcccggggcgtggggcttcccatgctctgccaacctccatgtgcccactccagccttacctgtgtggtccctgctgggcagcgttggggctggacctggagggggtcctgggggcagtgagggggcctgaatgccaggggcaaggggaatggcctcggctctgcaggaaacgggatccagctaagggggtggccaaggctgagggtcacccaggctggggcaagaggtagaagctgctgcggggtcaccccatggttgggaggaggctgggtgggagggctgggcctgtggcagctcctataaacccctgagtgtggcagggtggctgtggggttccccggcaggagcaggccagggagaggggtgctgggtggcacctacgagccaagaggagtgatggggtagctgcgggggcgagctgggtcccccaggtcctcagtctggctgatcaggtccagcacaaagtcgcagccagccaagtcctgccatgcgtccctggagtgcagtgacacagaccagccccggggaggcgcctccaggcctctgggtgggaggggaccagtcagtgaggcaggcggccatccagaagggggcaaggaccacagggtgggccaagggggcagggggctgaggaagggagggtggccctggatccgcctggtccgggacccaggtttgctcagcagtgggggctgctcccctcctcacctcacggccctccacttccacaagggctccagcatgggcatttcttttctgacctgctgagttagaatctgccgtgggagctcccaagcccctcattcctaatctgcccccggctccccatcgccatctgcagtctggcccctgcccaccccggggcacctctcctcccggcccctgagactgggcttggagaaggaggagggtataggacaagggtcactttggccacactgtcccccatccccggtccccatacctgctctgcaggatccacccagccagctgctccccggtggtccaagactccacctcggccgagtagcactcctctgcaggggcatggggggcgggggcaagagtgagggacagcagagtccaccctgacaggaaggggctgctgtccccatgagagtttcaaaagcaggacagaggggagggggatcagggtcactgaggacagggcagcaggaagactggggcaggaaggggttccagggagggcaaaggggtagggctggccccacttcaggcctgggaggcctcaccagaggcagccctcaccgctgaaggtgaacacatccagcgccatgccccgcgcatccggccagccactccagctgggtcggggggtgggcccgagtgcccccgaggccagctgcgactgctccaaggcccccagcagcttgtgctggcacagcgctgccatgcccctgggggcctggtcagacacgaacctgcagggcgggcacaggctgcagtggaggcagggtgatccagcgaccccacctgccaggtccccacctcccaggccccttacttgagcagtggcttctgtaggacaggcagtgggggaaaggcgctgagcaaaacagccatgagggcccagccacgctggctctgctgttcatctgggttctgccatagctgggccaccagctggctaaagagctcattccgcagccctggccggcactgcccctgccgcaccaggtatgcgcccatgatctgcctctgccaggactccagggatccgtcccccaggagccgcagcatctgccgacacagccgggtaaggacaggacgtgcggggctcccaggcgcctatcctgtcccttctccaatgtgtcactcaccactttgttgatgtccagggcacgctgagggttgtctccatccagctgggttaggggcttcgcagtggctgccctggcctgggcagggacggttcctgcaaggaaggagagggctcagtccatgctcaccagctatcagacagcccaggggagccccaccggagcaggcacctcgggagaggcagaggggctggacagaaatgcatcttaatgccttttttttttttttgaggcagagtcttgtctgtcgcccaggctggagtgcagtggcacaatctcagctcactgcagcctccacctcccaggttcaagtgattctcctgtctcagcctcctgagtagctgggactacaggcgcatgtctggctaatttttgtatttttagtagagacggggtttcaccatgttggccaggccggtctcaaactcctgacctcaggtgatccacccacctcggcctcccaaaagtgctgggattacaagcatgagccaccatgtccaacctgtatgtgcagttttgaacctgcatttgtatttactgctgaagtctggacaatttcccttgtcaataaacattctttaaggtcatgacttcaaaagcagggcactaccgcaggtacaacaaaggtgtggcatcgtggatctaaataacgtctcccattcaataacaccaactgttatctccagtaacgctctatggtgagacaattacattcaacggttattttcagagcaattcagcgctactcacagccccaaaggctggggaggaaggagggcaagagctgacagcggggaaaaaaacgcagcatctgtcaggcaggtgctaactcagagcggtgaggccagcgggaagagcttaggcctgggcgcccacctgaaagccgatggcgacgaagctggagaaagggaacaggtcaatgtctgctgggagagtcaggctgggccgggcaggaacctcaggcggcaggcactcggtgatgctcccagccagggcgtcccgatggcctgggaacaagcaccgggaggcagcccaggagcatccaggtgtggtacctggccctgggaccacctccatccctcaccacgagccatcagcccctgtccacagggacccaagtgatgagctcaggggagtctggagcatcagagggaggaaccacaagggacagacacaccccacagtaaagggactggagaaggagtcctaacaagaggacaccaacaagactcactttccgccgtcttcagcatgacggccagctcagccgggatctccaagcgccccagctcctggcagaggggactcatttacccaggatccacaggaggggcctagggaccagtgtccctccccacaccctcaaccccaagattataaacatcccttccaaagaccacggatttttttttttttttttttttgaggcagggtctcactctgtcacccaggctagagtgcagtggtaccatcatggctcactgcagccttgacttctgaggctctagctcaagcgatcctcccacctcaaacctcctgagtagctgagactataggcatgtgctactgtgtccagctaatttttattgtttttgtagagatggggtcttgtcatgttgcccaggctggtctcaaattcctgggctcaagcaatcctcacacctcgacctcaaagtgctgggattacaggtgtgtgccaccacacccagccaaagaccaaggattctgaccctggacactcgaacaaacagagccccaaagaccctctgagggaaaccaagagccaagagcaccccggtcctcttctcaggaggtgcaatgcatggccctgagggacaagacccacggtagcaccctggcagccctctaagctgtcccagtctcagcaggttcatagccccatgtaaaaccccccactttccaggccacctaccatgcttggcactctctccaaggccctttcgctgctatgccagccctgccaacgcccaagctgttggaagagatgtgggaagagctgatgcctcccatgtgagtcacctgggggcacctccccagctctgaagttcagctgtcccctcctgcccctgggaggttctcagcaaaggagtgagaacagatcaggaggggccagccacccctggccctccagggccctcaccagccttagcactgtgggcgtctgtgcccatctgccagggcaccgggaagagggcaggaagaagggaagaaatggtcccaggggacaaagtccagccagggaggggccagagagggggtagcacgtgggcattgacctttgagtcgctttatagaccttagatttgagtcatcatgcaaaagaggggagcggacggggcccaggggaggcctggaggggatgggaaccccaggcaagagggaagagccaggccctggggagagtaggcagggatggaggaagacagcacctcccaagggccccggcctaccccggccggagggaaaagggatgagttcaaggagcactgtgtctgaagccacagcccgtgcgaggccgggctgagagggtcaacgctgctgggatttggccagctcggccagctcaggcagcctggcttctaccctgaaccgccccacccaagcccctgcacctgcagtctctgccgcctctggagcaggggctgggccaccagcaggatggtgttcagctgtcccaaagctgcccgccgccggaggtaccgcttcctggaggccgggaaagagcgggggcgaaatgaagagtccaaacttatgcttcctgcctggcactggaatcccttaagcctgacattcatgtaaaaactgactttggaccagagaagccctggatgcttcacagaaacgacaggaaaagaataggatacttcaaaagaaaagcaagggtcgggtgcggtggctgatgcctgtaatcccagcactttgggaggccaaggcgggtggatcacttgaggtcaggagttcaagaccagcctggccaacatggtgaaaccccgtctactaaaaatacaaaaattacagcacacctgtaatcccagctcctcaggaggctgaggcaccagaatcacttgaacctgggaggtggagattcaagtgagccgagatcgcgccattgcactccagcctgggtgacagaccaagactccatcaggaagggagggagggagggagggagggaggaaggaaggaagggaaggaaggaaagaaagagagagaggaggagggaggagggagagagggaggaagggaggaaggagaacgagtaaattgagagactgtttagcctgagggattaagatctgactctctgaccctgggcctagaatacctgggttcagatcagttccccatatgcacactgaccaaaaaaaaaaaaaaaaaaaaaaaaatcatttcccttagcttggtacggtagctcatgcctgtaatcccagcactctaagaggctgaggaaggagaattgcttgagaccaggagttcaagaccagcctgggcaacatagcaagacctcatctctacaaaaaagattttttaaattagccaggcatgacggcgtgtccttgtagtcctagctacttgggaggctgaggtaggagctatgactgggtcactgctctttagcctgggtgacaaagtcagaccctatcttgcaaaaaaaaaaaaaagagcagcagaacttattaaaaagtaacaccactggtcgggtgcaatggctcatacccgtatgacacctgtaatccctgtaccttgggaggctcaagtgggaggatcactagagaccaggagcttgagaccagcctggccaacacggtgaatccccgtctctactaaaaatacaaaaaaggccaggcgtggtggctcacgcctataatcccagcactttgggagaccgaggcgggcagatcacgaggtcaggagttcaagaccagcctggccaacatagtgaaactctgtctctactaaaaatacaaaaattagctgagcatggtggcaggtgcctgtagtcccagctacttcataggctgaggcaggagaatcgcttgaacccaggaggcggaggttgtattgagctgagaccaagccattgcactccagcctgggcaacagagcgagactccatctcaaaagaaaaacaacaacaacaacaaaattagccgggcttggtggcctatgcccgtaatcccagcactccagaggctgaggcacgaaatcacttgaaaccagtagctggaggttgcagtgagctgagatcatgctgctgctggagtgcaatggcgcgatctcggctcacttgaatctccgcctcccaggttcaagtgattctcgtgcctcagcctcctgaggagctgggattacaggtgtgacccagctgcactccaacttggatgatatagcaagactctgtctcaaaaaaatttttttaataaaaaataataattataaaaaataaaggccgggtgcagtggctcatgcctgtaatcccagtactttgggaggctgatcacctgaggtggatcacctgaggtcaggagttcgagaccagcctggccaacatagtaaaaccccatctccactaaaaacacaaaaattaactgggcatggtggcaggtgcctgtaatcccagctactcgggaggctgaggcaggagaatggcttgaatccagggggcagaggttgcagtgagctgagatggcgccactgcactccagcctgggtgacagagcgagattctgtctcaaaaattaattaattaattaaaaactaaaaacgggcagaggagaaacagacatttctccaaaggagtggcactaatgtctgagatgctcaacgtcattagtcctagagaaatgcacatcaaagccataatgagatgccacttcacacccactagcagggctatgattttaaaaatggaaaagaataagtactggcaaggatgtagagaaactggaacccttgtacattgctggtagaaacataaaatgatgcagccactatggaaagcaatttggcagctcctcagaaagttaaacatagaattaccatatgatagaattaccagcactttcactccttggcctataccccaaagatttgtaaacagactagaacaggccgggtgcagtggctcacgcctgtaatcccagcactttgagaggctgaggcgggtggatcgactcagaagacaggagttcaagaccagcctggccaacatggtgaaaccccgtctctactgaaaatatgaaaaattagccgggcgtggtggcgggtggtgggtgcctgtaatcccagttactcaggagactgaggcaggagaattgcttgaacctggcaggcagaggttgcagtgagccgagatcgagccactgcattccagcctgggcaacagagcaagactccatctcaaataataataataataataataataataataataattaattattaaccctcaagcctggaactgaatgaatttctgacacatgctacaacatggatgaactttgaaacattatgttaagtgaaagaagccagtcgtaaaaggaaatattgtatgagtcaacttacaggaagtatctagaatgggcaacttcatagagactcaagtagactgaaagttaccaggggctgggggtcttgggggcaatagttactgcttaatgggtccagagtttctgtttgcgggatgaaaacgtgttggaaatagatagtggagatgcctggctcccccgatgttctgcactgtcttcacttcattctcagccctcgagttactctctgggaagatcactggctgctctaccatctgaatctgacttcccaaccagcctgggaggccccgtctctggcatccccagctctgtcaccagcatctggcccaagggtagatgaggcagacggtcagccaacagctgttggaggaatgtgtgaagacaggctgtgagggcgaaaaagagatgattaggtgagaagtgggagggtggtgttataggaaagagaagtctaaagtcactgcagggtaaaagtctggcctaaattgggctggggaggtagtcaggtccttaacaacatgattcatgctttgaaaagatgactgtagctgggcacggtggctcacacctgtaatcccagcattttgggaggctgaggcgggcggatcacctgaggtcgggagttcgagaccagcctgaccaacatggagaaaccccgtctctactaaaaatacaaaattagccaggcgtggtggcatatgcctgtaatcccagctactcaggaggctgaggcaggagaatcacttgaacctgttaggtggaggttgcagtgacccgagatcgcaccattacactccagcctgggcaacaagagtgaaactccatctcaaaaaaaaattagctgagtgtggtggcacaagcctgtaatcccagctactcgggaggctgaggcaggcgaatcacttgaacccagggggcagaggttgcagtgagctgagatcgcgccactgcactccagcctgggtaacaagagcaaaactccaactcaaaaaaaaaaacaaagattgttcccacagtgtggaaaacagaccagaaaagagaatgataaaggagtcaggaccacaggttcaggtggcctcagtaggtaatgagtttcttgtggccggggtattcaagcagaggctgcacgggtatggggggtaatgccgtcaaggagagtcacatgccgatgagatggcactggggcaggatgacttgccttgaggccctatgtttccccaaccctgccccaccacctggaggacgaacccacggcctcaccccacccacttcagccctggctccaacgcctgcagacctggcctggaacccacgcatgcgagcctgcatccggggcaggacgcgctggcgggagatgcaggtgtggaagctgcggtgcaggtcgaccagggcctgggagcgctgctggtcccggagctcctccagccgctgccagccctgctcctgcagcaggacct

SEQ ID NO: 1348 - DNA, 1918 bp, Homo sapiens
ttttttttttttttttaagacggagtctcgctcttttgcccaggcgggagtacagtggcgcgatctcggctcactgcaagctccgcctcccgggttcaggccattcccctgcctcagcctccctagtagctgggactacaggtgcccgccaccgcacccggctaattttttgtatttttagtagagacagggtttcaccgtgttagccaggatggtctcgatctcctgacctcgtgatctgcccgcctcggcctcccaaagtgctgggattacaggcgtgagccactgcgcccggcctttttggtttttttttttgagacagagtttcattctcattgtccaggctggagtgcaatggtgcaatctcagctcaccacaatctccacctcccaggttcaagtgatcctcttgcctcagcctcccgagtagctgggattactggcatgcaacaccacgcccagctgattttgtatttttagtagagacggggtttctctatattggtcagctggtctcaatctcctgacctcaggtgatctgcctgccttggcctcccaaagtgctgggattacaggcgtgagccactgcacccaagccctttcacacttgctgtacgacaccctgagcccctcagtatttatttcatttctagatcattaaaaaatttggaaagtgcctgctctatgccaggcgctcagctgggggctgagacactgcagtgaacttgggcagggagggtctctgcgctggagctcagggggagaacaggtgaacatggtgtgcgcaggaggcatgagggctggttctgggccacgggagcaacaggaatgtggttcccaaggccttcgtctcctcgccacccaacacagtaggtctcaagacaagtttgtgggagggagggagggaggggtgtggaagggaggggcatggaagggagggaggggcgtgggagggagggacgtggaagggagggaggggcgtggcaggaaggggtgggtgggggagtgttgaaggacatttcacaggtccagatggtggtaccagtttggcttaatggacactcagtagttagtctgtaccaagcaagcaccgtgcaggttctggggatgtgggtgacagtctgtggtcacgggatgccacagtgcatcagggaatggcacagatcagcagacctggtctgtgctgggtggagagttgtacctggaggttcctctcacccagcttccgggctcaggggttcttgttggaggtgacaattgctgtagctggtaggtttccagatggcagagacagaacgtgccccgccctggagcttctcaggatctgactcaaggctgggaacacccatccctactgcctgccttttgctcagtcccccaaccaggccatccccattgccaaggccatcacaggctaaggaggtccacagagccctggggtgaggctgctgctcctagtagctgccccctcccttctgaggcagccaccagcccagctcagctggacatcaacgagaagtgactccacctgctccctctgtccctgtgcttggggtaaactccagcccttcagaggattcccaagatgccatccagtcaatagccaaaggccagataggcaaacaacaaaacggacaatgccaccagcttttcttggaggtttctgaactctgggaacagagctgcctctggggttcctggcagctccatgtgccaccccgcccctccccgcccctcctgcccttctgagaggctcttttctcactccgtcccccctgccatctcactgcttcagcctgcactccctggacagctgctgtgggcactagaccgtgagccccgcctagggcaggtactgctcccacctcatctctggtgcccaggcatcagcacaggagaggtttgcagagaggagaaga

SEQ ID NO: 1349 - DNA, 24533 bp, Homo sapiens
ccggctgcggcgcgtggagctgctcccagccgcgctcgagtcagactcgggtgggggtcccggcggcggtagcggcggcggcggtgcgagcatgtcgtggctcttcggcgttaacaagggccccaagggtgaaggcgcggggccgccgccgcctttgccgcccgcgcagcccgggccgagggcggggggaccgcggcttgggagaccgccggcgcccaaggacaaatggagcaacttcgacccccacacaaaaaataggaccaaggcggcgcgcgagctggagcactcgcgtgagtgcggcggggcggggcgggcgggcgggcgggacgggccggggaagcgggagccctggccttgccgctcctcgctgctgtcggcagccacttcccgggcgagactgcgcccccggagcaccccccgccggagccgtctcgcgtgccgggaggatcggactctttccgtcacccgtttgcacctctgcagctgtcaggagcgggtcaggtgcgaaaagcggtgcggaggtggcgctcataggttacaggggtcagggtctggggctggccgtggtcttcagttaccgccgagcgtgcgggatccttctgcgcttgccgcctccacgtggcacaggccaaggcgtggccagatgggtagatgggtttgttgggtggttgctagcagtttccacgtaacaagggaagcgtatttgagagttacttgattctaacgagactagcagatttgcacttcttgttggaagacgttagcatttgcacggcgaggtctgtgaagcacaggccaggccgtgctgctcagcttgagtaaacccctgacccaaggccctcagggtgtgagcactgactgcaccttccctaagctcgggtctcttcccccagccttcctttcccctgtggctttaacgatttgtagcacgatgcagttcaaatggctaggagtctggaacgtagaaggtgctgaattcattgaaagaatacagtggttctcaactcttgtttaagccggggttctttctatttatttatatattgagacacagtatcgccctgtcgccgaggctggagtgcagtggtgcgatttcggctccctgcaacctccgcctccgattctcctgccgcagcctctcgagtagctgggattacagccgcgcagcaccacgcccggctaattttttttgtatctttagtagagacgggtttcaccatgttggccagggtgctctccaactcctgacctcgtgatccgcccgccttgtcctcctgaagtgctgggattacaggcctgagccacagcgcccagacagaagggattccttttttttttttttttttttttttttgagatgagtctcgctctgtcgcccaggctggagtgcagtgacgtgatctccactcactgcaagctccgcctcccgtgttcacaccattctcctgcctcagcctcccgaatagctgggagtacaggcgcccgccaccacgcccggctaattttgtagagatggggtttcaccgtgttagccaggatggtctcgatctcctgacctcgtgattaattttttgtatttttagtagagacggggtttcactgtattagccagggtggtctcgatctcctgacctcgtggtccacccgcctcggcctcccaaagtgctgggattacaggcgtgagccaccgcatgccacctttttttttttaagatgatgtcttgctctttggccaggctggagtgcaatggcgccatcttgtctcactgcaaaccgcaacgccctggttcaaagaattctgctgcctcagcctcccaagtagctgggattacaggcacgcgccaccacgcccagctaatttttgtatttttagtagagacgtggtttcaccaccttggccagggtggtcttgaccacctgaccccgtgatccacccgcctcgacctcccaaagtgatgagattacagtcctgagccaccgcaccttgccagcaggggttcctttttagaaagaagatcatttagggaatccctggtgtgaagcagatataaacagagtttccctgtttaaggagggatggcctggtggtacttgtggttccatcctgtgcccttccccggggtgctggggaacatcctgagctgaggtttctggccccggctgggtctcataaccccagagggacattcaggtttgggcccaggcccaggctaacatggatagtcctagctgggcaccaccgacagtgcgtgttctgttttgaagagatggggtcttgctttgtcgcccagtctggccttgacctcctgggtaaaagccgtccaaccgtctcagcctcctgaggagaggggactgcaggcttgctcggtaatttttcttttttcttttctttttttcttttttttttgacggagtctcgctgtcgcccaggctggagtgcagtggcgtgatcacggctcactgcaagctccacctcctgggtacacgccattctcctgcctcagcctcccgagtagctgggactacaagtgcccgccgccacgcccagctaattttttgtattttttttagagaccggttttcaccatgttagccagaatggtctcgatctcctgaccccgtgatccacccgcctcggccacccaaagtgctgggattacagacgtgagccaccgcgcccggctttgctccgtaatttttctgtgtgtttttgagactgagtctggctctgccgcccaggctggaatgcagtggcatcatctctgctcactgcaacctttgcctttggggttcaagcgattctcctgcctcagcctcccgagtagctgggatcacaggcgcccgccagcacacctggctaatttttgtgtttttttactagagacggggtttcaccatgttgtttaggctggtcttgaattctggcctcaggtgattcgcccacctcggcctcccaaagcgctgggatgacaggcgtgagccgctgctcatggccttcctcggtaattttaacgatcaggttaggatgggaatcaagggctggacttcagggcacctcggaggacagcggatgttggtgactgactttcttgctgcaggcttatttggagggttcctttgtgtcctagttcctgggggttttcacccgctaacttcacttagagattgaaacttctcccacttccagaagctgaatcgtagtgatcagcctgcggccccctgcagtggtacaggcctggttgagcagcctcaggccgcctccccatagtgcagacctgtgcctctgagttgctccagtcctggcggccccggagctcctgacccgcagtccgctctgccggcgttgccagtgccttggtctgccctctctgtggtggagcggggcccggggcagggtctccaggtgcaccgtggggagccctccatcaggcttttgtttcctgtggattgtgttccaggtgtgggctctttcattttgatcccttctctccttcctggcctcactgctggcgggtgagagaggtttctccggagttgactgccccctttccccgggtgccccctgccctgcccctctgcctggtagcccctctgcaagcccggcccctcccgacgctcctggcttcctccgtgcccctttcctggcagcggggtcgccgagattcgcccgttgctttgtccttgctgctctccaggcaaacgggcggctcctcctcaccgactgcctcctctgtcccttgaggctatagccccatgccgcctcgttcccagagtctgccctgacccctcctccggcctgtccttggaagtcacagcagtacattatcccagaactgtctgtgagcaccagcgctcgccctgcactccacagagggggtgcctggaggagagcctcgtgccctgtgggtgtgaattcacgcgctgggacgcacgtccctggcacagggtcacaccaaagtggtgaatgattgttctcattctaataaccgagaggccacacgggcacctgacctgctctttcccctctcctcctccccagagtcactgggggtgggaactgtcaatgagccattttcaggggagggagtggcctcagcttaatccagccaaaggtcccctcgggaggaaacaggcagagctcctcaccgtgacacccacgttcctgtcactgctctgtggcaggaccctgggggactgacacaccctcagtcccctcggggtcagagtgagagtggttgagagcccggggtcgcttcagcccttggcttcccgagcttagcagccaaacccgttgacctggcactgtcttccctgagaggcaggtcccggtctcatctgtgctctgttcactggggcccccgaggttagctaccaaggcgcttcctgaaatgtgacgctgatgcccgtcagcccagttcgtgcctaaccacaggcccaagcagacccaccccaacaccaaagcgtcgctgcctctgtctaaatgcaacgagtgctccccacggcacttccccctgcgtcagtcacctccaaaaattacacctgagctgagaacagacgctgggctctagttagtgacgtgtttgctgcagttgactctgaaggcttaaaaaagtgagacgggctgcgggaggaagagagacgggaacaacgcaccaacccaggagcatcgggggtccctgcctactttacacgtctttctgtgttagaataatttttttttttttgagacggactcttgctgtctcccccgctggagtgcattgcttcgatctctgctcactgcaagctctgcctcccaggttcacgccattctcctgcctcagcctcctgagtagctaggactacaagtgcccgccgccacgcccggctaattttttgtatttttagtagagacggggtttcactgtgttaaccaggatggtcttgatctcctgacctcatgatccacccgcctcagcctcccaaagtgctgggattacaggcgtgagccaccacgccctgctagaataatttttttttagagacggagttgcgctctgttgccccggctggagtgcggtggtgcgatctcggctcgctgcaagctctgcctcccaggttccagcaattctccagccttggcctccccagtagctgagatcacaggcgtgcaccaccacacccagcttttttttgtgtttttagtggagacaggatttcgccatgttggccaggttggagattttatttttcttaagtctcactctgtccagctggagtgcagcagtgtgatctgggtgactgtagcctctgcctccggggttcaagccatcctcccacctgagcctcagagttgctgggattacaggcgtgaaccaccgcttcccactaggtttttgtatttttagtagaggttgggtttcaccatgttggccaggctttggtatccgtgtatcctacacctgctctccgtgccacatgcgcccgcaggttacgccaaggaggccctgaatctggcgcagatgcaggagcagacgctgcagttggagcaacagtccaagctcaaagtgagtggggccggtgtgggcgaggaggccggggcgcacatggggttcaggcgtggagattggtggggctgctactggtgggtagggccaggggcgtgtacatgggcagcagtggggccagggccgagcttgggcgcctcatttcacagagggaaacaaggggaggtgagagacgctgccacagagccgcccgagagggagggtcagtgttggtgagggcgtctggtcgtcctgagggagggccggtgttggtgagggcatctggtcgtcctgagggagggggtcttcttcacattctcacctcatttcttttcactcagcaggattttttattttattttattttattttattttattttattttattttattttatttattttgaaacggagtctcactcttgcctaggctggagtgcaatggcgcaatctcggctcactgcaacctccgcctcccgggttcaagcgattcatctgcctcagcctctggagtagctgggattacaggcacgcgccaccacgcctggctaatgttgtattttagtagagacggggtttctccatgttggtcaggctggtctctaactcccgacctcaggtgatccacccgcctcggcctctcaaactgttgggattacaggcatgtgccaccacgcctggctaatgttgtattttagtagagacggggtttctccatgttggtcaggctggtctctaactcccgacctcaggtgatccacccgcctcggcctctcaaactgctgggattacaggcacgcgccaccacgcctggcctattttattttattttgagacagagtgtcactctgtcccccagtctggcgtgcaatggtttgatctcggctcactgcaacctccacctcccgggttcaacctcctgcctcagccttccgagcagctgggactacaggagcctgccaccacatctggcgaatttttgtatttttagtagagaagggggttcagcatgttgtccaggttggtcttgaactcctgacctcaggtgatccagccactttggcctcacaaagtgctgggattataggcaagagcgatggcgcccggcccactcagcaggattcctagaatgggcacgagctctgccctcatcacagtccaaaagtgagcacctgcctggagctgcccagaaacagccttgtggggtggggttggtgtctgaccttcctccccgggggccttcgcaggcttctctgctggtgcttctgtgcctgtgggtctggattcctccagggcctgatcctgggtgcagatgcagctggaagccctgaacctgctgcacacactagtctgggcacggagtctctgccgtgccggagctgtgcagacacaggagcggctgtcaggcagtgccagccctgagcaagtgccagctggtgagtgctgtgctctgcaggagtatgaggccgccgtggagcagctcaagagcgagcagatccgggcgcaggctgaggagaggaggaagaccctgagcgaggagacccggcagcaccaggccgtaagagcgcaagaggccgcgagggaggcgcccggctgcggggagcggcctggggcaggactgggagctgggtgtggtcccggggcactctggagtcagccattagagctgccctcggaacggccttgcacaaacgcctaagacctgtaaggtccctcactgctgagccggacgggaggtccccgcgcctccccacgtttgtgtgaggctgatggcgcgtcggagtccccggcgctccgcccagtcggcccagactgcagctcccggctgagatgtgtctttgccgccctcttctccccagagggcccagtatcaagacaagctggcccggcagcgctacgaggaccaactgaagcagcaggtgagctcagcctcccctgcgaggcgcctgcgtccctgagaacgtaggtggctttgtgggaccagtcagtgggtcagaggccacggggcaagaacgctggggttgctgacggtgggtgctagagcaggggaaactactcggacagacacgcaccagcacacgtgtacaggcacacatgcagatgtgtgcacacatgtacacggagacacaggcacctgcccacacggacacacactcctcgcacacacactcccggcagacaggcacacacacccctgcacacatgggcacacacacacccctgcacacacgggcccacacactcccctgcacacatggggaaacatgggcccacacacacacacccctgtgcgcacacacccctacacaggggcatggacagacacccgcaaacacacccccacacaacacgggcacgcacacacacaccccgccacaacacaggcacacatacccctgcacacaggcctgcacatacacccccacacaggggcatgctcacgcagcccgcacacacacaggtatgcagacacacccaaacacacatgggtccgcaggcacacactcccgcatggggcatgcacgcaccccccacacacacccgatcacacataggcatgcacacccctctgcacacatgggggcttacacacccccccgcacacgtgggcccgctcacacagcccacacacataccccttcacacaggcacacaccgccccgcacacacgggcctgcacacacacccccacacgggcatgcacacgcccacacacacgggcgcgcacacacccggacatgcacaaacacccacctgcacacacgggcacaccccaccacacacacacacaggcatggacacacgcacaccccctcacacataggcacacatacacaacccaggcacacacccccttgcacagacgggcacgcacacagtcccacacatgggcacacgcgcacacccccgcaaacacacacacgggcacgtgtacgcacccccactcacagtgtgcctcatacatacgggcacgcacctgcacacgagggcacacccccaccccccacccccacacacccccgcacccatgggcacacacacattactgcacgtgagggcatgcacacacacgccctgcacacccccacacacagaccccttgtgtgggttccacagcagcggctctccaggcacgacaagcctccttgtctcccacccgggcgcccagctggcagtctgggaggttctgcttgggagggctggtcagtggcggcgggcgggtctctgggtctatgagaaaagcttgggtgacatctgttccctggtccttagggaccgtcaccttcagtcctgagctcgcaggcggggttcacatgttgcctgttgtgggcattgtagctttaacgtttaattggcggaagacagaagcttccttaagcccagcctgaatcagggcagtggtgttgggaggtcggcccgcggtggcccttgtcagggaagccacagtgggggctgtttctgccactggggagtttgggaccctgaacccatcccctcagtgactgccgtcccagccgatgtcacccgtgtctgtgtcagggtgcggcgtctgcaggtccccaggtgcccaggacgcttggagttctgtggtcctggggcggacgcaacctctggattggtgttgagcatttttctggttttaaaggcttttctctttttctgcggcttcttctcagcaacttctcaatgaggagaatttacggaagcaggaggagtccgtgcagaagcaggaagccatgcggcgaggtaggctgtctgctctcctggctggggcggaggtggcgggggctgcttgtggacccggcgtgcactctgagcctgagttctgccgcccggcccctcatagctaccagtgcagtgggcgaggcctgctggggctccgcggggtggggctgcctctcggaagacacctctgtctgcgagtggacgccaggatctgttcagggagggcaggagctgcttcacttcatgggaagtacaggggcctttgttttttttttgagacggagtctcgctctgtcacccaggcaggagtgcaatagcacgatctcagctcactgcaacctctgcctcccaggtttaagcaattctcctgcctcagcctcccgagtagctgggattataggctcccgccaccacgcccagctaatttttttgtatcttcagtagagaaagggtttcactgtgttggccaggctggtcttgaacttcttgatctcattatccgcctgccttggccttccacagtgctgggattacaggcgtgagcctctgcgttctgcctagaacatgggtctttactgtcctggtttcagtggggatcacaggtatttggtgccatgtggcatttgttggcgagtgctccaggcaaacgtctgtcaccactcttcactgtgggtgggcttgtggcgaggtgtgtgcgtttaatgttcagtagccaggcacgtggcacgtcacgcgtgtctgagttctgacagctgtgtttctgtgtgaggggggcttccttcagaactccgcgttctggttttttgcttcaaagagctcgtcctgagaagttgcctaggcctctgggtcggatttctgccctaatccatgggcagggccggcctgtggcgctgtccctaccaaggtctgtgtgtgtctgtggcacgggcctgtccatggactgggcttgtccgtggagtgggtcggtccatggccttagcctgttggtggcgtgggccggtccacggcatgggcctgtctgtggcgtgggccggtccgtggtgtgggcctgtccgtggccttagcctgttggtggcgtgggccggtccgtggcatgggcctgtctgtggcgttggtctgtccgtggcgtgggccggtccgtggcgtgggccggtccacagtgtgggtggaggtggacgtgctgcactgcatggtgctgagctgccctacctctctggggcagccaccgtggagcgggagatggagctgcggcacaagaatgagatgctgcgagtggagaccgaggcccgggcgcgcgccaaggccgagcgggagaatgcagacatcatccgcgagcagatccgcctgaaggcgtccgagcaccgtcagaccgtcttggagtccatcaggtgagcactgccgaggcccgggccggccacagatggagccccgcaggtgtgagtcgctggtcccagggcgctctccagctcttccaggcctggccgccgtaggctgactccttggtgggggcactgcctcctgtcctggcaaggccgtgccgccatgtcagggcctcaccctcaacctgctctcgctgcgtggtacggatcttcgtgtccttcctggtcacaccactgctttccccgcaggacggctggcaccttgtttggggaaggattccgtgcctttgtgacagaccgggacaaagtgacagccacggtaaacatactcataaaacagggctggcaggtggctgagaggcagcatgtgggggcctcctggagccccaggtcctgtccctgccggctctgcacagccctgtagctctcccagcacagagcaaacccacgttgtacctgctgggctcggctgctcctccctccttgagctgggagaaaaaaatgcagttgccagcctgggccacacggtgagaccccatctctacgaagaataaaacattagctgggtgtgatggtggcgcctgtggtcctgctactcgagaggctgaggtaggaggatcacttaagcccaggaggtttgggctgcagtgagccaacattgcaccactgcactccattcttggcgagagaataagaccttgtctcaagaaaaaaatggccaggcggtagtggctcaggcctgtaatcccagcattttcggaggcggaggtgggcggatcacgaggtccggagatcgagatcatcctggtaagagtgaaaccctgtctctactaaaaaaaagaaaaaaaaagaaaaaaattagctgggtgtggtgacatgtgcctgtaatctcgggaggctgaggcaggagaatcacttgaacccgggtggtggaggttgcaatgagtcgagatcccgccactgcaccccaagaccagcatgaccaacatggtgaaaccccatctctgctaaaaatacaaaaattagcaggccaaggtggcgtgcgcctggaatcccagctgcttgggaggctgaggtaggaaaattggttgaacccaggaggcggaagttgcagtgagctgaaaccgcacaattgcactccaacctgtggaagaagagcgaaactctgtctcaaaaaaacaaacaaaataaataagccaggcctggtggctcactggtgtaatcccagcactttgggaggccaagacgggtggatcacttgaggtcagaagttcatgaccagcctggccaacatggtgaaaacccatctctactaaaaatacaaaaattggccgggcctcgtggcacaggtctgtattagctgagtgtggtgacctgagcctgtaatcccagtcactcgggaggctgaggcaggagaactgcttgaacctggaaggcggaggttgcagtgagccaagatggcaccattgcactccagcctggccacagaacaaaaccctttctctaaaaacaaagtcaagggcgcattaagcagctccttcatgttctcaggtgacaccgtctcaccaacatggcaacaccacctgcaacattcaccgtcacactgaccaggccaccggcaggtgctgcagtcacagcagtgggcgccggcaccacggcagagcaagtgcccactcagtgccgggcacctactgtgtgctgggcggggtggggggacggaggacacagccatgtgcgacctggggcgccaccacagcaggccagagcctgggcacaaaagagcgaggctttaaacgagagaagaatctgaacttcaaactctcagggttttattccgaataacgaaagtttttgcgaaatggagtcgggttcgctttctgggtctttgatttttttttttttgagacagagtctcactttcaagtgtgctgctcaagtgcagtggcgcgatctcgactcactgtcagcttcgcctcttgggttcacaccattctcctgtctcagcctccggagtagctgggactacaggtgtctgtcgccacgcccggctaatttttttgtatttttagtagagagagggtttcatcctgttagccaagatggtttcgatctcctgacctcgtgaatccgccgcgtgggcctcccaaagtgctgggattacgggcgtgagccaccgtgctcagccacagccagctaattttttcatgtttttagtagagacgaggtttttccaggttggttaggctggtcttgaactccaacctctggtgatacgccggccttggcctcccaaagtgctgggattacagacctggccagcctaaacgatttttaaaacaagttagagattttgggttagtcttgttttccaggaataaagtaccatttttagtggccaaggatgtaccagagggtgtggccctgtgacatccagctgggtctgcccagggccccgctcagcgaccgaggctttctaggatttatgctgccagttgcagagaaaatggccctgagtgagggcgttatgactgccccacctgcctcctgtaaccgcgtggctgtgggattcggggctgggaattcgggttcctgtggggccagcacacggccctgtgcttctccctcaggcggagagagggtgggggcagccccgtgcgtctcctgctctaggagggagggacggtgggggccggtgcgccagtgcggtgtctctgctgcaggtggctgggctgacgctgctggctgtcggggtctactcagccaagaatgcgacagccgtcactggccgcttcatcgaggctcggctggggaagccgtccctagtgagggagacgtcccgcatcacggtgctggaggcgctgcggcaccccatccaggtagcggcgcaggcctggccctccctgagtgcagttcctggctgagtcccttctgccccacgagcacagcccacgcacaccctcccgtcccttccctttccccggataacaggcacccgcacgctgcttcacgggtgggttttcctgtctggcgctgtaccttaggggtctgcatcagtgagacccttcccctgtctgcctcggtgtcccttgctcagggctcttgatggggcctgggagcacatcggggtccttgcaagacccgggacttgggtgtgcggccgtctgtcggggaagctgctacaggccatggcgtctggtggcctccctggggagccgcgccgcttgccagcccctgaggtgcctgctctccacaggtcactgggtaggtggttaagaaaataaaagccaataaggaaccggaaaatgccccaatcccagcaatagcctcctggtctcccggcggggcagggttccagctccgggccggtcctggctgtgctttggggcagctccgtttctgtgtgttaccgagcatgtgtgtgcgttggtggctgttccgtggctgtggcaggtgacccaatggtgcttccccttcccctccggcaggtcagccggcggctcctcagtcgaccccaggacgtgctggagggtgttgtgcttagtgtaagtcggtgtgcctgggaccggggaggtgcagggaggggaccccggagctgggctgggctgtggcccttgctagcgctcgtggtggcgcccaggagcttttgggtcctgagatgcaactgcttggactgtgccggggatagataggctgcccacgagctgggcggcttcctgaggagcagagtccgcacccgggcattcccgcagcccctgtcaccgaggcttccgtgggtgcagagtgtctcccccaaacccccgtcttccccggcagcccagcctggaagcacgggtgcgcgacatcgccatagcaacaaggaacaccaagaagaaccggggcctgtacaggcacatcctgctgtatgggccaccaggcaccgggaagacgctgtttgccaaggtgagagcgcctggctgaacaggtgggccaggggccgctggggtctcacctgcctgcaggtgtctgggggcctcagccgcctggggaatggaccccccttaggcctttgcctaccctcgtgtaggctcagggtgctggtgtgggcagcagcgcctcccatcttccaggcgggggacgtctcctgtctggcaggctgtggcttccagacagggacacccggcaggggctccacactccaggtggagtgtgcaggctttgcagaggcagagggaacatctgttctgtctcccctcactcttcttgtccagaaactcgccctgcactcaggcatggactacgccatcatgacaggcggggacgtggcccccatggggcaggaaggcgtgaccgccatgcacaagctctttgactgggccaataccagccggcgcgggtgagacgtccccacagcatgcaccaggcccttggctgcggcccagcaggctgccttctgggaagggggtccaggtgtctcttggggaccctgtctttctgcagctctgtccttgtggccacgcaggaggcccaatggagggtccctcggagggaaagtcccctgagtgtggaccctggtggacacgaggtccccagcgtgtggaggctgccagtgggatacttggctcagggcagaagggaggtgggtgggtgcagggggagaggggtcttcacagctgcaggggaggctcctccacagccgccctccccccaacacgcctgcaggtgggcgtgggcactggttgccttttctagaaccatttgaaagttagctgaagacagcatggcacactcccttcaataggtcccacagtgaccccgcgcagggcacagcccgggcacccttgtggcctcggctgtcctcgttggaaccacgatcctcatggttggcaccctcccctctggcctttgacctttcactttagaagacctgtccctgcgccaggcgtggtggctcacggctgtaatcccagactttcggaggcggaggcaggcagatacgaggccaggagattgagaccatcctggctaacttggtgaaaccccgtctctactaaaaatacaaaaaattagccaggcatggtggtgggcacctgtagtcccagctactcaggaggctgaggcaggagaatggcgtgaacccgggaggcagagcctgcagtgagccgagattgcgccactgcactccagcctgggagacagagcgagactctgtctcaaaaaaaaaaaaaaagaccctgctccttgcgtggactcttgagcactgcactgggtcgctgtgtgggtgaaacctgcagggcggaggctgttgccccatgtgtggttggctggtgtgtgggtgaaacctgcagggcagagtctgttgccccctgtgtagttggtttcccactgccttctgaggctgagacgtggtcagctgcccagaggccaggctgatcggcttctgtcgagtccaggacttagggctcctgatggggcagagcctgaccccgtggggatctgcctgcctggcctgctcctgccgcggccggacgctgctgtgggctgctcctggcgtcactctcgccttgcttggcctctctctcgttcacagcctcctgctcttcatggatgaagcggacgccttccttcggaagcgagccactgtgagtgtcactaagcctctgtctggccacaggagggtggtcgggtgggcgcggctgtcatcctgggccaggctgcagcccttaagctggcttgcagtggcgcaatcttggctcgctgcaacctctgcctcctgggttcaagctgctctcctgcctcagccccctgagtagctgggattacaggtgtttgccaccacacctagttaagttttttgtatttttagtagagatggggtttcaccatgttggtcaagttggtcaagaactcctgatctcaaatgatctgcccacctggcctcccaaaatgctgggattacatgcgtgatccaccacgcccagccatacagttattattttaatacagggtgtctgtcgcccaggctggagtgcaggggcgacatctccagctcaagcagtcctcctgcctcagcctcccgagaagctgggattgcagaggcacactaacacgcccggctaatttttttgtaacgttagtagagatggagtttcccacattgtccaggcagggctcaaacttctgaactaaagaaattcaccggccttggcctggcacagtggctcacgtgtgtaatcccagcactttgggaggccaaggcaggtggatgacgaggtcaggagttcaagaccagcttggtcaatatggtgaaaccccgtctatagtaaaaatacaaaaattagccgggcgtcgtggggcacgcatgtaatcccagctgctcgggatgctgatgcaggagaatcgcttgaacccaggaggcagaggttgcagtgagctgagatcgtgccactgcactccagactgagagacagaacaagacttcgtctcaaaaaaaaaaagcgagagatttgatcgccttgaccttctgaagtgctaggattaaagatgtgagccctcagtcaggctttttttttaaatgtattttttattttttagcaattctcatgcctcagcctcccaagtggcttgagattacaggtgtgccaccatgcatggctaatttttgtatttctagtacagatggggtctcaccatgttggccaggctggtctcaaactccctacctcaggtgatccgcctgcctcagcctcccaaaatgctgggttacatgcttgagccaccgcccctggccctggtcaggattttgagtttagatccatgaaagtgtcgccacgtccctgctccctgcaggagggaggcctgtgggactttctgctctggctgtttacaaggctttgcttctggtgcctaaggctggaaccttctctctgcaggaggagataagcaaggacctcagagccacactgaacgccttcctgtaccacatgggccaacacagcaacaagtgagggagcccctcgggtcctgagcccccgggcagggctgtgcagccgtcgcccttggttcccactgagggtccctggctcacagtgctgggcaccagctgtggcctcagtgtgcccacctcagatgtcccctgggaacggcccagctcgggacagcacggggtgtcattgaggaacatgcaggggcctcccgggcagagctggggtcagtcctgtcttcacggccctgtgcgccgccgccccagcttgcaggtccctctgcccctagatttctgcggtcctgtgcctgcaagggaggtggtctgattgctgccgcccagaggtccccagtagggtgaccggccctatgtccaggctccctcttccctcccaaatcccttaattttgagttttcttggtctcctgggcccctccagccccagtcacgtgtcacacggaggatcaagtcctgctggtcggccgtggctgactcttcaggcacgttgggctcctgggtcagctgctgccgttcgacgctccctggagccctgactcaggtccttcccagagaggcaaggctggggccctgctgagcctctgctgaacccgggcccccgaggtcctgcttctggctcgcatggccataatcttgacagggactctgggtccgcatccctgctcccagcacagcgggctcaggtagcaggagggagtggtgttcccggcactgcctatcaggctgggcgacggtcagcggggaagtaccacacggggcgagaacagaggcccgagaagccgggcggggggcagctgggcgtggtggggcaggcaggcgggtgaccagggctgtggcgcgttctccccatgtttcctgtgctcacaagctgccgctttagattctcccaaaaagtctccccgagggggctgaggagccgttttgccctcggcgatctcagctggcagccccagcgtttccttccccatccctgtcctacagattcatgctggtcctggccagcaatctgcctgagcagttcgactgtgccatcaacagccgcatcgacgtgatggtccacttcgacctgccgcagcaggaggagcgggacgcctggtgagactgcattttgacaactgtgttcttaagccggccacagaaggaaaacggtgagtgtcccgcctcacccggcccccaatccaggcaccatatggcatgggtgtaggccagctgcctgtcttccggcctccacctcatggtgtggggtccgcggccttggctgcctcacttgggaactccttccccaggcgcctgaagctggcccagtttgactacgggaggaagtgctcggaggtcgctcggctgacggagggcatgtcgggccgggagatcgctcagctggccgtgtcctggcaggtgagtcaggctccggcacgtccacccagacgggaccccagctgctgtggagatgctcagttgcgccaggcctgtcccagcaccggtgtcatgtgggagcttctgttgaggggttttcagtgcacagacgtgacacagggccccctgcctcagtcgggccactccacgcagcagcgtgcacctgctcgtgccctcaggagggtggggccatgttggttgctgacagtcacacggggctctctggaagccagtccagcatcccaggtgcccgggctctgctgggtgtggtgggaggtttctggctctcatcttggccaacaggcacctcctagagggaatggtcgtcaggacaggccccgtgtgagttgggtggtgggggtggagggacgttgtgtttcctggaccaggtcccttggcttggtcctgtttgacgggttcagacacacggtgggactggcctccgattgtcccacagttagttgttcctcggaggcacccctcctgctgctccttggatactccagggccgaggagccgagactcactggagtgtgggcatggccatccagagagctctgatcaggccgggcgcggtggctcacgcctgcaatcccagcactttgggaggctgaggcaggcatatcacggggtcagattgagaccatcctggccaatatgtcgaaaccccgtctctactaaaaatacaaaaattagctgagtttggtggtgcatgcctgttatcccagccacacgggaggctgaggcagaagaattgcttgacccggggagttggaggttgcaatgagccaagatcgcaccaccgcactccagcctggccaaagattgagactccatctcaaaataaaagaaagctttggtctttgggggttgctgaaaaagcaaaaccaggtctgtggggtagaaggcgccctggccacacacaggcattgccgcctctggggtccgcagagtctgtgtgacaacctggtcactcgatctagcagcgtatttgaatgaatgagtgacagcttaatgaagtagccaagtaccttgatttgaacgtaggagccggggtatgtagggagctgtattagtcagtacaggctgggttatgccgctgtgacaaagagtcccagatctcaaaccccgtccttgtgggtcagctgaggtctctgttccaggccgtccccacttggaaccaggtctgtttccacaactcagaaagtggaggctgggtatggtggtggctgacgcttgtattcccagcatttggggaggccaagtcagtcagattatttgaagccaggggttcaggaccagcctggaaagcaaggtgagaccccatctctacaaaaaatgaaaaaattggccggacctagtggcacatgcctgtaatgccagctgcttgggaggctgaggtgggagggtcacttgagtccaggaggcggaggctgcagtgagctgtgattgtgccactgcactccagcctgggttacagagcaagaccctgtcttaaaaactgagaataatttggaacaagcccggtggctcactcctgtaatcccagcatgttgggaggccaaggagagaagatcacttgaggtcaggagttcaagaccagcctggccaacatgatgaaccccacctctacaaaaaatacgaaaattagctgggtgtggtggtgggtgcctgtaatcccagctactcaggaggctgaggcaggagaattgcttgaacccacgaggcagaggatgcggtgagctgagatcatgccactgcactgtagcctgagggacagagtgagactgtctcaaaaataataataagaagaataataatttgggctgggcacagtggcacatgcctgtaatcccagcactttgggaggccgaggtgttggatcacttgaggtcaggagttcgaggccagcctggccagtgtgccgagacccccacctctactaaaaatacaaaaattaactggacggggccgggtgtggtgacttatgcctctaatcccagcactttgggaggccgaggtgggcggatcacggggtcaggagttcaagaccagcctggacaacatggtgaaaccccatctctactaaaaaataaaaaaattatccaggcgtggtggctggcgcctgtagtcccagctactcaggaggctgaggcaggagaatcgcttgaacccgggaggtggaggttgcagtgagctgagatggtgccactgcactccatcctgggtgtcagagcgatactccatctccaaaaaaaaaaaaaaagaaagaaattaacctggtgtggtagcaggcacctgtaatcccagctgctcgggaggctgagtcaggagaattgctggaactcaggaggcagaggttgcagtgagctaagatcacgccacagcactccagtctgggcgacagagcgaaactgtctcaaaatataaatgataacagtaataatttggcttggcacggtggctcttacatgtagcattttctacacataagattatgtcacctgagaacaggtgattttacctctcccttttcagtttggatgacttttctttttcttgtcccatatctctggccagagcttccagcgatatgtggaatagaagtggtcagaattcttgcttggttctttctcagaggaagctttcagtttttcaccactgagtatgttagctgtggacttgtgatcgctggccttctttgtgtttagggcatgttcttcaatcctggtttgttaattttttttgtttcttttcttttcttttggtggggggaccagtctcgcttttgccgcccaggctggagtgcagtagagacagggtttcaccatgttggccaggctggtctcgaactcctgacgtcaggtgacctgcccacctcagcctcccaaagtgctgggattacaggtgtgagccactgcaaccgaccagttgaattttttttttttaatcataaaagtgtgttgaattttgtcaaatgcttttcctgcatgagatgagagggtcatgtggtttccttcctccactctgctaatattgattgattttcatatattgaactatccttgcattccaggaatgaatcctgcttggttagggtgtagagtcctttaactatactgctaaattcgttttgctggcattttgttgaggactttcccagtgaggctcatcagggatattggcctgccatttctcttgtggtgtgtttgtctggctttaatatgagggtaatgctggcttcctaggatgagtgaggaaatgttcttcaatttgtccaagagtttgaggagtggtactgattcttcttaatgttttgtgaattcacatgtgaagaaatcaggtccaggtcttctctttgaccttttatagcttgaagatcttaggttcccagaaaaattgcaagggtagcacagagagctcccgggcccggggccttcccacatggtgaacatcatgtgtcactgttggacccacccgcgaccaggttttgccccagaatcccacccaggaggccacgtgacatttagctgtcacttctggtgggctcctgccaggtcccgtgcttcctggaggggtggccctgtgagcatctgcgtagcccctctcctctgctgggccctgggtgacgtgcagccactcgggtggaccctgagggtccctgcacctgtttgccctctcttgggtgggctcaagaccaaaaatgatgttgagcagtcctgggcccctgagccacagtggcggtgcggctccggtcagtgtctcctgcgctcccgggcccccgacccacagtggcggtccggctctggtcagtgtctcctgcgctcccgggcccccgacccacagtggcggtccggctccggtcggtgtctccccacacagtggctcttggcgaggggtgggcgctggcagaggggacgggcaccacgtggtcatccccatgacaggttctgtcatggtgacagtgttgtgggaggatggtgtgctgctgcccctgcaccccgtgagatgaatcctgcctctgggaggtacagctgggacggggcgagggacccactcagctgtccaggaagggtcccctgccctgtgcttcctccaggtgtcctggtgcactcctgagcacggcacctagtgggggtccccacaccctcaccctgacccatgggtgcctccccttggggactccacgcccttcgctggcactgagatggagagcgacctgtccgtggcagaagggctgctgcacctgaggtgcctaaggcgacaccaagggccacagccccagtagctccagcctccgtgtgctcaatgccaagccctgtgcccaggaggacagggaaatggaggcagaggtggccttgatgtcccaaggtgggcagtggctgcctctgccctggaggcctgtgagggtcagggtctgagggtctgaggtgcactatgacccgggggcactgcctggccacggctgagactcgcagagggtctgcagttcccacctgcctctcggaagctgccctgggtcagccgtcagtggtgctccgccttgggttttctattatcagaaagtcattgagcaacagcagtgctgaggacgcaggcagggctgtgggcactgcagggccgctgccagtgtccacatgcgtgctggctctgccaaggtgtgggaagcctgtgtttcaccctgaggttgtcctggtgcccctggtttggcccctccccacctcggggccctggcgtgcattaagggtggcgggttcccatagcggcctccctcagctccctctctcttcactaggccacggcatatgcctccaaggacggggtcctcactgaggccatgatggacgcctgtgtgcaagatgctgtccagcagtaccgacagaagatgcgctggctgaaggcggaggggcctgggcgcggggtcgagcaccccctatccggagtccaaggcgagaccctcacctcatggagcctggccacggacccctcctacccctgccttgccggcccctgcacatttaggatatgctcctggatggggactgggctgtgcagggacctctgtcccccaggatgtcttgtggtggcggtcggccgttctgccccccagggcaccccctgttgtaggcactggctagggaggggcaggcctccttcctgcccctcgagacactcttgggagatgcattttccgtctggctcacagggggagggtgaggctttgtaccccagcccctgcccaggccactgtgagggtgggtgctggctgagcccctgggcgagaaggagtggggcaggcggggtctttgttctcggctcccacagcagagccaggtgagggggggcctgccaggactagacagaagtggggcggcctgaaccctgcttccagccatggccaggggccacggaacccggcaggggtgtctgaggccgccctgtcagctggccggtccaagcctgtggctggagctggtgtgtgtttatctaataaagtcccacaggtgcctcacc

SEQ ID NO: 1350 - DNA, 318 bp, Homo sapiens
aactggtggaaaaagttgtttattgcaactgcgaggaagttagactttaaaatgcagaacaaagactgaacatactgacataccggttctttgaagggaaatttagaattcattgtatataacattattcaggcttaaaatagtttccaatccagtgggacgagtcactccatataattctgtgaagtcaaccattcctatcaaggagagagtcggggccgccgcgagcgcgtgaaccgtgggctccggggtggtgccgacgcggctgcgggccgggactgacgttgcgccgggttcgagtactcccctccggagttt

SEQ ID NO: 1351 - DNA, 11881 bp, Homo sapiens
gctgccactctcactgccagaccatgccatcaactgcgtgcgcatgggcctggacatgtgccgggccatcaggtcagctcaggcggtggtcaagaggaatgctgagggtggatgtggggggcagcaggcagctgacagaagtcctctttgtgagaatctggggtgtctcacaggcagggctgagggtaggactcagattgtcccacacacacactgctcaggaaactgcgggcagccactggcgtggacatcaacatgcgtgtgggcgtgcactcaggcagcgtactgtgtggagtcatcgggctgcagaagtggcagtacgacgtttggtcacatgatgtcacactggctaaccacatggaggcaggcggtgtaccagggtgagacctagggccctaggcagctacagcagaaggccaaccaggcctaccacaggctgccatcctttcattagttccttaagataagcacaagatgagtaccttaagataagtcccatatggggcttgggagatcctagggtgcagggaggggagctgggaggcacctcctgtaacacaggctctttcttgaagtcagacatccaggaacgatctttaaaagacatgagatgtttgtcagttctaggagccatgggggtgatggggcaggaaataggagatttgaaggccctccctgctgacccctactgcctccctccttccaggcgagtgcacatcacaggggctaccctggccctgctggcaggggcttatgctgtggaggacgcaggcatggagcatcgggacccctaccttcgggagctaggggagcctacctatctggtcatcgatccacgggtaaaagcccagcccagaccccatgggctggcctacacaaaccaccccacagccaacaggcctgatctcttctgtgccagagattgagttcctgggtcctagtggggggtggagggagaaggaggaagtgtctgtggtctttactgtcagcccttatgtgccccaggcagaggaggaggatgagaagggcactgcaggaggcttgctgtcctcgcttgagggcctcaagatgcgtccatcactgctgatgacccgttacctggagtcctggggcgcagccaagccttttgcccacctgagccacggagacagccctgtgtccacctccacccctctcccggtatgtgcaccttcatcctgagccccagagcttagttaaatccacccccagtatcctcaggccccactggcagccttccctgcccccaccaccagtgagccacttaatgatttgtgacatcccaaagtcccgaactgtcttgtcaccccagtcactggttcaggcccttccttgcccctccttctagagaaagagccctccagctcacctcagagaagatacaagatccctacagacaccattgtagggaccagccccacagggtcggtgggtctctccctgtgtgcgacgacgagagagtgtagaaataaagacacaagacaaagagataagagaaaaggcagctgggcccgggggaccactaccaccaatgcgcggagaccggtagtggccccgaatgtcgggctgcgctgttatttattggatacaaggcagaaggggcaaggtaaagaatgtgagtcacctccaatgataggtaaggtcatgtgggtcacatatccactggacagggggcccttccctgcctggcagccgaggcagagagggagaggagacaaagagaaagacagcttacaccattatttctgcatatcagggactattagtattttcactaatttactactgctatctggaaggcagagccaggtgtacaggatggaacatgaaggtggactaggagcgtgaccactgaagcacagcatcacagggagacggttaggcctccggataactgtgggtgagcctgactgatgtcagggcctccacaagaggtggaggagcagagtcttctctaaactcccccagggaaagggagacccccccccccaccccgctttcccggtctgctaagtagctggtgttgtttcttgacaccttttgctaccgctggaccatgatccgcttggtgacgggcgtcttcccagatgctggcgtcaccgctagaccaaggagccctctggtggccctgtccaggcataacagaaggctcgcactcctgtcttctggtcacttctcactatgtcccctcagctcctatctctgtatggcctggtttttcctaggctatgattattgagtgaggattatcataatattggaataaaaagtaattgctacccactaatgattaatgatactcatatataatcatatctaagatctatatctggtataacaattcttgttttatattttattatactggaactgctcgtgtcctctgtctcttgcctcggtgcctgggtggcttgccacccacacaccatgtccataactccccagcctctactcaggagagtgccttcccctgacaccacaaaggcagttggaccccccacttcctcctgtctctgattctagggctgtgcacccatagcaccaggaaatgtctctgtttaactcaattcctgaaactgcatgctctcttcttcaaccccccaacactggggagtgggggaaggacactggcagcagtggttgcaggaagtacttaattccaagtgttaacatgaggtaggggagaggtcagagggttaagctggcaggaggaagaggaaggaagaagctgaggttcagctgactgttgcaggatgagacctccagcatgggtggagtggtgtgtggggactgctacaagcccagggactgtgagatggtgttaggtacaattacatagcaggaatgcctgccggggcccatgctagacctcctgccgctttccactggtgtgcaggctagggagtattagggtggaagagcaggaccctttgttcaagggtgtctcctgaggcaggaccttcactagcacagaaatccacttagcccctgaagttccaggggctcagtcaaatattagaaatcttgccaggcacggtggctcacacctgtaatcccagtactttgggaggatgaggcagatggatagcttgaggtcagtagtttgagaccagcccggccaacatggcgaaaccccatctctactaaaaatacaaaaatcagccaggcgtggtggtgcgtgcctgcaatcccagctactcaggaggctgaggcaagagaattgcttgaacctggaaggcggaggttgcagtgagctgagattgcaccaatgcactccagcctgggcaacaagagcgaaactccgttgcaaaaaaaaaaaaaaaaatccagccaggtacggtggctcatgcctataatcccagcactttgagaagccgaggcaggcggatcacctaaggtcagcagtttgagaccagcctgaccaacatggtgaaaccccatctctactaaaaatgcaaaaattagctgggcgtggtggcacatgcctgtaatcccagccacctggaaggctgaggcaggaaaatcggttgaacctgggaggtggaagttgtggtgagccgagatcatgccattgcactccagcctggtgacagagcaagattcagtcacacacacacacacacacacacacacacacacacacacacacaaagatcctgggagtctagagagtcagggggaaactttaaggagattcaaacctccccttcaagggcaggtgggatttgggagacagagaggtcattagaggcaaaagaaagagcccagtgaaatgcccaaggtcaaagacatgtatagagcatgcagtgtggctcatggtctacctcactgcagggaaaacacccaccatgcccacctccccctgtgctctcccaacaggagaagaccctggcttccttcagcacccagtggagcctggatcggtgaggaggcctcaaagtctttgccagtggggctgtctggatgaccccctccatcctccctgggggtctgctcctgctttgcccagacgctctgagggtctctgtggtgatggacttggctctcactgtgcaggagccgtaccccccggggactagatgatgaactggacaccggggatgccaagttcttccaggtcattgagcagctcaactcgcagaagtacggagaacaaagagggctgggggggccgcaggccctgaggtcatatggtggagaagggatggtgctccctgaggggctggagggaagactcgcctgaccaccccctcttgccctcactctgccctcttcctgcccttctgtgccctctgttctctggtgctttcacccaccctcccacctcccaccagacagtggaagcagtcgaaggacttcaacccactgacactgtacttcagagagaaggagatggagaaagaggtgggctgtggtgtgggtggcaccaaacaacttcccaactttagttccttggtgctggggaggggtcagcccttgggtctcctccccaagtctgctcagtttgtgatcctaggggtgaggagcttgtgcctctctctaaaggaaagtcactctgtagactgagctactagatggtagggggaggaaggagggtaactccttggagaactggtagggtctacatggaactgaactggagcctgggcggtgaggctgaggagcccaccccttgcctgggagtgatgccttcaaggtgatgggtagcactggaccctgtctccacctctggccctctcactttcagtaccgactctctgcaatccccgccttcaaatactatgaagcctgcaccttcctggtttttctctccaacttcatcatccagatgctagtgacaaacaggtgagagtgccccaggcaaaggaggccctggctgtcataagcggatcaccttgccctcatgaccccgggccacactttcttccttcaccccttccccttagcttcaggcacttacccacagaggaaacatgtgttctggggaaaatgataatcacggcccttatcttaaccttgtagatcctgtggactttctacacagccctagcattttcccatgagcatctcttttgattctaacaacatccccatgaaggccagtttgtttccattgagaaacccaaatctggcagcaaatgcatgagcttagaaagtaggccctcattcctagtccactgctaggagggatgaggacttgttcttaactcagccaggtggccgggtgtgatggctcacgcctgtaatcccagcactctgggaggctgaggcaggtggatcacctgaggtcaggagtgaaagactagcctggccaacatggtgaaaccccatctctactaaaaatacaaaaatttgctgggtgagatggcaggcgcctgtaatcccagctactcgggaggctgaggcaggagaatcgctcaaacccgggaggcggagtttgcagtgagccaagatcacaccactgcactccagccagggcaacagagcgagactccgcctcaaaaaaaaagaaaaaaaaaaaactcagccaagttaaagagctttgggctaaaggcccagagatcagtctgccgtagcctcagccattcttgtgagcccccactccccaccatatgggtccctgttccacctcgacactgctctagacccttaagccagccaacccagatcatcagaatgcaatgtcttctatcagccgggaccccatcgccagccaacccagattccccagaaccacttcccctatctcccacccagctcacacagcaccttcatagcacacagggagcctgttctggcacttcaaggcctcgcttttgtctcccttcaggcccccagctctggccatcacgtatagcatcaccttcctcctcttcctcctcatcctttttgtctgcttctcagaggacctgatggtgaggtgggctgaggggtggaagtggtatgccggagccctggtcacaacctgtcctgaagagggtgccccagccccgtggctaagatgcccatgctccctccacagaggtgtgtcctgaaaggccccaagatgctgcactggctgcctgcactgtctggcctggtggccacacgaccaggactgagaatagccttgggcaccgccaccatcctccttgtctttgccatggccattaccagcctggtgaggacagagggggccctatccacccccatgagggcatgttggacctgccagggactgaaagggaacccctggatttgggcaggcagctggactaagcccaggggatgctggaaatgttgtacaaatagaaagaaaaaaattacagtctccagcaatctaccatctgggcataatagttgttgataacacttcggtgaatgtccttcttatcttttttctgtgtaggcagttacttattacttagatcacttggctgattcttcaggatttagactcattcctagaattctattcctggtgggcacctgggaatcacccaccagccaagttacagaagaagaaactaaggcccagagaggctaagtggctggcaagagctcacacagtggctcagagtcagaggagtactcttgacgcccctcacataactcctccccgagtgaggaccccagtgctgaggttcccttcccaaccagaaatagcaggatccacccctttggacgagtcttcccctgactcatccctgggtcagctgaaacccagcacaagccaccactgtgcccaagaagctacctgcctcttcaactcctcatctcctctgcagttcttcttcccaacatcatcagactgccctttccaagctcccaatgtgtcctccatgatttccaacctctcctgggagctccctgggtctctgcctctcatcagtgtcccagtgagtgttcccacatgcccttaatctccttctgcacacccttcctcagcccaagcccacagccccctgagtggaggaacgctccattctgtggattagaacagacataagtcacacccagtgtgtatcagtgtgtatgatgccccctgtctcccagataggacctgggcctgggagggacaggaagggagccctcaggtgtcccccctctgcctatgggacatgcccactcctgacccctgcctggccccacagtactccatgcactgctgcacgctgggcttcctctcctgctccctctttctgcacatgagcttcgagctgaagctgctgctgctcctgctgtggctggcggcatcctgctccctcttcctgcactcccatgcctggctgtcggaatgcctcatcgtccgcctctatctgggccccttggactccaggtgtgcacagctgctggacagaggtgccgggccccctgggatggggtgagatgggatacagcagagctgtcctggcctcaccgacctgaatcacccacagggcaaagtgggagggaagcggaggcctacatgggggcagggagaaggccaggaagggggaaagcaaggggtcaccctgatccatggccccttcaggcccggagtgctgaaggagcccaaactgatgggtgctatctccttcttcatcttcttcttcaccctccttgtcctggctcgccaggtaagtcacccagctcagccccaccagggcccacctatgagtggcccccatatctgtgacttgatctttctaatctccagggttgaatgcccattggaagcttctaagcgagccttcctgcttcctttcttctccttcactccctgcccctcctttctcccacacccctatctgggaaagcccatgctttagaaaaagtctgctgccaattctctatccctagtctgaatctaatttcaaggatagtctctctccaagtatacttacaccttaagctctacttctaaactgggggtggggtgggggtggtttcaggcatcatggagttggggctgaacactcaggagctgggcttcccctgctctgtgtctccccatggccccgggtgaccctccccagaatgagtactactgccgcctggacttcctgtggaagaagaagctgaggcaggagagggaggagacagagacgatggagaacctgactcggctgctcttggagaacgtgctccctgcacacgtggccccccagttcattggccagaaccggcgcaacgaggtgactcctgaccccctgactcctgagccacggatgccatagggcctaatttcagatgaaagccttgacctatggcccgttttctctagaacccccagaagggtcacccaagcccttgtgcttgtcaagcgtctttgttttcacaacatcttagattctttctttggtgagcacaaaactgcatttcaaattcttacttggaaggcatgtcttctctaactcatgaccattccatacattccagaagcctaggcgttgatgggagctgtctggagcaggggtccccagcccccaggccgcagactgatactagtccatgacctgttgggaactgggctacacagcaggaggtgagcggtgagccagcactaccgcctgagctctgcctcttgtcagatcagtagcagcatcagattctcataggaacttgaaccttattgtgaactgcacatgcaaggggtctaggttgtacactccttatgaaaatctattaggctggtgcaaaattaatcgcagtttttgccattaaaagtaatataattaaaagtaattacttttttttttttttaagacacagtttcactctcatcgctcaggctggagtgcaacagagtttcactctcgtcgctcaggctggagtgcaacagagtttcactctcgtcgctcaggctggagtgcatgtaatggcacggtctcagctcactgaaacctccgcctcctgggttcaagcaattctcctgcctcagcctcccaggtagctgggattacaggcgcctgccaccatgcctggctaattttttttatattttttttttttagtagagacagggtttcaccatgttggtcaggctgatctcgatctcctgatctcaggtgatccacccaccttggcctcccaaaatgctgagattacaggcgcaccgcacccggcctaaaagtaattacttttaatggcaaaaaaaaaaaaaaaaaagaaatgcaattaattttgcaccaacctaataactaatgcctgatgatctgaagtagaacagtttcatcccaaaaccatcccccaccacagcctgggtgcgtggaaaacttgtcttccatgaaacccatccttgggtccaaaaaggttggggactgctggtctagaggatacagtccacccctctctctagacctgcactatccaatatggtagccattagccatatgaaattttaatgttaattaattaaaataaaatattcagttcctcagttgcaccagccacatttccagggctcaacagccactcgtagctagtggccaccctattggacactgcacatagggaatgtttccattgcaaaaatttctattggatgctgctgctctagatcctcaaaaatcttgctagcgccaaaccatcagaaattcacccacatatttgtaccatcttatttgtatcatctgctggccctctgctgtggaaatgctcttggctcatattgagggatgttaaaagaaacagctcaggagctctttcacagccttatgcccccaccgcctgctccctgctctcaagatcagtagttcttttctggtttcttctcttacagacacaaggaatcttgtaatcgatccttttctctcttcactttggctgctagaaagctgagagccaaaatctaagactaaataggatttcatggcactcattttgtgaaccaccctcagatctgattccatctttattatcttacccttattttccctttgcctcatagtccctattgttgcttacttcatctttcattttgtacctatcttaactgacttaaacacttaaacacattttacccttggttttgtagccggcttaattgacttaaacacctttcagcaataagataggatatagaaataattcacattgacaggatcccagttctaggagtgactcccttcgtgttgctgtgaggtgatcctaacgccaaacctctgtctcttctagaattacaatgagatctaagctttgactcctaagtcacttccctggggtagcctggccctactcctctccctccttcccaattcttcttaaacagggagaccaggagtgtggacatggggaggagggccccacgcagacctctagaagggagaggaacatgacacacacccctcactccagtctcctgttcccccaggatctctaccaccagtcctatgaatgcgtttgtgtcctcttcgcctcagtcccagacttcaaggagttctactctgaatccaacatcaatcatgagggcctagagtgtctgaggctgctcaatgagataattgctgattttgatgaggtgaaaattccaagagtctcccagaccctatgtcctagattctagaattttccaccagtacctccttccactttgcttttctggccatgaagtcaatcctcccctccacagtactccctcacctcctctgatcccccagatctacccactccagcaacactgcccaccaccaaccctctccttcctgacactatctccactcccacagcctgatcctttaactccaaaggcttggggctgggcttctgggagaggtgatggagagagtaagagagactggggacaggactcttctctatatacagctgctctccaagcccaagttcagtggggtggagaagatcaagaccatcggcagcacctacatggcagccacaggcttaaatgccacctctggacaggatgcacaacaggtacggcaacccttccttacctaccatcctcctctgggctctcattgatgggcttattagtgggacttattcctgtgccctcactggcccaccctggtgggcgggcccattgccaggatgctgaacggagctgcagccaccttggcactatggtggaatttgccgtggccctggggtctaagctggacgtcatcaacaagcattcattcaacaacttccgcctgcgagtgggtgagagacttcccctgctgcagcagtctggtacctcctcaccttcctgagcttgccccactccaagtcctttgttagctgctcccagttcatcctgaagcccctttcctgactcactccctgggatggggtgtgaaggtgctgggcaaggaggtacgaggctctcccactctttttcttaagctacattcctccagcccttagagacccctcctctcctctagggccccccaggctcttctcccttccttccagttccttgtggcttcctcttcccctcttccttctccaagtctgtcattaccacatccctcattagggttgaaccatggacccgtagtagctggagttattggggcccagaagccgcaatatgacatttggggcaacacagtgaacgtggccagccgcatggagagtacaggagtccttggcaaaatccaagtgagggaaccacattggaggcatagggggagggggactaagaatagggccacctccatattccctcgcccccctccaattgtaggtgactgaggagacagcatgggccctacagtccctgggctacacctgctacagccggggtgtcatcaaggtgaaaggcaaagggcagctctgcacctacttcctgaacacagacttgacacgaactggacctccttcagctaccctaggctgagattgcactcgccttctaagaacctcaataaagagactctggggtgtctggagccca

SEQ ID NO: 1352 - DNA, 262 bp, Homo sapiens
ctgaagctgctgatatagctggggatcaccttctcattgcccttcagtgggaattcttcttcttcccaggccaattttagtgcgagtgtgtgtgtgaatgtgtgtgcacatgcctgcacacatgcatgcatgtgagactaagcattttgaaagggagtgatttttttcacaagctcaggaagagaactccctcagcctctctgccaacttgattatagtattttgtacaccttggaagcataaagaatttagccacatgact

SEQ ID NO: 1353 - DNA, 11881 bp, Homo sapiens; identical to SEQ ID NO: 1351

SEQ ID NO: 1354 - DNA, 262 bp, Homo sapiens; identical to SEQ ID NO: 1352

SEQ ID NO: 1355 - DNA, 3890 bp, Homo sapiens
ggattgtgcacctgtgcctgcgaaaggctgaccagaagctggtgatcatcaagcagattccagtggaacagatgaccaaggaagagcggcaggcagcccagaatgagtgccaggtcctcaagctgctcaaccaccccaatgtcattgagtactacgagaacttcctggaagacaaagcccttatgatcgccatggaatatgcaccaggtgggccagcctccttacagtggcctggctggagggcctcttacctctgggacaggcagacacagatctcctggcttccctccttggaatgggcatggcaagggttagagttctggtcccaattatctgaccccggctagccccttgtcctctctggtcccagtgccctgttccatacataaaaggagaggggttgttggctgggcacggtggctcatgcctgtaatctcagcactttgggaggccaacgccgaggcgggcggatcatgaggtcaggagatcgagaccatcctgtttaacacggggaaaccccgtctctactaaaaatacaaaaaaaaaaaaaaattagccgggtgtggtggcaggcacctgtagtcccagctactaaggaggctgaggcaggagaatggcttgaacccgggagggggggcttgcagcagtgagctgagatcatgccactgcactccagcctgggcaacagagcgagactccatctcaaaaaaaaaaaacaacaacaacaatggagaggggttgtcgtaggtgtgagaaagcctggatcttgattagtcccttgggccacaggcggcactctggctgagttcatccaaaagcgctgtaattccctgctggaggaggagaccatcctgcacttcttcgtgcagatcctgcttgcactgcatcatgtgcacacccacctcatcctgcaccgagacctcaagacccagaacatcctgcttgacaaacaccgcatggtcgtcaagatcggtgatttcggcatctccaagatccttagcagcaagagcaaggcctacacggtgcctgggcatggaagggacctccagggcactagaagtcttgagggccaggacctaaccctgcctcctcccctccccctaaaaaacccttggccctttggcccctgtttgggtggttctgcaggaggaagccccttggcttgctttgagaagaagctgtccccaaatgggcttatgcacagagcccctggtcttccctccctgcagggctgtgatcccagcttctatcctgcaggtggtgggtaccccatgctatatctcccctgagctgtgtgagggcaagccctacaaccagaagagtgacatctgggccctgggctgtgtcctctacgagctggccagcctcaagagggctttcgaggctgcggtgagtgtatgcaccctccaggggacaactgagaaatctactgcctcgcccagcagcccttggctcaagccacctcaggtttctcctctagctgagtcatgtctctcccttatcagattaccccaggggagggctatgggtgtccctcagactatggatttctgagagtaggtcttgcctcccattagacggagggctcctgagggcagggctgtggctttcccagaagaccctcccaagagcaagacttgagttttcccagcatgctggggtttctgaggatatagctgcagctcccctatcagactagggatcactgaaagccaggttggactcccctgtcagtctgggagtctcctcatcagactgaagtctcctgagggcaaagctgttattgtttatttatttattttttttattatactttaagttttagggcacatgtacacaacgtgcaggtttgatacgtatgtatacatgtgcgatgttggtgtgctgcacccattaactcatcatttaacattaggtatatctcctaatgctatcccttccccctccccccaccccacaacaggccccggtgtgtgatgttccccttcctgtgtccatgtgttctcattgttcaattcccacctatgagtgagaacatgcggtgtttggttttttgtccttgcgatagtttgctgagaatgatggtttccagctccatccatgtcctacaaaggacatgaactcatcattttttacggctgcatagttttccatggtgtgtatgtgccacgttttcttaatccatctatcattgttggacatttaggttggttccaagtctttgctattgtgaatagtgccacaataaacatacgtgtgcatgtgtctttatagcagcatgatttataatcctttgggtatacacccagtaatgggatggctgggtcaaatggtatttctagttctagatccctgaggaatcgccacactgacttccacaatggttgaactagtttacagtcccaccaacagtgtaaaagtgttcctatttctccacatcctctccagcacttgttgtttcctgactttttaaagatcaccattctaactggtgtgagatggtatctcattgtggttttgatttgcatttcttgatggccagtgatgatgagcattttttcatgtgtcttttggctgcataaatgtcttcttttgagaagtgtctgttcatatccttcgcccacttgttgatggggttgtttttttcttgtaaatttgtttgagttctttgtagattctggatattagccctttgtcagatgagtagattgcaaaaatcttctcccattctgtaggttgcctgttcactctgatggtagtttcttttgctgtgcagaagctctttagtttaattagatcccatttgtcaattttggcttttgttgccattgcttttggtgttttagacatgaagtccttgcccatgcctatgtcctgaatggtattgcctaggtattcttctaggggtttgatggttttaggtctaacatgtaagtctttagtccatcttgaattaatttttgtataaggtgtaaggaagggatccagtttcagctttctacatatggctagccagttttcccagcaccatttattaaatagggaatcctttccccatttcttgtttttctcaggtttgtcaaagatcagatagttgtagatgtgtggcattatttctgagggctctgttctgttccattggtctatatctctgttttggtaccagtaccatgctgttttggttactgtagccttgtagtatagtttgaagtcaggtagcatgatgcctccaggcaaagctgttattatcccaggagaccaggggctggagctggggggtgctgccctcacttccccaaattctcaacctggtgccttcacagaacttgccagcactggtgctgaagatcatgagtggcacctttgcacctatctctgaccggtacagccctgagcttcgccagctggtcctgagtctactcagcctggagcctgcccagcggccaccactcagccacatcatggcacagcccctctgcatccgtgccctcctcaacctccacaccgacgtgggcagtgtccgcatgcggaggcctgtgcagggacagcgagcggtcctgggcggcagggtgtgggcacccagtgggagcacaggaggtctgaggcagagggaaacctggggcaagtcctcccttcctgcatgtaggaatgtcaggagggtctttgtccttaggcccccatctgtcctgcagggcagagaagtccgtggcccccagcaacacagggagcaggaccaccagtgtccgctgcagaggtaagtgggaagaggccgccagtccccatggatgccacaccattcccatcagtttaatagtccccatgcactgtacctgcaggtatcccccggggacctgtgaggccagccatcccaccaccactgtcgtcagtgt

SEQ ID NO: 1356 - DNA, 5345 bp, Homo sapiens
aggcggaggcagtctccttcctggggcagtggagcagccacagccccagttcatctcgcgtttcctggagggccagtcgggtgtgaccatcaagcacgtggcctgtggggacttcttcactgcctgcctgactggtgagttgtcgggcctaccttgtgggacctgctctgaggccccacagagcaccttctctcttctcttgcaaaacacgcacttaatgaatgcttctgtctactagttatcgagttattgcttctgtctagtaactattgaggagatttccttatacaacctcctttaccctacggacaggcctggcaaggcagttattatattatcctcatttgacaagtggggacgctaaggctcagagagggtgtcacttgtccaaagtcacatatgtttgaagggactcatatccttttctctcttcctatcccatccttccagccctggtccccaactttattttgctgctgcaacccactggaggaccgggctatctggaaagactgtttaacttctttcccttctccttcctcactgcccttctccccagacagaggcatcatcatgacattcggcagcggcagcaatgggtgcctaggccatggcagcctcactgacatcagccaggtgggtgtcacatataccttgggaaggggaagtcgggggatggcggggagcccacatctgtgagttgacaccagattgggggcaggggagttcccagcaaccacaggttcctctagcttcccagctgcacctgctctgggccacctacatcggggaaagtacagaaaaaccaggcttccccaatggttgcccacctggcagtgtgtatggctggatttaaagacacagccacctcctgagaatgtgtagcctccagctttgtccctacagggggtgttgaagccagatggctccagaccctttgcccagtttctccttgcttcctctcctctctagcccaccattgtggaggctttgttgggctatgaaatggtgcaggtggcctgtggggcctctcacgtgctggccctgtccactgagcgagaactatttgcctggggccgtggagacagcggtaagctccagcctttaggccccatctcacagcatcctcagccatgacttgctccccttcatacccaccttccacctcacagcacattctctcttccctcttttctctcaaattctcttcattcattcaacaaacctttattttacaccgactatgtgcacaccctgtgctgggtgctgagatgagatggagatgtggcttccttcaggtgtttatgaggtaatgaaggaaatttcattcatccacctagtttttttttttattttgagatggagtctcgctctgttacccaggctagagtgcagtggcgtgatctcagctcactgcaacctccaccaccgggttcaagcgaatctcctgcctcagcctcccaagtagctggcattacaggcacccgccaccgcgcccagcaaatttttgtatttttagtagagacagggtttcaccatcttggccaggctggtctcgaactcctgacctcgtgatccacatgcctcagcctcccaaagtgctgggattacaggcgtgagccaccacgcctggcccatccactaattttttttattgaggtcctctttgggtcaggcatcaggctggccactgaaactagagatgacactgatgggttcttgtcttcctggaggactcagtctagtgggagaaagatgacattgccagcatgccagagaacagatagcatcagggctacaccccagtgcagaggcgtggaattcagtgaacagtaatgtcaactggaggagagagatgtcatttgaacagggctttaaaggaggaggattttgagccggcgtggtggctcacgcctgtaatcccagcactttgggaggccgaggcaggtggatcacaaggtcaggagttcaagaccagcctggccaacatggtaaaaccccgtctctactaaaaataaaaaaattagctgggcatggtggtgcatgcctgtaatcccggctactcaggaggctgaggcaggagaatcgcttgaacccaggaggcagaggttgcagtgagtgaagatcatacccttgtactccagccttggcgacagagtgagactcagtctcgaaaaataaaaataaaaaataaagaaggaggattttaaccagcagaggggcctaggaaaggcatttgggactgagagaacagagaactcatgctgttccctcccctcagtgggccctcctcattcgggcatcacccccactaaagctcaaattaactccttctgggtttcttcttgtaggcagactggggctaggcaccagggagtcccacagctgcccccagcaggtgcccatgcccccaggacaggaagctcagcgagttgtatgtggtatcgattcctccatgatcctcactgtgcctggccaagccctagcctgtgggagcaacaggtgaatagatcatcaggatgactaacctgcccctggctctccttggctgcaagtgctccgtccatcattgcctacctttcaccaaagaccagaattgagggggttgagggtgctattggttcaacccagggtgggatctgtctcctggtgcaccagctcctgcccaaactgtctgtcagttggatttggcttctggctctgccctcagggttcaacaagctgggcctggaccacctctccctgggggaggagcctgtcccccaccagcaagtggaggaggccctgagcttcacactactaggctctgcacccctggaccaggagcctctgctgagtatagacctgggcactgctcactcagctgctgtgactggtgaggaggacttgggctctggaggtcagagggggactcacggtctccttggtaccctgttgaagcacccctttccttcctctcccccatagcctcgggtgattgctacacttttggcagcaatcagcacggacagttgggcaccaatactcgccgaggcagtcgggcaccctgtaaggtccaaggccttgagggcatcaagatggcaatggtagcctgtggggatgccttcactgtagctattggggcaggtgaggactgagcatggtgggggcagacagtgccatgagcagtggggggtgggggttgctattcagggccactggactctggagcctcccaggggccatcctggcaatgtgggaggggagatcctgctcgggctgtgcccacttcccacttccctcctggggattcttcctggcagagagcgaagtgtactcttggggcaaaggggcgcgaggtcgattgggaaggagggatgaggatgccggactccctcggccagtgcagttggatgagacacacccttacacggtgacttccgtgtcctgttgccatggaaacaccctcctggctgttcgatgtgagttgtaacttttcccacttcaccacacagcccagctggcccctgtccacactcccatccccagtgttcacagatggccacatcaccaaaagcatctttagcccccagataaaaaaagcagaagctgcggttgaaaagcttcaagcttcctgcctggggtggccaaggctggtgcttcttgggcctcatggaagggctgcctccactgctccccagggctcacatgcattctttctcctactgctgagtcccgttgatgctgaaactctctttctggcctaacagggtccagaatccagggcccagtgggagtgggaggtgggtgatgatttctggaggcactgccctcagaagctgcaagggtttctcttcggtaccctccagcggtcacagatgagccggtccccccctgaggcacccggattcacctctggaccaccctgatattgcttctcctctgaatgctctgaaaagtgcaggtgcccaaggcatgacttgcagctgtctcctggattgtgtcatcatggggtatcagggctggcaaaacccctgctctgcttttggccttggatatggaaacctcaaccactttgttctcctaccacctctttgcccttcctaccccttcctcccttcagtcagtgtccccagggtccagcctggctagagttagaaggcagacctagcctttggaagcagggtggcctccagagccttgccataaaaaggctgaaggcagccgggcgcagtggctcacgcctgtaatcccagcactttgggaggctgaggcgggcggatcacgaggtcaggagatcgagaccatcctggctaacgtggtgaaaccccatctctactaaaaatacaaaaaaattagctgggcgtggtggcacgcgcctgtaatcccagctgctcaggaggctgaggcaggagaatggcgtaaacccctccagcctgggcgacagaaccagactccgtctcaaaaaaaaaaaaaaaacaaaaaaggctgaaggcagctgtagctccacacagaccctaccctttcccctagcccagttagaaaataagtctgggccggcggcggtggctcacacctgcataggcagtgctttggccaggaggatcccttgatcccttgtggccaggagttgggagaccagcctggggaccatagcgagaccgctgtctccaccaaaaaaaaaaaaaaagaagaaaataaggctgggtgcggtggctcacgcctgtaattccagcactttgggaggccaaggcgggcggatcacttgaggtcagtagactgaggccagcctggccaacatggtgaaaccccgtctctactaaaaatacaaaaattaaccaggcatggtgacgggcgcctgtaatcccagctactctggaggctaaggcaagagaatcccttgaacccgggaggtgaagtttgcagtgagccgagatcgcaccactgcactccagcctggatgacagagcaagtctccctctcaaaaaaaaaaaaaaaaaaaaaaaaaaaaaagtatttggtgcttaccgggactctatctccatactttggagcagggcaagccagggcctgcctggactggccattaggcctgcctagcttctgcatagcccggggctgggcggtccccgggagtgctgccacctcccctacactttcatcctgaggcaggatttgctagacgtcggcttgcctctcttccccagcaggagggcaggagtcactaagtgctgcagaaaagatccgcgctggagattgcccgtcccccccatgcctttccccagaaacagttgagagaatgggtagctggtgggaccagaccggtttcccagaggacaggaaggccaataaaaatatcagctgcc

SEQ ID NO: 1357 - DNA, 7970 bp, Homo sapiens
tctgtgcacacagcatcgagggcggagagctcttcgagaggattgtggatgaggactaccatctgaccgaggtggacaccatggtgtttgtcaggcagatctgtgacgggatcctcttcatgcacaagatgagggttttgcacctggacctcaaggtaccagactggggcctcctgggaagggtcaggggcagcctccgaccccctgagatcagtgctgtcaccagccatccctctgccctcccatccctccatctcttccttcatccatccttcccttcatagattcagaaagggtttatggaatacttaccaagtgccaggagccgggggcacagcaaagagagagagggggggaaaaaaaaaagacgtggtaccagctttcatggaacttctagtctagtactaagtatttgttgaaagggccttttgcagtcctgtgagccccaagctcagtgtgtcacacagacaagtggctaataagtgttgcaatagcacctgcctcagccttggcccatgataggtactaggagtgtctgatcatttattcaaaagcaacaaatatttcttgagggcctactttatgccaggcaatgctctaggtggtggagatcctgtggtgaaccaaacagataaaaatccctgcattcttggagctctcaaataagtatagtgtcagcgtggcaatgtgcatgaggtaggcgctaacaacaatgtttcgtgaaagaatattgatatccttcttcttttttttgagatagagtctcactctgttgcccaggctggagtgcagtggcgctatcttggctcactgcaacctccgcctcctgggttcaagcgattctcctgcctcagcctcccgagtagctgggattacagacacctgccaccacacccagctaatttttgcagttttagtagagacagggtttcaccatgttggccaggctgatcttgaactccagacctcaagtgatccgcccacctcggcctcccaaagtgctgggattacagacatgagccactgttcccggcctgatatccctcttctgaccttgctcactaccatgcacatggtaggtcaggaagagcagatctgctttttttttttttttttttttgagacagaaagtcttggtctgttggccaggctggagtgcagtggtgtgatcttggcttactgcaacctctgtctcctgggctcaagcaattcttttgcctcagcctcccgagtagctgggattacaggcgtgtgccaccatgcccggctaatttttgtatttttagtggagacggggtttcgccatgctggtcaggctggtcttgaactcctgacctcaggtgatctgcctgcctcagcctcccaaagtgctgggattacatgtgtgagccaccgtgcctggccacagataggtgtatacattgcagcaactccagtcagttgtccgtagctgtccggagctgagtgtggagctctgggtgtggagcagggaagggcagcaggagtgcagggggttggcagtcctcatggcaggtgttaatgctgtgcgttaagtggcgggacatggaatcttaatgtggaggcgcgtgagcacccatcagcaaagtggatggtactttcattcattcattccataagcatatgctgggtactttccttaattcattcgataagcacgtgctgggtacctgctcctggaaggccccgtgctaggcatagggactgtgaaggaaatggtccctgtctcatggagcctccaggggaaacagacattcataaaacaattcctaactaaataggtcattttaagccatgaaaagtgtttgagaaaatacacgagagtaatgcggaatcgcactgggtgaaattgaagtcagcacgggtctgaagcaggcagggagatgctgttgccgcctctaacacctgtcccagttttgctctgtgcccgacactgtctgagtgagggtgccatcttcccaacagtcccctgggttaggtgtgttaatatcactgccactgacagaggaggacacaaacagggtgaggaggtgggtttcagtggggccagagtggatgcagggaatttagaggctgatggagtaagtaagccaggagagagatgccaggggcttgagccagagtggcagtgggagaggggagggaaaggggccagatggaggatacattttggaaatagagccaatctgatgtgctgagggtttgcatgtgtgagggttaggaaaagaaaggatcaagggtgagtcctgagttactggacagatggtggccccttcactgagctgggggcagttggtgcctgcatgatgacattggaagactgcctttccctagtgaaggctaatttctttggggcagaatagggtcccccaattaaaatgcagtgctctgggaagaagctcagtcgtgagcctctgtatcctaaaatgtgtttttttcaggataataatacgttttttgtcaaaaaaagtgtttcacggtcaagtaggttgagtgcaccccagcccacaggccatgtcctgggtctcttggctgcagggcttctgagggcctcctgtgtgtagatggagaatctctgaaaggaaatttgagtctgcttcatttccccaaatgcttgtaccctgggacccttcttttctttcctgttttgtgggacaccaggccaaactattaaaatcattagtatctgctctgagtgaatctatcagttttaagagtgccttcagaaagcgtctccttaggggacttgagtcaaatgcccacagagcccagacaaataacaaatacatgttgaatgggagggatcagggggtggtggcgaccatgggagagttggaggacatttgtctcatctcaggctgttagtggcaacttgttccaaggcatatggcccatgtggccagggcttccggtgtttcaggagctgctggaattcagggtttttgtgcagaatctcctgcctttgaaccattgttaacttaaaaatgtttataccctgcaacctcagattagtcctgtgtccttgtgtgataggaagaggaaacagaggcccagagtggagaggaactgggcttacagtaacgtcatccatgtgttaacttggctgagcccctactgggtgcctttgttagaccctgagggtgggacccaggaggccaggagaagacaatccctggcctggaagagccaaccctgtagtgttatattcaccccagagtgcaggatcagtggtggtagcggaacatcacaaggccagtgctggagtcagtcatgcgttcatttcctggctccgtcgcttacttgctgggcaactgtggccgagtcacttctgtgtctgagcctcagctttctcagctgccaaatgggaatggatggtaatagtatctcaatgtcacagtttcatctcaagataacagtgtgtgcctcctagatctttgggaaggactggggagctaaagtgagaaagtgagtggactgggcctgatgttttgtagctcatcatcctcactaactggggagacaagagtagcgcatcttccagtgaccctggagtagtgtgaagccccgtgttcccaagaggcttcctgtcaggaactgagctggcatcttctttctctgttctctggagcttcatgtatctggtggtggtcctgcactggccccccagcctgggggcggggatagcaggctgtcatgcctcctctccacaggcttctgtttccccatcctcagaactgctagaatgtcgtgttctttcatggccttagatggagggaaatctcacctgaacccatcacggcaggtcctgtgcttcaaggcctcgcataagcccctcgtgggggacttgcctcaagatctctctgtgcccagagcaggcagggctggagggtctctggcagctgcccactctggcagcttgggcctctgcctcaaggagcctggggtttgcacgggcctggtgggagagggagggtgagctggtcagaggcccacccaggccaccccctttctcctcagccagagaacatcctgtgtgtcaacaccaccgggcatttggtgaagatcattgactttggcctggcacggaggtaccacctgggtgggtggggagggcaagacaagcctctgagttggcaggggacaggggtggggtggagggggcatgggtataggccaggagctgtgctctcagcccttggtctcacccccaggtataaccccaacgagaagctgaaggtgaactttgggaccccagagttcctgtcacctgaggtggtgaattatgaccaaatctccgataagacagacatgtggagtatgggggtgatcacctacatgctgtgagctcccaggcgggtcgtgtttatggggttggtggggcatgggggcgagcggccgaggccaagattggccctagggtcttggtaaggtggtcccacctcccctatccctcagtcaggggtttgctggggttgggagtgctagggagaacaggaaaggggaacgtggtacccatttcatagatggaaaaaccaaggtccctataaaggcatagcatctggacagcagatctcggatgacctggggcgggcagaggggcagtggacatttcctatgtgctcaccacataccttgcactcgtcattcctcatcactgccacctaggaagctgggatgattatgcccattttacagatgagaagagtgaggctcagagaggggagatgacttacccaaagtcacccagccagattcaaacccaggtctgtcccacgagaggctgggggtcttttcagcacacggtgctgcctcctaggatctgcccctgttccctacccctctgaaggtgactcagcacctccaatctcacctccctgccccctgctatcccctccctctaggctgagcggcctctcccccttcctgggagatgatgacacagagaccctaaacaacgttctatctggcaactggtactttgatgaagagacctttgaggccgtatcagacgaggccaaagactttgtctccaacctcatcgtcaaggaccagaggtgaggctcaccccagaacctgaactgtatgtgtgcaagcttagtgtgtctgagtgctggcagggcgggagccaggtagagaggccagctgagcccctggggcctcacgagcatgcagcccaccgtcaccatgctgcctctcccccagggcccggatgaacgctgcccagtgtctcgcccatccctggctcaacaacctggcggagaaagccaaacgctgtaaccgacgccttaagtcccagatcttgcttaagaaatacctcatgaagaggcgctggaaggtaccgctggattcagggtggggagggagggcttgctagtgggaagagctcctggtgccagatcccagcctccaccgtccctgccttggcaggttctgttgaccaggctgggccctgtccggaagacagggttgacttttctgtttttgccctgggctggctcctgtcctagagtggagacctctacccggccttccacccagccccacccatctggggctctggcttccctccttcatttttcaaatatttcttgagcatctactacttctaggcattgggatataggagtggacaaaagagacaaagatctcagtctttgtggagttacttttggtgagagatggggcattttctatctttttttctttctttcaatacagtcttgctctgtcacccaggctggggtacaatggcgtgatctcggcccactgcaacctctgcctcccaggttcaagcaattctcctgcctcagccttccaagtagctgggattacaggcacccaccatcacacctggctaatttttgtatttttagtggagacggggtttcaccatgttggccaggctggtcttgaactcctgacctcgtgatccacctgcctccgcctcccaaagtgctgggattacaggcgtgagccactgtgcctggctgaggtggggcattttctagagccctgtggaaataggcagggttaaagaagactttagaaaaaaaataagggccttctgccggggagaggttgcacttttatttttattttttttagagacagggtctcactctgcctccccagctggagtgcagtggcgctatcatggctcactgtagtcttgaccttctgggctcaagtgatcctctcctttggcctcctgaatagctgggaccacagacatatgccaccacatccagttaatattttaaaaatatttttgtggagatgaggtctcgccatgttgctcaggcaagcaatcctcccgccttggcctctcgaagtgttgggattacaggtgtgagccactgtgcccagcctgcacttctaaatagggggggtcaggaagggctcactgagaagcatgtgaacaaagacctgaaggtggggaggggtgagccgtgccaatactgggagaagagtattccgggcagagggagtagccagtgcaaaggccctgaggcagaggtgtggttggagagtttgaggaacaggtaggaggccagtatggatggagtggagtgagcaaggaggtaaggaatgaagttagagaggaagagggggacaggagttggagggactcatcggccatggcaaggggtttatcttttacttggagcaaaactggagccatgggagtgtttggagcagagcggtccttggttcaggtctggctgacctatccgttgagtgaggggactcctggacaatacagtgtcatggcgcctcccgtggccattttgggcactgcaccttctctagcctgtgaccctcctggactgaaggggacttacaggctgctcagacaccctgcagctgcccccctgccctggtgttgactgggactccctctcttctgccctctagaaaaacttcattgctgtcagcgctgccaaccgcttcaagaagatcagcagctcgggggcactgatggctctgggggtctgagccctgggcgcagctgaagcctggacgcagccacacagtggccggggctgaagccacacagcccagaaggccagaaaaggcagccagatccccagggcagcctcgttaggacaaggctgtgccaggctgggaggctcggggctccccacgcccccatgcagtgaccgcttccccgatgtgagccgcctcggagtgtggcctggatccatcctgctagcacctccccagacagggctccagcctgtcggccacaccccagactccaggcccccgttgaagccgctcccggttccctccccagctcctcgtctttgaactgccgccgccgtggtgacccctgctttgccccactgggagagtccttagcctgggcctcctcctagctggagtgccatggctggggggtctcagcatgtagggcttctgtggttgtggatgggaggctcctggtggggcagaaaggctgcaacgctgattcctaaggcccagctgccagggaagacagagcaggctttgtgagagaggacctccatgcccccgccacctccccactccagcagataaggccgagcccacaccatctggcccaggctggcccccacccaccttccttgcgaccaccaacacacaggaactctgtgtgagagagagggcgcccagcccaggcctggtggagggggaggggagaagccaagggacacaggagaccacccccgagcttgcctcagggccaagccggcccaacccaaccactcggggcccccatcttgggggtcacccatggcctcagatgatggggtcagcaggcccaggagaattaggaaggccatggggcagcctccagtctgctctcagcttgtgccttgtaaataaatgtacaggttggatgtggcctccttccctctgtgtgtgcctgcactggtgtgaggtcgctgatgaccacagttcactgagca

SEQ ID NO: 1358 - DNA, 13460 bp, Homo sapiens
cacacagcaagttttttgacttttattaaatctttacaaaacagaatacaaaattccggcattgacagttggtgtaaaggaaaacttctgagctccgtcagttcacctggtacattggaattaaagtgcttggatgtttttcccccactttaaaaaaacttttgaggttttttttttttttttgtcttttaaaaacatcgtaacattaacacatggccgttcaccgtcccccagcgatgggagctggcctggggcccagggtcctccaggatcttcactcattcacagtaacggttctgaccagtcctccaggtcgcacgtggatgcgacaggggtggggagggaggaggaagtgactgtcccaccttcagaaaaaaaaaaaaaaacaaacaaacaaacgctgctagccactcagctttagagacccgatggctatgggcgcctgcagcgggcgggggtccatttgcttgttctttgatacaaaaaggcagagaatcccccgttacgaaacatggaatcactgacaggcgagaagtgatgggggaaaggggtgggcggaatgccccaccccccccaggggtctttggaaggggcagtccacagatatgggcagtggggaccagggaaggcagagcacccccacggccaccggactgtgaccatcatacgagattcaggaggggcagcagggccaggcagacggtctccgaggcccccacccccaggccccccgacattcaagtattcttcaagaacagggaagcaaagtccatcgatgtgttgtttttttttaaggaaaaactaaaaaactaaacaggaggaagaatcccgaccgcggatttagaagccagaggggctgccccagctgtggagctcgggggctgcgccgggaagggcgggcggtgaccctagccgcgcgcacttctaaagtggaaccctgtattgcatagaacgtccccacccgcggggagggggcagcaggctccgcagcccccgggggttggagcatggagggtggggggactgagcagacccccgcattcctgggtgcccgaagggaggccgaggccgcagccgttttcctgaaggtggcagaccaaaaacactgccctgggggtgaggattcggccagaccccggggtctgggctcagctctaaggacaaggacggagctgacggagcttccaggtcaggcccgaggggcggcgcgaggcaggacgtggctacggtcagactgagccctgagaaggggcactcgggtgccccaagggggtgtcttcaggaccccccacattggctgacagtgcctgtccagcccctctgcctgctgcggtggaaacggcttcgggccaggcggggctcctgctgtctcaggccttggtgtggaggggaggggcagcggcgagcccctggggtcagctgcagtttaaggtcaaggtcggaggccgaatctggccaccaggagtcctggacagacagacgggccttgcaggaagccccgattgtcaactatcatggggacaaggcaggcgcgggtgaagggctgggggatcccatggggtgggtgggtgagctgcctgccacctgcctgcctgacacctccagagacaggcagcccctcccttccccaaccaagccaccaggggtgctctcagggtgagggatagaggggaagagcctgtccctgaaatactgcgggctgggagggaacacgagggcagggtcctgtgcccctccccagctctgcaagatggcaaacgctgtgggcctgctctcctgagtcactgcaagccacgtgggcagatggcgggcagcacaggtgacctgggggcaccttcatagtagaggtgagcagggcgggggaccggggaggggacaagcccacccacctaccctctgctcaccttcccgggtgcctgcaatgcttttaaccatccaaaggaaaaaataacggggaggggtggaaacaggaaaaaaaaaacccaaaagcaaaaaccttctataaaacacccccctcagctgagcttagtgcctgggaatccaggcagaggaggggcagcccgctggacaccggctggcgatagcttaaaaaacctttagatttgattgggggacgggtgacctatgtacagaggggagatgggagggtcaggcgtggtctcccaccaggaccactggggccgaggacagactggccctttgccgccgctgcgccagcttggactgggagggtggagacagctgcaggcagcgtgaggtagctcggaccaggacgggctggccctgccccgcggcctcctcctcagccaggtcctcgtcgtgctgggccagctgccggttcatggcaatggcctcagccgcgaaggacgtgaggtctttggcacagctgttcctgggaaacggggtgggggtaggtggtcaccaagaggcacccctcaggggacccctggggtctgtgaaggccctgggggaaggggcttcatgcccccctcccagcccccaccctggggctcctctgagcaccagggccccaccgggagcttcactgagtcaccaggcttgcctgcctccccgaccccaaagcagttctccgggtctttcacaaatgtcttaacctggaaaccccgccccctggactcaggggtcccgagcacccctgcgggccttacctctgcaggaccatgggagtgggcaaggtgttctccggggcgcactgcaacgagagtgggcgggggcagggctggagagcagctggggccgcctggggcgctgggtggggtgtctggccaagggatgccatgcccatcccatcaccaggaccccaccggagaccaggagtgcacctgggtgccccgggagccaagcgcccaccccgaggtccctatggtgaggctccatgtccccctgcccagggaacccgaggctgggccaggctgaggcctggtgttacaggacccagtgagggtgggggcagagccccaagccccatctctcccggctgttcccagcccaaacccacctccgcccccctcttaacccatgggtctctggatgcttctgcaaggagattggaggcccccagcccctcgcctggggacacagagtgaccccagcttctatttttagtaaatcctcactccctggggtggcagctcagctcagatgacctctggcaggagaaacacccgactcctcctcgactggaggccacacagggaagggtggaggcacagcctgggcttgagactgacggcaggctaggctggggtctatgtgagctgggctcgctgcccgcttcgctccagcctgctgcaggctgtgggtccccaccaccctccaggaaggttctctgagtagctgctcctgggagccgcctggctggccagcgggcaccgtgcacaggcgggcggtggggatttcggctgcacccctcatcccagggcagagcctgtgctctcaagcctcagtgcatctcagggtgtccaggctacaccctcagggcttcccatgctcgctctgaggccaccctgcagcgcccccatacccctcctgccgcccgtgcggctggtactcaccccctgaacccaggggtgctgcaggacttgggcggcactcagcctctgcttggcgtcacggaccagcagcttggagatgaggtctttggcagcgcaggagatgtgggcccagtccttgtcggggaactcgtacttgccctcctggatgctctcaaacagcatgttctggggacatagaacacaggggagcttagacctgcccaagggcctggatactgtgcactgacacgtggctccaaccggaccccaaccaggccctagaccaggccctagaccacgcacgcctggggcagagggggctgggagccggaccaggagagtcagctccacccaagtggagctggatttacaaaaaagcagctctgagggacctggttccagggaccacaggccacagatgctgagccttaagccgcgggcagggagcctgagcctgatccccccaaaccaggggcctcactccacctctcagctctctgaaccctgtctggggtttcccttgggcaggcaaacctgaaaagccttcgggaaactggcagacagggcggcactgccctgtggatggcatcagggagtagggcacaccgggcaggtccccaggggttagggggagtacagagtaggtccccgggggtctggggagcacacagggcaggtccccgagggttagggggtggtcagggggcaggtcccctggacttagagggtgcgcagggcaggtcccctggggttagggggtgttcagggcaggcccgggggaggagggtgcccaggagaggagggtgcgcgggccgccgcacctggcaggcagggcaggcctcgccgcggtcccagccgcagtcgctgccacagcggcccacgaagggcgggtagccgctgagtaggatatacaagatgacgcccaggctccacaggtcgcagcgcttgtcgtagatgctagcctcctcgctgaaggcctccactacctccggggccatgtactccgccgagccgcactgcgggcgggggaggggcgcgtcagccggggtttcccagcattacgtgggaaccgagcccgggtaactgcgggtcacctgcgccagccggctcggaccccgccccgccgggcccgaccaatcagcggctgccgggaacgcgcccccgcccaatcagcaggtgcagagctcgcccctcccccgccgcggccccgccccacccggccaaacaccgacgcgttggggcgcctgctcgaggccccgccgcgacaccccgcccaaccaatcagcggctgttgctaggcggaagcccgagctccgcggcctggagctgctggatggcccaggctccgcgaggttatgcaaccgcagagcaggcggccgagcccccagccctccccgcgggccctcaccggagtgagcagctccggggtggagataggggagcagtccccgttgagtttgatgccgctgcccaggtcgaagtcacagatcttcacgggggagacctgggaggggccaaaaggtccgtgagcctggggtcccacgcggtccacccctcccgcggggccaccctgccggaactggcctacctggttggggtgctcacagaggatgttttccggctttaggtccctgtgggcgatgcctgggggagaagccacagaaccacgacggggtgagggtctggaggtcttccaggagtccttggcaggcggccctaggagactccgggcggggtcaccacctacctttgttatgcagaaagtccaaggcgctggccacgtcctgcaccaccacgctggcctccagctcgttgaagtgccggcgcttgtggatgtggctcaggatggagcctgggcagggcagggcagggcaggacagggggaacacgcaggtcacctcaaagtcccctcaaggccagcacccacctccactttggcggggacgcccccacactggcttcctccagcacaaaggcctcacccctgagccaccatttgggcaggacactcaccccacaagccccctcctgcaggtggcactaggcccccatcccgtaatacctcccagctccctccctcctcacagcctggagcccccaggtacctccccgcatcttctcaaacaccaggtagaagcggtcctcctcctcgaagaactcaatcagctctaggacgttcctggggtgggggtgggggcaggagaggagctgaggcttcctgaggcccctgggtacctgctgcccggcctaggaggggcccaccctcttggtgctggcctgtccaccggaagctgggactggggcaataggccagcttcacactgcccgcctggggctgtcagccagcctgcttcagggaggggaatgcagggcctgggaaactgggtgccctacagacgcttgctgggggtgatgtggcactcaggcccttcatccactgaaagacagctcaggccagtgcggtggcaagggtggctcacctacctgtgtccctggcactggtacagcatctccacctccctgaaaaccctgctccgaatgtggcctggctgcttctcaatgatctgaaacaggcgaaaggacacagcacctgggttggtgggacgctcatagtcgagaaggggccagaaactccactgccacggctggaattcaccacacttaacgccctgcaactctagaaagcagggctcacgcctgtcatcccagcactttgggaggccaaggcgggtggatcatgaggtcaggagattgagaccatcctggccaacatggcaaaaccctgtctctactgaaaatataaaaattagctgggtgtggtggtacacgcctgtaatcccaactacttgtgaggctgaggcaggagaatcacttgaacccgggaggtggaggttgcagggagctgagatcgcgccattgcactccagcatcctggtgacagagtgagacttcgcctcaaaaaaaaaaaaaaaaaaaaaaaaaaaaagccagtggaggctgctctccacctgtgaccctgacagccctcagagacacatttgagacctatgacttctgcaaaatacccccacaggacgtgagggttccctgccctgggcggccaccctccctgacccagagacagtcagctgtagtcctctttccccacagggtgggtacctggtcacccatagaactagggaggcctcaggacacctggctgccagcccaccaggccccacctcacatgtggccacagcaccaagtcctgctccccagctccgtgccagcctgggcagacacttgcctgccgcctcagccaatatctgtttcgggcccaccctggttggctgtcccagccactggcggatccagcctccctgagccccagagcctcaggaagccactctactgcccccagcagctccagctgctccctgccaccttcactcacagaggtggggtgaggaggcgtctgcagcttcccctggcacctgctgggaccctcctgccaggctggacatgttagcccctctcactgggcgggtgcctggctgcatgagcactctgcccagggttccctgcccagtgcgatggcctggtggcagcagggatgtggcattccacccttgagtccctggctcctgcctctgcagtcccatgtctatactgacagacaacactgtcccagcgaggggcaagagaacaactggacgccagggtgtcctgaaataccaccacccaggccgctgctgaaagctgtgcccagcaggcactgcagatggttctggacaaaactgaacctcgtcctgtcccttgggtggctggctagaatgctgcttcagggagggggcgcagcccctcctggcatggaaggggcctattctgaggtcccagcatgggggctctgcatccagccagcagcctcacggcaccaggtgaccccagggtggcttcccgcagcatgaccccgagggcagagggcccacaccccagtccccatagaacgaaacaacgctcctcagacccacaggcccagcgattcgcctctctgactcgcccaggacacctcctcctcccactgccacctggccagaccaactcccggacgtcagtggccaacaacacctccagcaggaagtcccccaggctctgcagatcccaacactgaccacaccaggtcaatgtggcaagatgaccagggaggtggctctgagacaccagttaggatcccccagaggccacacagcatgagtcaggctacctaaccccctgagcctcagtgtccctatctgtcaaacaaagacaggaagcaaggctgggccaccaggagagggctgtgctcagaggaacgcctgctgtgtggaagtgcttccggaggggcctagtgctcctgcaccattgccttggcctgcctgggggctcccaggaggcagggaccgtccgtactgtgtctgtccctgcctgctgccactgtggtcccagcacctagccagtaacctccccaggttggccacccctcttcttcctccttctcctcagaggaaagctctagcctggccgtccaccaggacccacaggctcctggcgagccctgctcgccagggcacacctggccctctttcccaggcagccagccctcctgggaccccacccagcccgggagccggatgccaggtcacgagggaagcctggaagatttcttggaacacgggatccaaccggcccacaaggtcacagggtcacaaccagagcctcaacagggctcctgctcccagcccttcggccacaccctgggtccagcagccgcccagggctagagtgacacagggggctctcacgggcctgcactgaggttccccaaacgcagagcccctctgggccctgggatatgacattgcattttgatccttgaaaccaaactgtcatgtaccctcagggacagctcagaggcagggacggcccaggggacccaatgggcacagtgcctctgtctgaagcccccaccctggtaccagaggggccaccctcactgtcattcccgactggactcagggcccggtggccacttttagacacgggtcttcccggctgtaggacggacagccggaatgccacacactgtttccacccccgctcaacaccgatcccaaggcgctgggttccccagggcgcggcgcgggcccaccttgacggcgtactcctggctggtgatcaggttgatgcaggtctgcactcgggcatgagcgccctcccccagcacatcttcctgcagctggtagacgtctgccgggcagcggggcgggcgtgagagggaccctggcttttccccgctcccggctcccccaatgcccgccatccccgctcaccttcaaacctgcccgagaagctgtcggtggcccggccgcgcttcttcttcttgcccctcttcttggcgtccgggatgtcaatgggctggctggcgggcatgtctgttccaggaggcacgcccagggggctcaggacatggccctggccggccggcccccacccccctgcaggggctggccactgccatggcagcgacagcagctgccctgtgccctcctccccctcgggcccctcaccagggcgggctgagcactgcaggccaaagtcagagtctccgtggtcgggctggtctagggagaaggccagctcgaaggggttctgcccctgcaggggagaggagaggagaggcactcaggccccatccctgcccacgcagcagggagacctatcctgccccagtgtcgcagcgtccacactgacaagccctgcgctgagcattacggaaaaatcaactccgtccccgctcacacaccaggatcaactcccaccaggatcaactcccgaaggggcagacagcataaaccaggggacccccaagctcctgggattcacctcctcgctgccccacactcagtgtgtgtgtggatttctctcttttttaaatttatgttttgtagagataaagtcttgctacgttgcccaggctggtcttaaacccctggcctcaagcgatcctcctgccttggcctcccaaagtgctgggatcacaggtgtgggccacatgtggaaggcgtgaggcctcctagcacctcagcaaggcaagatcaggggacgcagagtctcttagggggtccatggaatttgccaacccagggggtgattctgtcccccaggagacactgggccatgtctggggacatctgtggttgtgaccggttgggggagctcctggcacggagtggggtggggcaggggtgctgctcagcaccctgcagtgcccaggacagccccaccccagagaaagatgggccccaacctccacagggccgtggggaagacctcctcccacctgcagagccctgggggcctctgggaaaggggtgcattgcggggaggggacagacacaagcagctggctcttgggaaccctgcctctgatgccaggattgagtcaccgtggggcccaagccgtgtcttgcacctccgtctgcttgtccacagaatggggacggctgacctctggggcgggtcgcggggatcaaaggcagcggggcagtgggaaggaggtgagtcactaggcgggctgccagcctggtggctgtgcctgctttcccacggcctcctgggccatctcagggcagctgagtcctccctgggcctcagtttcccccatctaagatggcacacaaccacctctccttcccctaagctgctcccctccctttcgctcagtgcctggggctggcggggtaagaattcagtgcctggtgctctggggcctgctgaaggtgggggctctgcttccatcacccctgccttctgcccctacccaagcccagacacctgcattcctccgcccatgtcccgcagctgcccggcacacctttcccctgccagctctgtgcacctacgcccccgccacccaccagaggctcatctgcttccagccccccaaccccgcagctaccagttaccgagtcagtatacacagtgctgtactggtcctgggggctcacgggagaggcacccacaggcgcgagtgtgccaggccctgcccagaccacatcctgcactctcccatttcagtgccagacacccctggagggagcccctggtgggccctgatacccggctaaggaagccgccttgggccctgggggccaggattcaaatccaggcctgttgcactgggcaggctggggctgggtcatttcttgacccagccccaggaccatgggagcaagaccctgaccagggtgcaaggaacagtgcagattagagtaggctttgcccagcccccgtggaagatggtggcatacatatgtacgtttccacagagcaaatggcccagcgcagggactgccggccctttacgaggggccgggcctttgaagctggggaaccgaggcccggtcaggttccttgtaccactgagctctcactcagcttcacccgtctgggtgaacccaggcgggaggggcccacagaggtggcgggggtcccagtcccagtgaggatgctggctgctctgggccaagtcactgcccctctctgggccccagacaacctgagtggggctctaacaagagggtcgttcagcagaagtgagactccagtggagcccgtgggagacccaaggccaggagatgggtggaggccagagggcagagtctgggaggggccgtgagccaagctgccctcctgcctccccacccaccctggctcgggcagatagctaccaggaggctgctgggggaggagggaaggaaggggggggctccaactagcccccatgggagtcagcattcccataaggctcctgtccagaggcccctggtggccctggggcagccaccacaaggcaggtgaccagggtctaaggccagactggagttcacctgctgtctgaccttggcctagtgacctcaccctggggtctgtcagcggtgagacgggaggcagctgcccccaactcgtgggagctcacgagagtgaaatgacctaaggggccacagagcccagcgtgagctcctggccctgtctggccaccgttcccctgtgccagccacagcctccaactcagcaaagctacagatggacggccgcagccaccacagcggaggggccaggcaccacgagactccgcggcctcctcgcccgtgtacaggggagccccaggcacacgcgcctgcagtctcagagcctcactttcccatctgcgaacggaaagaaacccaaggcacccacagacgtgcctccctgctgggctgctgcctgctggaggcaaggagagtatttcaggagaggtggccccaatccagggagcagccgtgcatggtgggggctgtggggggagattcctagagcaaccggtcccggccacctggaggaacacctcacagccaggactgcctgccaggccctcctccaccaagacgcccaccttcccagctcccagccaggctgccctggccatgcacagaggccggcccacaatcctgggcagtgtgggcggtcctggtcccactgttctaggtctggctgtgggactcgagtcagcaggccttggcaggaggtggctggaaccatctagaaagttcaagtgtgctttagctgcctggctggccccatgcactgactctgtatcagctcatgcctggccctaggagggagaagaccactgtcaggtcctcctctttcccgcccagcccctgacactctgatggtgccaggcctgctgccctaggggaaaactgggcaggggtggcaggggtggagtgctgccctggggcactggctggacagacctgggaattcttcccagtctctctttgctcctcccaccctggagcaccgcgttgtgtgtacacacaagacagagacacacacacacacaaacacacacacatacactcacactctctcttcctctctccagtcctgccttccctaccgggcaacaggtccctgcccaaggaagcccagtgaagcgattacataaccccggcctgaggggtggggcgggccggctgacatcactgcgtcccctgggccaggtcctgcggggcccctgcccagcacctgccctccccttcccccccaagatttgctcatctgaaaccagcactcaacagcagtcaccacccgggctgcgcagaaacttcccgctccgacaggaaacagcacttgggcctggggtgtctgcgaagtgcagggctgaggggacatcccatcccctcccccacggcacaggccccctgggggtgggtgcacctgaccagcccggcctggggattctgaaagaaagtccccagaagccacatggaggtgggaatgggactgtggcccgctgacccgtccccaccagggcacaaccagctggagcttgcaggggacaccccccataagccacatgcagcgactgggacaggactgcagcctgctgaccccccagaacatacccggcgggggcttgcaggggacacacagcctggtgccctgacccggagggggctcctgctcccagcctcacttgggggtcctggaggaaggacccggcggccatggctggagagaggactgtggcctgctgaacccccatcctcgcacaccgaccccgcttcagcgcacggccggcccgggcagccccgggtgtagggcgggggccaggcacgagccccgggagccgatcttaggggcgggccccgcgccccccacgccggccattccggtggtccagcccggagcgcccccaaaccgaccccgggcctcaccttgaacgaacggtggaaaccctgaagttcggctggtttcttctgcaccatcttctgtccgggccccgccagcgggggaggggaccgagggcccggggggaggcccgagggcgggcggccgggc

SEQ ID NO: 1359 - DNA, 138 bp, Homo sapiens
ttttttttttttttttgagatggagtcttgctctgtcacccaggctggagtgcagtggcatcgtctcggctcactgcaacctccacctcccaggttcaagcaattctcctgcctcagcctcccaagtacctgggacta

SEQ ID NO: 1360 - DNA, 113 bp, Homo sapiens
ccggggtcgggcttgggccggggccgcagtgccgccgccgccccacgtcgcgcagcccggaccccgctccgcggaccgcgcggggaacagcgccgccgccgccgccagcgcgg

SEQ ID NO: 1361 - DNA, 2209 bp, Homo sapiens
tttttttttttttctcaattcagtatatctttattgagctcccacggggtgcatgaatttaagatctataatttacaaagtaggaaagtgttactttagcccccttttttaaaaaaaagcaaattacaatttctgtatatatttcaagtgaatcatttaatgtgagtgaggctcagttaggtgttaccataagtattaacagaagaaaaaaggaaagcacaaacattttccctctaccagaaaagggtctgatgtaagataaactagcctgttggtttaacaatagctcattaaaaaggccagagaatctgggagaagaagatgtacttggaagcactgtcctctgagggctcattcccaaggaacagcaaaatactgaaaaaaattaactggctcaaaaattatattgagagataaaaagagttagtcacagcttagaaaaaaattccagaataaatgacactagctagattggtaattctgatgtttccttgtcatagtactctgtgcaaaacagagggactacaaactggtgcccctttgaacagagtggttttaaataatagattctccagtgcaccaactgtattttcaagtataattctcgtatttgtacctagaaatacagaagaaaaagcagcaaggagaaagtgtcaagtatataggacatgaaatgatttggcagccctagaattccaagtatgagtctttttcatcaggaaaatcacattctggctcagtccaaggtaacactggaggcaatggtattgatggcttgttataagcaggaggcaaccgtgaaagtattgaatcctggctttcttctttcatctgtttgaagaaaacatgggacaataaactgcttgctgatggccttttctcaggatcttgttgcaaacagagctgtaccaagctaaagaaggcaggagagaaagtttttgaggatggtgtgtgtaatcggtcactatttactgtgtgagttccactggagacaagcacactttctccaattccagagtctacacctgaccgggaatttttcattctggattctgattgagggaaaatactgatatccaatgggctataaggaggacctttcagtttctgtaacagcatctgagttctatgcatgtcctggaaaggcacctgcccactggctaattcacatgctgtaatcccaacactgtaaatatctgacttcacattatacccatgtaaatcctgtctcagtagttctggactcagccacggctgcactgatgtgctgaactgtgggaaatcatacacagccctatgcctctgtccatgcttaaccaaactatgcagatgggacaggccagagagggtcactaggccatcaccagaaatgaggatatggctggctttaatactcctgtgaatacagccattttggtacagatagttcaaccctctcacagctccaaagataatgtttcttattaaagtttcactcattccttcaggaaaacaggtcctcaagagttgacttgctgaaccataggccataaatggagaaataacccaaagccagctgccaacagtgaaaactgtccagtaagttgtaatattgggatgccggaaaaagtgggatagaatcacggctttctgtaaagctttcaggcgttcttcattgcagttttccagatttgtaatttttatagttaccagtgttcccgtgggagtatgccatgcaagatggacagaagtcaagttgtcaaatcctcttcctgtttctacttggagctcgtagtgagaaacgttggtggaacatagtacttcactggctctagtggatggaggtgaccaggaaagggttggctcatcaaccaagtattgatggatactggtttcagactgtttttcaggtctgagtgattcatcttgtgttcttgaagtgcagaagcaatccaaaagagacattgaatcactttagttcacacagaaagtgacaaaaatccatctattccaaagaaggcttttgttttatcttcctttcaagatgcagatatatcctacctagcagcgaccatggccagcgactctcttcaggctgccagcggtgcggacaggggcgggcgccagagccctgctcgcggaggggcgaggcgagtgctctaggcccgctcccggtgcggggcgcgggagggcggcgaggccgcgaccggggccgtgggcttggaactct

SEQ ID NO: 1362 - DNA, 518 bp, Homo sapiens
atttatataacaaatatattcaaaccaatttatctttatagtttggggaggtaaataggtattcagaaaaaattattatagcagctgtttgtgctggtacagaggtttaatagtagtctggcacgtaagttatttcctatagccttttgatttactattttgctataatatttctggagtatcatagtacatttaatttgtaactcacagtaaaagtacatgtgaaaatgagaagttttacagaagaagaaggaaaattatttttagctataagatagtagacagttacaaaataagattatattgtatgttccagtagatgtagtttacattaacttaatatttgtgttccagcagcattagttctccataaagcttttctttaaataatttatagtctttctccttgaagtaatttttattacagtaaaacatacataatgaaatttactatcttaatcattttaagtatacagtttagtggtattaaatacatttataatgttgtgcacccatta

SEQ ID NO: 1363 - DNA, 1562 bp, Homo sapiens
gcaaagcccctgagcccaaaacagtctcctactgcagcccgtccgtgcccgtgcactttaacatccagcaggactgcggccacttcgtcgcctcggtgccgtccagcatgctcagctcccccgacgcgcccaaggaccctgtgcctgccctgcccacacacccccctgcccaggagcaggactgcgtggtggtcatcacccgagaggtgccacatcagaccgcctccgacttcgtgcgggactcggcggccagccaccaggcggagcccgaggcgtacgagcggcgcgtgtgcttcctgcttctgcaactctgcaacgggctggagcacctgaaggagcacgggatcatccaccgggacctgtgcctggagaacctgctgctggtgcactgcaccctccaggccggccccgggcccgcccccgccccggctcccgcccccgccgccgccgcgcctccctgctcctctgccgccccgcctgctggtggcactctcagccccgcagccggccccgcctccccggaagggccccgggagaagcagctgccccggctcatcatcagcaactttttgaaggccaagcagaagccgggcggcaccccaaacctgcagcagaagaagagccaggcccggctggcccccgagatcgtgtctgcttcccagtaccgcaagttcgatgagttccagacaggcatcctcatctacgagctgctgcaccaacccaacccgttcgaggtgcgcgcccagctgcgggagagagactaccggcaggaggacctgccgccgctgcccgcgctgtccctctactcacccggcctgcagcagctggcacatctgctactggaggccgaccccatcaagcgtatccgcatcggcgaggccaagcgcgtgctgcagtgcctgctgtgggggcctcggcgcgagctggtgcagcagccgggcacctcggaggaggcgctgtgcggcacgctgcacaactggatcgacatgaagcgggccctgatgatgatgaagtttgcggagaaggcggtggatcgcaggcggggcgtggagctggaggactggctttgctgccagtacctggcgtctgcggagcccggggccctcttacagtcgctgaagctcctgcagcttctgtgagccaagccccagcctgcaccgtcgctgccccttccctgcctaaccctttcctgtctcgccttggaagcacccatgtctccctgggaaatggtacagatgactgggatacctggatgtaaaatatataaatatatatatagaaaatacatataccatatataaatatgaaagactaaggatgctgttgcccgtccacactcgtctcctctctgcactaagtcctccctgttttcttctgtaattatacacatttccagttccatgcaacgtcctgaggacagttctgtgaactgaatgcagcctggacactggcctcaataccttgtttaggatttcttcacccttttgtcaaattgttatttaaagaaaaaaaaaaaagaagaaaattccattaaaattttttttggttgagtcatgagcaaa

SEQ ID NO: 1364 - DNA, 222 bp, Homo sapiens
ccgacgcgcccaaggaccctgtgcctgccctgcccacacacccccctgcccaggagcaggactgcgtggtggtcatcacccgagaggtgccacatcagaccgcctccgacttcgtgcgggactcggcggccagccaccaggcggagcccgaggcgtacgagcggcgcgtgtgcttcctgcttctgcaactctgcaacgggctgggacacctgaaggagcacg

SEQ ID NO: 1365 - DNA, 294 bp, Homo sapiens
ccgacgcgcccaaggaccctgtgcctgccctgcccacacacccccctgcccaggagcaggactgcgtggtggtcatcacccgagaggtgccacatcagaccgcctccgacttcgtgcgggactcggcggccagccaccaggcggagcccgaggcgtacgagcggcgcgtgtgcttcctgcttctgcaactctgcaacgggctggagcacctgaaggagcacgggatcatccaccgggacctgtgcctggagaacctgctgctggtgcactgcaccctccaggccggccccgggc

SEQ ID NO: 1366 - DNA, 1562 bp, Homo sapiens
gcaaagcccctgagcccaaaacagtctcctactgcagcccgtccgtgcccgtgcactttaacatccagcaggactgcggccacttcgtcgcctcggtgccgtccagcatgctcagctcccccgacgcgcccaaggaccctgtgcctgccctgcccacacacccccctgcccaggagcaggactgcgtggtggtcatcacccgagaggtgccacatcagaccgcctccgacttcgtgcgggactcggcggccagccaccaggcggagcccgaggcgtacgagcggcgcgtgtgcttcctgcttctgcaactctgcaacgggctggagcacctgaaggagcacgggatcatccaccgggacctgtgcctggagaacctgctgctggtgcactgcaccctccaggccggccccgggcccgcccccgccccggctcccgcccccgccgccgccgcgcctccatgctcctctgccgccccgcctgctggtggcactctcagccccgcagccggccccgcctccccggaagggccccgggagaagcagctgccccggctcatcatcagcaactttttgaaggccaagcagaagccgggcggcaccccaaacctgcagcagaagaagagccaggcccggctggcccccgagatcgtgtctgcttcccagtaccgcaagttcgatgagttccagacaggcatcctcatctacgagctgctgcaccaacccaacccgttcgaggtgcgcgcccagctgcgggagagagactaccggcaggaggacctgccgccgctgcccgcgctgtccctctactcacccggcctgcagcagctggcacatctgctactggaggccgaccccatcaagcgtatccgcatcggcgaggccaagcgcgtgctgcagtgcctgctgtgggggcctcggcgcgagctggtgcagcagccgggcacctcggaggaggcgctgtgcggcacgctgcacaactggatcgacatgaagcgggccctgatgatgatgaagtttgcggagaaggcggtggatcgcaggcggggcgtggagctggaggactggctttgctgccagtacctggcgtctgcggagcccggggccctcttacagtcgctgaagctcctgcagcttctgtgagccaagccccagcctgcaccgtcgctgccccttccctgcctaaccctttcctgtctcgccttggaagcacccatgtctccctgggaaatggtacagatgactgggatacctggatgtaaaatatataaatatatatatagaaaatacatataccatatataaatatgaaagactaaggatgctgttgcccgtccacactcgtctcctctctgcactaagtcctccctgttttcttctgtaattatacacatttccagttccatgcaacgtcctgaggacagttctgtgaactgaatgcagcctggacactggcctcaataccttgtttaggatttcttcacccttttgtcaaattgttatttaaagaaaaaaaaaaaagaagaaaattccattaaaattttttttggttgagtcatgagcaaa

SEQ ID NO: 1367 - DNA, 323 bp, Homo sapiens
ggaggagcaaatattctgacaggggaatgcagtgccattagaaaataaggcccagcgtggtggctcatgcctgtaatcccagcaatttgggaggccaagacatgtcaatcacctaaggtcaggagcttgagaccagcctggccaacatggagaaaccctgtctctactaaaaatacaaaaattaggtgggtgtgcatgcctgtaatcccagctactcaggaggctgaagcaggagaatcacttgaacccaggaggtggaggttacggtgagccaagatcataccactgcattccagcttgggtaacaagagtgagactctatc

SEQ ID NO: 1368 - DNA, 323 bp, Homo sapiens
ggaggagcaaatattctgacaggggaatgcagtgccattagaaaataaggcccagcgtggtggctcatgcctgtaatcccagcaatttgggaggccaagacatgtcaatcacctaaggtcaggagcttgagaccagcctggccaacatggagaaaccctgtctctactaaaaatacaaaaattaggtgggtgtgcatgcctgtaatcccagctactcaggaggctgaagcaggagaatcacttgaacccaggaggtggaggttacggtgagccaagatcataccactgcactccagcttgggtaacaagagtgagactctatc

SEQ ID NO: 1369 - DNA, 13630 bp, Homo sapiens
  SITE (2408): n equals a,t,g, or c
  SITE (2615): n equals a,t,g, or c
  SITE (2616): n equals a,t,g, or c
  SITE (2635): n equals a,t,g, or c
  SITE (2636): n equals a,t,g, or c
  SITE (2639): n equals a,t,g, or c
  SITE (2642): n equals a,t,g, or c
  SITE (2643): n equals a,t,g, or c
  SITE (2649): n equals a,t,g, or c
  SITE (2650): n equals a,t,g, or c
  SITE (2652): n equals a,t,g, or c
  SITE (2653): n equals a,t,g, or c
  SITE (9943): n equals a,t,g, or c
cggttgcgctgcggagcgcagctgtgagggagtcgctgtgatccggggccccggaacccgagctggagctgaagcgcaggctgcggggcgcggagtcgggaggtgagcgcccagggaaaagagggcccgggagggaggggttcgcgagaggacggaaggatcggcctccctgggcccgggacggtgggacccgccagccgggtgctgaaggcgggccctgctcactcagtagcccaggcccgatcgggccctgcctgctggagccgaggggccgcttcggccccgccagtcgctgcttagccctccctggcgtctctggcttggcggcggcgccccgggattctgcgggcgcgggtcgggaggccctggcgttcgcttggaactccgcgctgcgaagaggcggggccccgccgggtgggggcggggccgggggcgtcggtcgcggcccggcggcctgcggaagctcggcggcctggcctggcctgctcgcggggaggtgcgcagactgcgcgggggcgtggcctgcgcccctgactgcgctgtcggtccggcctttgatgaggtggccgccgctggctccctgggccccagcctggttcccgcgcgggccgcggctgccttccagacgcagggcatgcgacctgttggagtgtgaaattctatgggccgggttcctccccagagcggttttatttccgactggactgtgctgcgggtctcagaggccctctggtccgttcagggtgaggacagctgagaggcctgggcccgtgagctcttgcagaggagttgacacgcagaggggctgctgtccaataaacgaaagtgtcggggaaaaactttgcagggcgatctgcattactccaaagtgaacacactgcatgtctcagggtggctggaggcggcgaggagaatccccttatgggagtatatgagcttttccatgtgttatctctttaaaacctctcagcggctccgagacaaaactcccagtgtcgcagaggtttcttcatcaataggagtagtgctggagaatcttgggcactgccctcattttgcctgcgaaggaaaaattaggaagggataaaaagtcacaaaaattaggaaggtgggggggataagcaaattccaagggcatctatctctgatgaagggttggtgtctcctgtggtgccctactgtggattagttatttgtgtcctcggtccagaagtttctctggagcccattggctacagctttcctgtattagaattctactgttatttcctactgtagtctggctgggaattttatttagttgttcagattttagatgcattcagtgaatgcagctgctcaaggaagtaactaatagtgtcttaccattttcttagctacttttcagaagaaggaacatgatctctaacagaagttttctggtagattactaaaacaggcagatagtagctttcctggctggctgagttaaatccctctccagcgatcctcccacttcagcctcctaagtagctgggattacaggcatgagccagcgcgcctggcaaatctctctagaataagtcaggatctagaaaataacatagggaaagaatatcttgccagatttcctctgtactgcctattgctctttggtatttactagactgtcttctaataaaaatctcctgagttgagttaaacgtagtgtagattgggggcagagatgggcacaaatgggcatcagagagttctaaaaataaatgtgggcttttcaaaagattggtgtgttgactggagacttctgaacttagaggagcacatttagtttccagggtatcagtttcttttccttttctttctatttttttttttttttcttttttttgagtcatagtctcactctgtcacccaggctggagtgcagtggcgccatctgggctcactgcaacctccgcctcctgagttcaagtgattctcgtgcttcagcctcttgaataagctggaattatagacgtgcgccaccacaccctgctaatttttgtatatttttgtatttttttgttgcccaggctggtctcgaactcttgagctcaagcaatctgcctgccaccatctcccaaagtgctgggattacaggcgtgggccagcttgcctggcccagggtatctctttcatactgtagagaactctcttgagctgagcacacacaggttccaactccttcacagtctttattcttagagatatgaaataacattaagtggttgtcttgtgactttttgtacaagttaatggcatttagctctcaataattctttttcttcaagtacccatgaccctgaaaatgttatgctgtataatactttttcctataaaagttgtaccttgagttatttatacttgtaagaaataacctaggctgggtngtggtggctcacgcctgtaatcccagcactttgggaggctgaggcgggcggatcatgaagtcaggagattgaaaccatcctggctaacacggtgaaaccccatctctactaaaaatacaaaaaattagctgggtgtggtggcacgtgcccgtagtcccagctactcgggaggctgaggcagaaaaatggcttgaacctggcaggcgnnggtgggagttattttaganngcnccnngggggnncnngcctgccccccagagtgagactccatcccctctgccaaaaaataaataacctatatcagatctagtcccccagagaatggaaacttcagagcctttgagcaatgtgaatgaaatgaaagctggaagcttaaagtcttagctctggcttgaatttgtggctgcttgaatgtgggcatttattttgtttgttattgtatctcaaggacttagcccagtgcttggcccacaataaatgcttaataaaacatctgttaaatgagtgaatgaaaaaaaaaatgttgttaaccaatacccatttgtcacactcacatcacaggaaaggtgaggtcatcagggatgaagtcactaacaactgccagtcatgtgccccaagggtagcctcaccatggactagtgggcttgttctgtgtagagaagggatggatagtgaatgccaaggttagttctagctggataaattagccaagggtttcagctggataagttggctgagggtgctacaggtctagccttaaggctgtctcactgaaacattttggagtctggagtcatctgttctgaatagcgcccacatagtttatatttttttattttttgagacagagtctcactctgttgcccaagctggagtgcagtggcacgatctcagctcactgcaacctctgcctcccgggttcaagtgattctcctgcctcagcctcctgagtagctgggactacaggtgcgtgccaccacacccagctaatttttttatttttagtagagacagggttttgccatgttggtcaggctggtctcgaactcctgacctcaggtaatccacctacctcggcctcccaaagtgttgggattaaaggcgtgagccactgtgcccgtccacacatagcttaattcttgagcacagtaaaaatagggtgtacttggggattcaaagggaagcctattggatgagtatttgccaagaaggaatggagcacctgatcttgctggtgatttgaaccttactctaagtgggattagactgccataaatcttgtgtttgtcattcctgggagggtcatcttcaactaagatagctccccttttctagactagagttaggagaatagttaatgtttcagtatttaggactgattctgattttggatttaaaggaaacaaaggtggtgtgtgttttctatttttaatttttaaaagttttgtgtagagactggggtctttttatgttgtccaggctggtctcaaatgcctggcctgttttattttcttttgaatttgcagataagtattaggattattaaatctttttttttgtttgtttgttttttgttgagacagggtctccctctgttgcctagccaatggcatgatcatagctcactgcagcctcaaactcctgggcaatcaagtgattctcccatcagcctctcgggtagctgggactatagctgtgtaccaccttgccctgctaatttttaaatttttttgtaaagatggggtctcactttgttgcccaggctggtctcaaacacctggcctcaaatgaacctcttgcctcggcttctcaaagtgctgggattacagaggtgagccactgtgctcagctggattactaaatttttttttgagatggggtcttgctctgtcacccaggctggagtgcagtggcgtgatctcagctcactgcaacctccacctccctggttcaaaaaaattctcctgccttagtctcctgagtagctaggactacaggcacgcgtcaccacacccagctaattttgtatttttagtagagatggggtttcaccatgttgatcaggctggtcttgaactcctgacctcaggtgatctgcccacctcagcctcccaaagtgctgggattacaggcatgagccaccgcgtccagcctggattactaaatctttacagatgtatcctgactttctctgccttttccctctgtatttgccccaaccagtgcaggcctgagtgttccttccagcatgtcggagggggagtcccagacagtacttagcagtggctcagacccaaaggtagaatcctcatcttcagctcctggcctgacatcagtgtcacctcctgtgacctccacaacctcagctgcttccccagaggaagaagaagaaagtgaagatgagtctgagattttggaagagtcgccctgtgggcgctggcagaagaggcgagaagaggtaaggttatggtacagttactcttgggtgagtgaattctggaaaggtgagaactggaagagcaaagtcttaaaagaggccaaccaaacttcaataggttgggggctaggaggagatgatcatatggagtgttaaaatggaggatttgtgagataagtttaattctctttcatatgaatttcttctcaggtgaatcaacggaatgtaccaggtattgacagtgcatacctggccatggatacagaggaaggtgtagaggttgtgtggaatgaggtacagttctctgaacgcaagaactacaagctgcaggaggtaggtgatgctgaaaaggtgaagcctggggaatgttggaacactgatgttagagaggaattggtgttgggaagctgcccgtgaggagagtatgttggggttagatcgtttctggggagggatagggaatggcttctcaggattattacagtgatttgtgaactctgttattccactgtctcccttgctttcaggaaaaggttcgtgctgtgtttgataatctgattcaattggagcatcttaacattgttaagtttcacaaatattgggctgacattaaagagaacaaggccagggtaagaattttttccccatatttcctgaacttattgcaaagagactagctacatttattattgttccttttacactcagagattaaaacaaggtagttttgaaacagaactggaatcagctgcaatggcgataagagtagggcttcagttgtcacctatgccttttgtgtggctatagattgggcagaaaatgagtgaacttttgcttccttcttcccataactttcattgcttgttttcattgccctatttagtctaagtaagtaaagctaagaacaaaaggagagaaattttaacaaaccttcaaatttaaaatatgttaacaagggaagggatcatttctactataaggccttttagtaagtgctttgcctccccaggtcatttttatcacagaatacatgtcatctgggagtctgaagcaatttctgaagaagaccaaaaagaaccacaagacgatgaatgaaaaggtatagaaggagagcagacaaagtttgaggctggtttttgggggtggttttaaaaaggactctgttaataatgaagctgatcaggaagggacggaaggagctagtgggagagagttaagagagggaattactgctgacccttggatccaactttgttccaggcatggaagcgttggtgcacacaaatcctctctgccctaaggtaagtagtacctggttagtttcttacccatatttcctgatgtagttactccaaacagatttcagggcactactcttctgttctattctgcctctccccactttctttgaatcatatactgtcaagattagggcccctacgggtcttttaaagggtgcgtcctaatgccctaaccacgacacttatctcctacctctttctcctagtgcttatccagctatttaaatcatcaggcataatggagattcagagtgtggggattatctttatggtgaccagcaggagacctggcccttgctcctcttaacccttgggttccccctgcccttaatttcccagtggcccctctaacagcccagtgcccccacagctacctgcactcctgtgacccccccatcatccatgggaacctgacctgtgacaccatcttcatccagcacaacggactcatcaagattggctctggtgaggggagggagaggttctgggcaggggagcctcgggaatttgggaaccatgggggtaagatgaaaggaatgggggataacagagcaaaattctgaggtgtgggctggtgagaagagaaaggaccttgctaggagtaattaataggagaggccagttaattagtggagagggggtaggatatataatcttacacctttttgaagggaaaattggggttaatacagagatactgataagaggctgggaaagggcaagagataggtttgaggtttgatttgagtcctggggccagaccctgccagaggaggttccaggctgttcctgctgtgagtgctttcgtttgctgtgtattgtatgcagtgtacaacatttctgtgtgctgtgtctgtgtggtatttgtgtgtccatttgtctggggcttggctgctccatcgctcacaacttttctctgttttcctccctcccgcttacgggctgctctgttcccaacagtctttcataggatttttgctaatggtgagagctccctctgccccacttggggctctgtttgtgctccctctgctcccttggcggctgcccagtgcatgcagtcgtgggagcaaaccctcttcccctatcttccctgcctaattatgcctgcttagcttctgccctgccagccctccgcctgcttgccccttcataacctgcttgtttcctgtggattctgcctggctggccacttacctcctggattcatgttctccctcatcatcaggctagttcccagatcatactgtgctcccagattctctgtgacttgtagtcattgtttatgatctgagtgagtccaaattgggcctggtcctggttcctcgttcagctctgtggcagacagtgttgaggaataagggggtagaacaggagtctaaaatgttttggtggattaaaagtggaacagattcaagggtattagctcaattctgagctgttttgagtttcactcagcaaaggtgggtaagaaggaggctacctcctgagctgtatgttaatacttcttatccttatttatccaagttcctgaggtctccaattgtcccagattaggaagggctgcctgtgtttttatgttatttgcagggtggatgaaaaaactaaaaccaaatattttcatgtgagcagggattagaggtacctgggatttagggaaggtgaacgcagtacaagtgaaaatttttccttaaacttcattgcttctagaccagcctgaagcccctgtgtatctgttaatttagtctggtgcttttgttgctcctgatttagggacattagatgagaagcagtaggcctaagaaaggggaggtaggtggcatccatgtgtggtctgtagttcaggacaggaaagggaatacgtttgtgcctgttgagggtcatcagaaaggagacttcaggagagaatttggcttttggggcctctctctggagtgagactattcttcattgatgatggtcagattgtgggtgtctcccctactcccagtggctcctgacactatcaacaatcatgtgaagacttgtcgagaagagcagaagaatctacacttctttgcaccagagtatggaggtgagccttcctgctttctctgccctgtcctcatccccctgcttttgcaccttataacttgaggtacagaggcaatataactgaaacttctaggccttctctaccagcatacaaaatatttttcttttcttttttttttttcctaaggcattcctgccaaccctagcccccaatcctctgattaaccaaagccttctctgttttccctagaagtcactaatgtgacaacagcagtggacatctactcctttggcatgtgtgcactggaggtgaggggactggaggggaggggggaaaggggtcagatgagaagatggaattgggaatggagggaagacaagtaaggcgctggcttggagggagtgattgtgggagcactgaagttcttaggtgtctacttttttttttattcttcctcactgaagatggcagtgctggagattcagggcaatggagagtcctcatatgtgccacaggaagccatcagcagtgccatccagcttctagaagacccattacagagggtaaggatcttcaggatcactccctcctcaactgaccttcaaatgtcttctggtttttcttcctttgtacccactgggtatatgctcctaagagctagggaacataacagaaaggacacgaaaaatctataaacattttcttaggaggtgcctaccatgtttttgcatagaaacacacaggtaagggggttaagatggatgatgctggggttaaaagttgtgtgttggaagccgggcatggtggctcacgcctgtaatcccagcactttgggaggccgaggcgggcggatcacgaggtcaggggatcgagaccatcctggctaacatggtgaaaccctgtctctactaaaaatacaaaaaaaattagccaggcttggtggcgggagcctgtagtcccagctactcaggaggctgaggcaggagaatggcatgaacccgggaggcaaagcttgcagtgagctgagatcgcgccactgcactccagcctgggcgacacaggtagactccgtctcagaaaaaaagaaaaaaaaaaaagttgtgtgttggctgggtgcagtggctcacacctgtaatcccagcactttgagaggctgaggcgggtggatcacttgaggtcaggagtttgagaccagcctggccaacatggtgaaaccctgtctctactaaaaatacaaaaattagctgggcatggtggtgtgtgcctgtagtctcacctactcgggaggctgaggcaagcttgaacccgggaggcggagattgcagtgagctgagattgggccactgcactccagccggggcaagagagcgagactgtctcaaaaaaaaaaaaaaaagtatgttaatttgaatgtgtctacatggaggtaaattaatttgatggttacttcaggccattgctgtatactctcagacagccatttttatatttttaagcacatcagtcaatttaaattaaaccagttgtttgggattttatatttatacagttttagttagggacggtggcctgaaataatgagctaagatttaaaagacataaggttatgaatcagttgatagactatagtaagcagagcctgggcaggaaggtccaaacaagaacagtttgtaactcattagataagtatagtagggaacaggagagaaaagaagactagtgggaagtcaggaggatagtgtggagtaagtttctacttcancattgaggtgcagtataaaagtgaaagattaggtatgtgaccttgttagccttcaaggttaaaagcaggaaagcaggttaattgtcatgggacatgcaggaggtagaaaaggaggcggtggtggaacatggtggctcatacttttaatcccagcacttttgttttctgaggtcggaggatcacttgagctcaggagttcgagactagcttgggcaaggtggtaaaaccctatctgtatgaaaaaataaaaattatctgggtatggtggcacatgcctgtggtcccagctactttggaagctgaagtgggaggattgcttgaccccaggaggttgaggcagcagtgagctgtgattgtgccactgtactccagcctggttggcacagcaagaccctgtctcagaaaaaagaaggaaagaaattagggcagaattgttagaggaatcctgggaaattcggtgaattcagtgattgtgggcaaaggaaattgtgatactaggcttgtgaaataaaaaaatggtgaatattgatcacattgggtaagtttgggaagagagaagctaaatttggcaagatttagaaaagaagataggcagtgagttgactaataaagcagagaggtagaaactaaggaaaaagaaagtgtggggccgggcgcggtgtctcatgcctgtaataccggcactttgggaggctgaggcgggtggatcacgaggtcaggagattgagaccatcctggctaacatggtgaaaccgtctctactgaaaatacaaaaaattagccgggcatggtggtgggcacctgtagtcccagctactcgggaggctgaggcaggagaatggcgtgaacccggtaggcagaggttgcagtgagctgagattgcgccactgcactccagcctgggcgacagagcgagactccgtctcaaaaaaaaaaaaaaaaaaattgtgaacattaaaaaagaaagcttgtggttggagagcagaaaaataattaaaaccagaaaggcagtggatggtatctttcatataatatcttacagtttttgaagccctttcaggtgcatttttcaatatattgttttctcagcaagtgctgagcacctactatgtacaaagccttgtgctaagtagaatgagagctataaagatgaacacactgggggcttgccagatgcctgctccagttccttgtttccttttctaggagttcattcaaaagtgcctgcagtctgagcctgctcgcagaccaacagccagagaacttctgttccacccagcattgtttgaagtgccctcgctcaaactccttgcggcccactgcattgtgggacaccaacgtgagtcgtcttggccctatggggaatagtcttccaatctggagccctgtaactatcactggcatgcttgttttcctctttatttccaaagggattctttttttttttttttttttttgagagatagtctcactctgtcacctaggctggagtgcagtggcactatctcagctcactgaaacctccacctcccaggctcaagcgattcttgtgccttagcctcccgaagagctgggattacaggcatgtgccaccatgcctgggtaatttttgtacttttagtagagatggggtttcgccatgttggccaggctggtcttgaactggcgtcaagtgatctgtccgcctcggcttcccaaagtgctgggattacaggcatgagccactgtgccaggcctccaaagggattctttacccctttgcctgcatgccttctatgacatttaatctgactatcccttcataatatcccactccatcatgccctccagacatgatcccagagaacgctctagaggagatcaccaaaaacatggatactagtgccgtactggctgaaatccctgcaggaccaggaagagaaccagttcagactttgtgagtaactgagagggtctgaaaggggcagattggtcactaccactcttgaggctctgtaaactgtccattctctgggaatgcttgaatttgctattttgcttgtttctttccttccatctcctttctcttttctcgtccaggtactctcagtcaccagctctggaattagataaattccttgaagatgtcaggtgagagcagagtgagaagcaggctttcttgaggaagcaggcggggttgggtatcctaaggcgttcacagagcccatgtgacctgtcttcatctccctccaggaatgggatctatcctctgacagcctttgggctgcctcggccccagcagccacagcaggaggaggtgacatcacctgtcgtgcccccctctgtcaagactccgacacctgaaccagctgaggtggagactcgcaaggtgggggctgtgtgggtgtggattgtctccatggttgtggtggaagggagagaggacatctcaaataaggctctatcctttagagaaaatgctccctagcagccatgccctatgggctcgaaagacgtctaggtattgggttttttatggacaggtctctagagtgaccctctcttccctccctaggtggtgctgatgcagtgcaacattgagtcggtggaggagggagtcaaacaccacgtaaggctcagggctagggttgcgcagggctagtagccagagggtagggaagaaaagtctcattttctgactgtcctattctccagctgacacttctgctgaagttggaggacaaactgaaccggcacctgagctgtgacctgatgccaagtgagtctctcctttccctcagaggatggagagtctatgagccttatcttttagggacatattcaggggtgggggaggtgacaaggcagtaacacattgactcacatagaatgactatcttagaccctaaagcagtgggtggatctgactgacagtttagccctagtggggctgtctgaagggccccaggtccctcagtcccgtactgtactcaccccctcctgtttctttgtcagatgagaatatccccgagttggcggctgagctggtgcagctgggcttcattagtgaggtgaggtttctgccttcatctgccctggctgcccccatgccttctcttctctcagcccccatcttactgagctcttctcccccaggctgaccagagccggttgacttctctgctagaagagaccttgaacaagttcaattttgccaggaacagtaccctcaactcagccgctgtcaccgtctcctcttagagctcactcgggccaggccctgatctgcgctgtggctgtccctggacgtgctgcagccctcctgtcccttccccccagtcagtattaccctgtgaagccccttctctcctttattattcaggagggctgggggggctccctggttctgagcatcatcctttcccctcccctctcttcctcccctctgcactttgtttacttgttttgcacagacgtgggcctgggccttctcagcagccgccttctagttgggggctagtcgctgatctgccggctcccgcccagcctgtgtggaaaggaggcccacgggcactaggggagccgaattctacaatcccgctggggcggccggggcgggagagaaaggtggtgctgcagtggtggccctggggggccattcgattcgcctcagttgctgctgtaataaaagtctactttttgctaaaa

SEQ ID NO: 1370 - DNA, 428 bp, Homo sapiens
ttttgtatttttagtagagacggagttttactacattgagcaggctggtctcgaactcctgacctcaagtgatccgcccacctcggcctcccaaagtgctgggcgtgagccaccgcgcccggccgaaagattggttttaaaaacgagtattttgagatgatgagaaaacgagagggtttctgccagttgtcctttctcccagtgaaacaggattagagattctctttaatgacagtaaaatttggtgattgtgacatttccaagttctgttgattgattcatcatcttccctccatcatacacgtctaagggcagagtgaacttccatcctgaaggctccgcgcttagttttcgcagattaatagctcaccaagaatttatcatcttttctttccactaactcgaaaccaatctaaattctttccaaa

SEQ ID NO: 1371 - DNA, 1922 bp, Homo sapiens
caggtacagcggccctgcggctggcgcggcggacgggatgaggcgctgcagtctctgcgctttcggtaacttccgggccctggcgtctcgtctccttaccctggggctacccttgcccggtcctactgcccgcggttaacccgccgcgagccgcctctcccctccccgcccgactcaaccctgccctcccccgtgctttgcagacgccgcccgggggcccaggcggctgatgcgtgtgggcctcgcgctgatcttggtgggccacgtgaacctgctgctgggggccgtgctgcatggcaccgtcctgcggcacgtggccaatccccgcggcgctgtcacgccggagtacaccgtagccaatgtcatctctgtcggctcggggctgctggtgagcgcggcaggcgacccgggcgggggccgggctcccggagagcccagcaggccaaaggctttgtgtcttccacagagcgtttccgtgggacttgtggccctcctggcgtccaggaaccttcttcgccctccactggtgagagggacttccctggagcttttaacgagtaggcttgagtcagggaaatgggggctgactgagcttggtctttcaatagattggaggagcctcagagaaactgggtgtctagtcactgggagagttagccaggcccaggctgctcaccctgatctcctgtccctgccagcactgggtcctgctggcactagctctggtgaacctgctcttgtccgttgcctgctccctgggcctcctccttgctgtgtcactcactgtggccaacggtggccgccgccttattgctgactgccacccaggactgctggatcctctggtaccactggatgaggggccgggacatactgactgcccctttgaccccacaagaatctatgtgagcacattctcttccttcttgtggtctacaaagccttggtcctgcccttttaatttcccctatttgctgcacttgccctactccctcctactccccatccttcttgcttttcaggatacagccttggctctctggatcccttctttgctcatgtctgcaggggaggctgctctatctggttactgctgtgtggctgcactcactctacgtggagttgggccctgcaggaaggacggacttcaggggcaggtaaggaaggcaaacaggaagggttcattccacagagactggctgtgttgaaaagatgctgaccggccgggtgcggaggctcacacctgtaatcccagcactttgggaggctgaggcaggcggatcacttgaggtcaggagtttgagaccagcttggacaacatggtgaaacctcgtctctactaaaaatacaaaaaattaggtggggtggtgggcgcctgtaatcccagctacttggaaggctgaggcaggagaatcgcttgaacccggaaggcggaggttgcagtgaaccgagatcacgccactgcactccagcctgggcaacagagtgaggctccgtcacaaaaaacaaaacaaaaaaaagatgctgacctatcattcagggcgagggtgtctaactctatcttcttctgcagctagaggaaatgacagagcttgaatctcctaaatgtaaaaggcaggaaaatgagcagctactggatcaaaatcaagaaatccgggcatcacagagaagttgggtttaggacaggtaatgggccttgaaggtggtggcccgggtaagagcggggacaaggaagtgctcttagaactgggtctaggtcttgccatgctgctttcccctctgacctgggttggttctcccctctgtccagcaggtgctgttccgagactcagtcctaaagggttttttttcccactaagcaaggggccctgacctcgggatgagataacaaattgtaataaagtaacttctcttttcttcta

SEQ ID NO: 1372 - DNA, 4087 bp, Homo sapiens
cagggatactcctttgtggcaccctccattctctttgaccacaacaacgcggtgatgaccgatgggctggaagcgcctggtgctggagaccggccaggtcgggcagcggtggccaggagcgctatgatgcaggtgggctgggctgggctgggttggggggaaattggttttaggagaggcctaggcccggggactctaggcctagatccaactggcgcccgcagcgtgagctcagcaaggtcctaagcctctccgacatggggcgtggcggggccgcggggctaccaggtgggacctctgacgcgccgccttcgccttcgccttcgccttcgcctccaggactcgcccttcttccagcagtacgagctggacctgcgggagcctgcgctgggccagggcagcttttctgtgtgtcgccgctgccgccagcgccagagcggccaggagttcgcagtcaagatcctcagtcgcaggtgggagggcccaggcgcgggcaggggtgggggtggcagagcgctgtcccgggggcggggccgaagcgcggcgaccgtaactccttctgctccgtcccccaggctggaggcgaacacgcagcgcgaagtggctgccctgcgcctgtgccagtcacaccccaacgtggtgaatctgcacgaggtgcatcacgaccaggtgatggcttccggccaggggagggcggagagaaaaggggcaggcggcggggcttgggggcactatgggcgggatctaggggtgaattgggcggggcctagcgtttgattcggggcccaaagggaccagggaggcgcagggagtggaatttgaggggagtagggcctgaggacgggaaggcggagctgaggatggacaagaaaagggactttggccgggcgcgatggctcacgcctgtgatcccagcactttgggaggtcgaggtgggcggatcacttgaagtcgggagttcgagaccagcctgggaacatggcgaaaccccgtctctacgaaaaatacaaaaattagccggacgcggtggcgtgcgcctgtaatcccagctacttgggaggctgaggcacgagaatcgcttgaacccggaaggcagaggttgcagtgagccgaggtggtgccactgcattccagcctgggcgacaaagcgagactgtctccaaaaaagtaacaaagaaagaaagaaagaaaaaggactttgaggagggggttctcgaacattggcagggcccgaaggccgggggcggggcctgggtggtgggagggggcttgccgccgtgggtgggtgttgaccttggcccgccacgccgcccgcagctgcacacgtacctggtcctggagctgctgcggggcggggagctgctggagcacatccgcaagaagcggcacttcagcgagtcggaagcaagccagatcctgcgcagcctcgtgtcggccgtgagcttcatgcacgaggaggcgggcgtggtgcaccgcgacctcaagccggaggtgggcgagctgcctcggcggcggggcggagcggtggcgccgggggctgcctctgaccactaccccgccgccctcgcagaacatcctgtacgccgacgacacgcccggggccccggtgaaaatcatcgacttcgggttcgcgcggttgcggccgcagagtcccggggtgcccatgcagacgccctgcttcacgctgcagtacgctgcccccgagctgctggcgcagcagggctacgacgagtcctgcgacctctggagcctgggcgtcattctggtatgggacgcggtccttgaggcggggtcagggtcgctcggacctggcgtcttcctgatgtgcagcagcacgagggaggggacaggggtcatcttggtgggggcggctgggtttcgtccgaagctgggatcggggtggttcaaatacagaggtggggtcgctctggtgctagagtcggagcatccgggtattgggggttagaagtcagggttcaccacgcgtgggtctcaggagtgcccctagtggggagggtgagtggttctgtgggagcggaggggtcagcctcggcaccccagcctgggccggcctcaccttcccctcaccctcctagtacatgatgctgtcggggcaggtccccttccagggggcctctggccagggcgggcagagccaggcggccgagatcatgtgcaaaatccgcgaggggcgcttctcccttgacggggaggcctggcagggtgtatccgaggaagccaaggagctggtccgaggtgcggagctggaggtcatagaccatggttggggagggggacgctgggacagggatggtcactgggccaggtgtcctggttggggatgggtaggggaggagagtggggctgttacgatctctttggggctcagcctttacgccaggctcctccccacacttccttgccccgcctccagggctcctgaccgtggaccccgccaagcggctgaagctcgagggactgcggggcagctcgtggctgcaggacggcagcgcgcgctcctcgcccccgctccggacgcccgacgtgctcgagtcctctgggcccgcagtgcgctcgggtctcaacgccaccttcatggtaaggggcagggtctgttgaagggaaggggtgggcgaagcctcgagaggtggggtctggggaggcccggccatcggagcacagaaaggcgaggtgaggccgggcgcggtggctcacgcctgtaatcccagcgctttgggaggccgaggcgggcggatcacgaggtcaggggttcgagaccagcctgaacaacatggtgaaaccccgtctcttctaaaaagagaaaaattagccgggtgtggtggcgcgcgcctgtaatcccagctactcaggaggctgaggcaggagaatctcttgaacccaggaggcggaggttgcagtgagctgagattgcaccactgcactccagcctgggcgacagagggagactccgtcaaaaaaaaaaaaaaaaaaaaaaaaagggaggtgaaccgaatccggtggtcggtctggaggccaaggccctgtcggccttgacctaggcggctggaggcaaggtctgggaatggaggtcaaactagatctggaagccggggtcaggcgggggtgggggcactcaccctttcctttctgccaggcattcaaccggggcaagcgggagggcttcttcctgaagagcgtggagaatgcacccctggccaagcggcggaagcagaagctgcggagcgccaccgcctcccgccggggctcccctgcaccagccaacccgggccgagcccccgtcgcctccaaaggggccccccgccgagccaacggccccctgcccccctcctaatccccaccactgtgacccccttccctcataggggctgtgacctgggagcccggctcactcccggaggcctctgcctgcggctgacctgatccccaagggactgtcctttcctctcctaccccaccccactcccagacagagcagaagtatttttataagcagagaattttttatgtcttaccagatagagttgcagggaagggggggcctgctggggagtggggtttggggggccctctcccaggacactgcctcttctgggcagaaggcccctccagggggactgctccaacaggaaagagcccctcccccacttctaagcactgagttaggagtgctaactcctaaactgggaccccctaccctgttctcccctgaggccccgttcctgggaggggcacccctcaactgtcactttatggactgtctgtgcaattacgtccaccaaagacccgtgttgggggtactgaaggagaggccctgggggaccctctgaagcatttctgcctcactttatgtcatctgcttctcccctgttggggctaaggaaggagataggtggctcctaaaagaggaggccatcttctcacccaccccttcctctttggcacagctactcctggctgggggtggggccttgggggtctgggctgggcatccatggtcactgcctcagcccagccaggctgtgcctttgactttaaaataaaagtccacccagtgctgtgtgtggca

SEQ ID NO: 1373 - DNA, 184 bp, Homo sapiens
agtttcgctcttgttgcccaggctagagtgcaatggcatgatatcggctcaccgcaacctctgcctcccgggttcaagcgattctcgtgcctcagcctcccgagtagctgggattacaggcatgtgccaccacgcctggctaatttttgtattattagtagagatggggtttctccatgttggt

SEQ ID NO: 1374 - DNA, 5781 bp, Homo sapiens
caaaatccgtcagtttaatatgaccctcattagaaataagcatattgtccggtttcaagtccctgcacacacaaaaggcaaatattagataaccaaaaaagggctagttttaatgttagaatttccagaaaaaaagagttacaaaggaggcaaaccctatttatttcctccaaaataaagatactcattgatggctttgaaaagtacagaaaacatctctcaaaagcaaaacatctttcgtactgtttatcagaatctacaaaaaagataaattaatactagattatctttggtatcattggttagatattccattaaaataaagaaaccttattagataaaatcaacctcaagccagttcaaatttacatttactttcttttttttcttttctttttttttttgagatggagtttcactcttgtcacccaggctggagtgcaatggcacaatctcggctcactgcaacctccgccttccgggttcaagcagttctcctgtctcagcctcccgagtagctgggattacaggcacccaccaccacactcggctaatttttgtatttttagcagagacagggtttcaccatgttgtccactctggtctcaaactcccgacctcaggtgatccgcccgcctcagcctcccaaagtgctggaattataggtatgagccaccacacctggcctacatttaccttcttaaaggaaggtaagattgagatttaataagtcacttaatctgactttctttgcatagagaaaaacattgtaaatcagttggactacaaaatataccacttttgtataatgcagaggagcggaaaggattcaatactcttcacataaaatgccatacttaatgggccgtggtagctcatgcctgtaatcgtagcattttgggaggctgaggtgggaggatcccttgggcccaggagttaaagagcagcctgggaaccttgtctctacaaaaaaaaaaaaaaaaaaaaaaaaaaaaagccaagagtaatggcacacacctctactcccagacacttgggaggctaaggcagggggattgcttgagccccagaggtcgaggctgcagtgagccaaggtcaagtcactgcactgcacaacctggatgacaaagtgagaccctgtctcaacaaagaaaaaaataaataaatatgtaaatacaaaaataaataaatacatgctatactcatgttcaaagcaatatattttaaaaaacacagggagatgaaagaagagttaatttctaaatgaatacaagttactagtaaactttagataacctggaaataagtgcaagtggttactgtgaatatctgagactcaaatatgtaatttgattacttgaatttttaagtaataatttggagaagtcagtctttacctgtggatgattccatgtctgtgaaggtagtctagagccagtgctacttcagaaatatatttcacagccatctcttcatcaaaataaccatatatatgtaggagagacttgacatctcccccaataagatattccattacctttcaaaaaagaatttaatattgtgaaataaaaacaatatgattactttaaaaatctagtatttgggcattacagttacaatatttggcatggctctgtaatgaaacgaccttttcttgctattactcgtaatacattaatactaggtttattcatgttgccataacagtttttaattaaaaattaaactgtttaggctgggcacagtgactcacgcctataatctcagcactttgggaggccaagatgggcagatcacttgaggccaggagttcgagactagcctggccaacatagcaaaaccccgtccctactaaaattacaaaaaattagctgggcctggtggcagctaatttatacaaaaaattagctgggcctgtaatctcagctacttgggaggttgaggcacaagaattgcttgaacccaggaggtgcagagtggccaagattgcaccactgcagtctagcctgggcaacagagggagactctatctcaggctggggtgcaattatgtgcaatggtatctctattagctagctgcataccaccatgcccagctaatttttactttaatttttttgtagagatggagtctccttatgttccccaagttggtcttgaactcttggcctcaagtgatctttctgtctcagcctctcgaagtgcttgaattacaggtgtgagccatggccccttggcctgtctctctatgtacatatacatacacatacacacgcaccgtatgcatatatcttattggttctttttctttggagaactctaactaatataacaggtaaatttgccaaggcagtgagtgcagccagaattcaaatgcaagcactctgaaccaaaacatggttctcttaaatcactaggttcaatgactgcttaatggataaagaaacaacataaaaattatttactcaccaagtagacattgtttgcagactgcagtgaataatacaaatggacaatgaatgggcttttgcttagtgccagtgcatctctctcagcttggacctgatgagtcatatttttgttgatcatgtctgcttttttaacaacctgtaatagataaaataaaagtgatatcatgttattttattttgagacagagtctcattctcttgcccaggctgagtgcagtggcatgatcaaagcttattgcagccttgatttcctaggctcaagttatcctcccacctcagcctcccaagtagctgggactactggcacacatgactacatctggctactttttaattttgttgtagagacaaggtctcactacgttgcccaggctggcccaaaatgagcctcaagcaatacccctgtcaaagtgctgggattacacgtggaagccacagctccctgccttgtttttaaattacagagtgatctcaggtttcaaagttgccatcatgaaaacgctaacagagagaacacatatagatgtcatgtggaccttacactgctatcaggaaagcacgtacaaaaaatagttaagacggtttaaaaaaatcttcaagatagaattgcttatcttggtattaaatggcagaagtatcataatctctttcaagaaggaaaaaaaattaaatattcccagactgccctgcatattaatagaaaaaaaattctgttccactgttctgataacgaagtcaaaagacagttacattcctcataagcccacagataactagcacctgggcgtggagtaactacttaatttttttttttaacttctgattttttgatagatggggatagaatcagaaagaggaagaatgtcggaagtttgcctagaaaaaaaaaatcttaagttggaatgattagaactactgaaatttaacagtcccaaatgctgtcttacagaaaactaattactcttttcaagtttcaaggtaatctgtacagaaacagaactattaaagttggagcactaagaaaaattaaaaatacataaataaataaataaaaataaagttggagcactaaactgaatagtcagtaacactgggatcaattctcaggactgctataagaaaaaaaggcatatttctttcaaagatttattcgagtacttaataaaatcattagtacatgataaattcctgccttaactcctttctttaagaaaactgagggaaactgacaaagcaagctggtaacatgatttttcctatcattccactggctatgagggcatgtgtgttttgttccccattgttgtccagttcgtagacacaaagagggtgggtgctaagcaaatactgactgaacacatggattggtgttttcatttcaactgatcatgactaagtactgtagaaggaaaagtaaaaatctcaggaacatataaagtaaccaattcaatcagatcttccaattctgaaagattagggaaggtgtgaaggggagctaagatgaatcttaatacatgaataagacaggtggagaagagcacaaaagggtagaagaaaagcacttaaaaaggaaccagcataaggccaggcacggtggctcacccctgtaatcccagcactttgggaggctgaggcgggcagatcacctgagctcaggagtttgagaccagcctgcccaaaatggtgaaaccccgtctctactaaaaatacaaaaaattagcccggtgtggtggcgggaatcccatctactcgggaggctgaggcaggagactcgcttgaacccggaaagtggaggttgcagtgagctgagatcacgtctctgtgaaactctatctcaaaaaaaaaaaaaaaaaaattcatagcagggcagggcgcggtggctcacacctgtaatcccagcactctgggagcccgatgtgggcgggtcacctgaggtcaggagctccagaccagcctggccaacataaccaaaacaacctggctaaattcaatctcggctaaaaaaaaaactacacaaatcagccaggcatggtggcgcgcgcctgtaatcccagctactcgggaggctgagacaggagaatcgcttgaacccaggaggcagaggctgcagggagccgagactgcaccacagcactccagcctgggcgacagagaaagactgtcttaaaaaaaaattattaaagacttctcagaaaatagtaatctttcttctggttaagaataaaacttaaaaaggtatcagtgcctacagattaatcactcttctgtggtagaaaaatttcgacgattctgcacgtcaaagcaaacaaggtaaacaaaaccactaattactaaaaaccttttggatttagaaacctaactcgccgggcgcggtggctcacgccagtaatcccagcactttgggaggccgaggcgggcggaatacgaggtcagggaatcgagaccatcctggctaacacggtgaaaccccgtctctactaaagaaaccccgtctctactaaaaatacaaaaaatcagccgggcgtggtgacgggcgcttgtagtcccagctcgtcgggaggccgaggcaggggaatggcgtgaacccggggggcggagcttgcagtgagtcgagattgcgccactgcactccagcctgggaaacagagcaagactccgcctcaaaaaaaaataaaaaagaaacctaactcaagccagggtgagactacgaatcacggctttggctttaagtgcctgttgtactaagaccgatgtaatcacctcggtcaagtccctttgcctttggcctcagtttcctcatttgctaacgctgggcagggagaagagagtcaaactttgctgttctcactgggcatctgagatatggagggaagggcggaacagaggcgagacacccgacccgaccgctgatgtcgccccaaaaagaagtcagctcgcagggctctggaggcttcagcaagccaggccacccagactcctcgctccagcaaccccggggcctgcccaagccggtggggcaggaaggagggccgaagggcctaaccccttccttgctactcgttgacttcctacctttactgcatacaatttgccgcctttctgccccagatacactttcccgaaggcgccccggctaatgggcttcactatgctgaattcctcaatggagggcggttttggcactgcgatcctattcacgccctcctcagtcgccgcgcctcctccaggctccttcttgcttcccgcggtgggatccatcgctggacagcatacagcggccccgcagacactgcccctccgcgagcagcca

SEQ ID NO: 1375 - DNA, 5782 bp, Homo sapiens
tggctgctcgcggaggggcagtgtctgcggggccgctgtatgctgtccagcgatggatcccaccgcgggaagcaagaaggagcctggaggaggcgcggcgactgaggagggcgtgaataggatcgcagtgccaaaaccgccctccattgaggaattcagcatagtgaagcccattagccggggcgccttcgggaaagtgtatctggggcagaaaggcggcaaattgtatgcagtaaaggtaggaagtcaacgagtagcaaggaaggggttaggcccttcggccctccttcctgccccaccggcttgggcaggccccggggttgctggagcgaggagtctgggtggcctggcttgctgaagcctccagagccctgcgagctgacttctttttggggcgacatcagcggtcgggtcgggtgtctcgcctctgttccgcccttccctccatatctcagatgcccagtgagaacagcaaagtttgactctcttctccctgcccagcgttagcaaatgaggaaactgaggccaaaggcaaagggacttgaccgaggtgattacatcggtcttagtacaacaggcacttaaagccaaagccgtgattcgtagtctcaccctggcttgagttaggtttcttttttatttttttttgaggcggagtcttgctctgtttcccaggctggagtgcagtggcgcaatctcgactcactgcaagctccgccccccgggttcacgccattcccctgcctcggcctcccgacgagctgggactacaagcgcccgtcaccacgcccggctgattttttgtatttttagtagagacggggtttctttagtagagacggggtttcaccgtgttagccaggatggtctcgattccctgacctcgtattccgcccgcctcggcctcccaaagtgctgggattactggcgtgagccaccgcgcccggcgagttaggtttctaaatccaaaaggtttttagtaattagtggttttgtttaccttgtttgctttgacgtgcagaatcgtcgaaatttttctaccacagaagagtgattaatctgtaggcactgataactttttaagttttattcttaaccagaagaaagattactattttctgagaagtctttaataatttttttttaagacagtctttctctgtcgcccaggctggagtgctgtggtgcagtctcggctccctgcagcctctgcctcctgggttcaagcgattctcctgtctcagcctcccgagtagctgggattacaggcgcgcgccaccatgcctggctgatttgtgtagttttttttttagccgagattgaatttagccaggttgttttggttatgttggccaggctggtctggagctcctgacctcaggtgacccgcccacatcggcctcccagagtgctgggattacaagtgtgagccaccgcgccctgccctgctatgaatttttttttttttttttttgagatagagtttcacagtgacgtgatctcagctcactgcaacctccacttcccgggttcaagcgagtctcctgcctcagcctcccgagtagttgggattcccgccaccacaccgggctaattttttgtatttttagtagagacggggtttcaccattttgggcaggctggtctcaaactcctgagctcaggtgatctgcccgcctcagcctcccaaagtgctgggattacaggggtgagccaccgtgcctggccttatgctggttcctttttaagtgcttttcttctacccttttgtgctcttctccacctgtcttattcatgtattaagattcatcttagctccccttcacaccttccctaatctttcagaattggaagatctgattgaattggttactttatatgttcctgagatttttacttttccttctacagtacttagtcatgatcagttgaaatgaaaacaccaatccatgtgttcagtcagtatttgcttagcacccaccctctttgtgtctacgaactggacaacaatggggaacaaaacacacatgccctcatagccagtggaatgataggaaaaatcatgttaccagcttgctttgtcagtttccctcagttttcttaaagaaaggagttaaggcaggaatttatcatgtactaatgattttattaagtactcgaataaatctttgaaagaaatatgcctttttttcttatagcagtcctgagaattgatcccagtgttactgactattcagtttagtgctccaactttatttttatttatttatttatgtatttttaatttttcttagtgctccaactttaatagttctgtttctgtacagattaccttgaaacttgaaaagagtaattagttttctgtaagacagcatttgggactgttaaatttcagtagttctaatcattccaacttaagattttttttttctaggcaaacttccgacattcttcctctttctgattctatccccatctatcaaaaaatcagaagttaaaaaaaaaaattaagtagttactccacgcccaggtgctagttatctgtgggcttatgaggaatgtaactgtcttttgacttcgttatcagaacagtggaacagaattttttttctattaatatgcagggcagtctgggaatatttaattttttttccttcttgaaagagattatgatacttctgccatttaataccaagataagcaattctatcttgaagatttttttaaaccgtcttaactattttttgtacgtgctttcctgatagcagtgtaaggtccacatgacatctatatgtgttctctctgttagcgttttcatgatggcaactttgaaacctgagatcactctgtaatttaaaaacaaggcagggagctgtggcttccacgtgtaatcccagcactctgacaggggtattgcttgaggctcattttgggccagcctgggcaacgtagtgagaccttgtctctacaacaaaattaaaaagtagccagatgtagtcatgtgtgccagtagtcccagctacttgggaggctgaggtgggaggataacttgagcctaggaaatcaaggctgcaataagctttgatcatgccactgcactcagcctgggcaagagaatgagactctgtctcaaaataaaataacatgatatcacttttattttatctattacaggttgttaaaaaagcagacatgatcaacaaaaatatgactcatcaggtccaagctgagagagatgcactggcactaagcaaaagcccattcattgtccatttgtattattcactgcagtctgcaaacaatgtctacttggtgagtaaataatttttatgttgtttctttatccattaagcagtcattgaacctagtgatttaagagaaccatgttttggttcagagtgcttgcatttgaattctggctgcactcactgccttggcaaatttacctgttatattagttagagttctccaaagaaaaagaaccaataagatatatgcatacggtgcgtgtgtatgtgtatgtatatgtacatagagagacaggccaaggggccatggctcacacctgtaattcaagcacttcgagaggctgagacagaaagatcacttgaggccaagagttcaagaccaacttggggaacataaggagactccatctctacaaaaaaattaaagtaaaaattagctgggcatggtggtatgcagctagctaatagagataccattgcacataattgcaccccagcctgagatagagtctccctctgttgcccaggctagactgcagtggtgcaatcttggccactctgcacctcctgggttcaagcaattcttgtgcctcaacctcccaagtagctgagattacaggcccagctaattttttgtataaattagctgccaccaggcccagctaattttttgtaattttagtagggacggggttttgctatgttggccaggctagtctcgaactcctggcctcaagtgatctgcccatcttggcctcccaaagtgctgagattataggcgtgagtcactgtgcccagcctaaacagtttaatttttaattaaaaactgttatggcaacatgaataaacctagtattaatgtattacgagtaatagcaagaaaaggtcgtttcattacagagccatgccaaatattgtaactgtaatgcccaaatactagatttttaaagtaatcatattgtttttatttcacaatattaaattcttttttgaaaggtaatggaatatcttattgggggagatgtcaagtctctcctacatatatatggttattttgatgaagagatggctgtgaaatatatttctgaagtagcactggctctagactaccttcacagacatggaatcatccacaggtaaagactgacttctccaaattattacttaaaaattcaagtaatcaaattacatatttgagtctcagatattcacagtaaccacttgcacttatttccaggttatctaaagtttactagtaacttgtattcatttagaaattaactcttctttcatctccctgtgttttttaaaatatattgctttgaacatgagtatagcatgtatttatttatttttgtatttacatatttatttatttttttctttgttgagacagggtctcactttgtcatccaggttgtgcagtgcagtgacttgaccttggctcactgcagcctcgacctctggggctcaagcaatccccctgccttagcctcccaagtgtctgggagtagaggtgtgtgccattactcttggcttttttttttttttttttttttttttttttgtagagacaaggttcccaggctgctctttaactcctgggcccaagggatcctcccacctcagcctcccaaaatgctacgattacaggcatgagctaccacggcccattaagtatggcattttatgtgaagagtattgaatcctttccgctcctctgcattatacaaaagtggtatattttgtagtccaactgatttacaatgtttttctctatgcaaagaaagtcagattaagtgacttattaaatctcaatcttaccttcctttaagaaggtaaatgtaggccaggtgtggtggctcatacctataattccagcactttgggaggctgaggcgggcggatcacctgaggtcgggagtttgagaccagagtggacaacatggtgaaaccctgtctctgctaaaaatacaaaaattagccgagtgtggtggtgggtgcctgtaatcccagctactcgggaggctgagacaggagaactgcttgaacccggaaggcggaggttgcagtgagccgagattgtgccattgcactccagcctgggtgacaagagtgaaactccatctcaaaaaaaaaaagaaaagaaaaaaaagaaagtaaatgtaaatttgaactggcttgaggttgattttatctaataaggtttctttattttaatggaatatctaaccaatgataccaaagataatctagtattaatttatcttttttgtagattctgataaacagtacgaaagatgttttgcttttgagagatgttttctgtacttttcaaagccatcaatgagtatctttattttggaggaaataaatagggtttgcctcctttgtaactctttttttctggaaattctaacattaaaactagcccttttttggttatctaatatttgccttttgtgtgtgcagggacttgaaaccggacaatatgcttatttctaatgagggtcatattaaactgacggattttg

SEQ ID NO: 1376 - DNA, 694 bp, Homo sapiens
ggagggggcgtcgggaaagccccgacttcgcagccttacactcttcgtgggcggcgaccgcggccccactgacatcattcctcatgagggaggaggcacaaacagttctgggccgaccagaaaaaggacgactgggacttgactctgaatcgcaggatttgaagagatttctcctggcttcccaacgaggctggtgggaagcggtcctcctcccatacacgacctcccaccctcgcgaggcgtagaaaccagttctgactgtacagtaaagcgagggccagggctgaggtctggaagctaatgaaagcacagaaagtgtcgaaactggatgagcaggaagcgagtggcctcccctgtcatctgacgttttcccaggatgtaatttgcctgactgaaacagatcaggaccaacagggagagttttcgatttagtgtgaggaaaagagcactaaattgtagcaaaagaccttattgctcaaggcccagtcagaagatttcataaggaagctgtagaaagtcttaagaggaaatcagccgggcgtggtggcgggcacctgtaatcccagctactcgggaggctgaggcaggagaatcgcttgaacccggggagcagaggttgcagtgagccgagatcgcgccactgtacgccagcctgggcgaaagaacgaaactccgtctccaaaaaaaaaaaaaa

SEQ ID NO: 1377 - DNA, 694 bp, Homo sapiens
ttttttttttttttggagacggagtttcgttctttcgcccaggctggcgtacagtggcgcgatctcggctcactgcaacctctgctccccgggttcaagcgattctcctgcctcagcctcccgagtagctgggattacaggtgcccgccaccacgcccggctgatttcctcttaagactttctacagcttccttatgaaatcttctgactgggccttgagcaataaggtcttttgctacaatttagtgctcttttcctcacactaaatcgaaaactctccctgttggtcctgatctgtttcagtcaggcaaattacatcctgggaaaacgtcagatgacaggggaggccactcgcttcctgctcatccagtttcgacactttctgtgctttcattagcttccagacctcagccctggccctcgctttactgtacagtcagaactggtttctacgcctcgcgagggtgggaggtcgtgtatgggaggaggaccgcttcccaccagcctcgttgggaagccaggagaaatctcttcaaatcctgcgattcagagtcaagtcccagtcgtcctttttctggtcggcccagaactgtttgtgcctcctccctcatgaggaatgatgtcagtggggccgcggtcgccgcccacgaagagtgtaaggctgcgaagtcggggctttcccgacgccccctcc

SEQ ID NO: 1378 - DNA, 3915 bp, Homo sapiens
tagagactaacaaatcctttttattattcccacatcagagaagttatccttgaggaggttatctttgaggtcctcccagagagcagcatccctggtgagttcacccaggcccacctgggctggagtaagtcaacttttgggtttttaggcttagtatctgtggcagtgttactccctctacccagaagaaaccctgtgcatagtcccataatataaagctgatctgctccagctgaaatagacccagagtgagatttcatttggggcataggtggaaagcacaggtgttcacagaaagaaggaatcaacacagagcagcatagaatctttgtgcattgctcaccctacaccctctccctagctcagggaagctatctttggctatgagcagggtctgtccttgcgctggctggcccaggtagattccagctctatgcctaaatcaagagtaaggctcctcggtcaacaggagtcaaaaacagcagcccttacttgagctctcagcccagggagtattccttggtccaaatgcagcccaagacccactactcacatggatttctagagttcagaggacccccaccaccaccaccattgaggaatacactgtggtgaggatgatcttcaccctcagcccaagaaatccacagggcactgttcactactactcccagccactacttgtgaacctgctcccagcctctcccttccccactgccttccaggggctcctccccagtaggacagaggaagcaaaggcgagagggtggccagaggctttgcagggtgatgtttatttgccaggttcagtaggcacacagttaacccaccgaccttcacacaccagagcagacccacaggcatgcagggagaagggcaggaccaccacggagtgccgagcaagggcgaggaccaatgtggctgcctatccaggctgtggtagggtctgacaaagggcacctgtcaggagcctccctcaggaaactggggagtttaaccctacttcctcatcccagaaaaagcaactcaatgtggctctgaggcacctgggcctctgatagaagtgagctgtagaaagagggagttcctcttcatttcattgttgaactgagcagaaaatctgcccctgtaaagggcaaacctccaaatcaaattatgagttattgccatgcagcaagccccctaggtggagaggacttgtgggctgagattgtaggaggtgggcatctaggaagagcaaggaggtatcagccctccctgtttggcccatggtaaggacccattaaggctgggacactgggtgctgggcttgtactctgccctgccaggtctcattgccacgtcctaattgttcctcctttcccttagaggctcatgaggttcagggtacagggcagcccactgcaggactcggaaaggcaggaaataacacaaataacagggtcttaggaaggacaaaaatggaagcttctgccctcctactcattctctccactcctgaggacctccacagctagtgagcagtatccctagccatgtgccaagtctggacttaaacatactgccctacctttctgcatcctctataccagcctgtatctgctcctagagcagcccacacaccacaggcacacaccttcatgtgcaggagcctaagaccgctgacagggcctcgctggaggaccagctctcagggcaaggccgcccaagtttagggcctgggagagtgtgggacctgcagggcctgcctaggggaatggtgaggcaagaagggaaggggaaggagagcaggagccccctgagtatccctagagcagcatcccacaaggaacagaaactggtgaagctagcaaaagacagaaaagccacaaggaatccatgcaggggctggggccggccctgccactggcctgcccaccactcacacacatacacacaggagacgagactgctctcccgtgacccctagttatgccccactgggatgtgggggcatgggggagcgagggcatcatgccagtgactctatgtacagtgagaagcccctcatccactctcccaccctcctgcccatcccctgccccccctcaccaggctgcctactcagctggcctcctccctttgagactcctgggcataaccagcagcctcttcccctttactagagggtggagcctggcctgtggcgccctctggggctgtgctgtccggctgggccatagccggctcaggggtggcagctgccttggtggccagcatggcactgctttgggtggtgggcacagtgctctcttctgtggctggtgtggctctcccatcagtggctggagtagcgctcctgtcagtggctggggtgacactcccatcagtggctggagtgatgcttccatcggtggctggggtgacactgccatcagtggctggggtggcacttccatctgtggctggggtggcactacggtctgcgggggccacattatcactctttgcagcacgagcagcatcaccctcaggggctgaggtagctccactcgcagctgcagctgtggccccacctgcagccccgggggtggcagtgtctgtggctgaggccgactgggctgcagccgtgctggactgctctggtgcccggagccgtttcatgagggtggtcactcggacagccttctgaaaggagcacagtggagaaaggctaagggtgaggcttgctggatccattgcttggcagtgaccaaaccaaactccttccatagtacccccggccacctccatccaccccagggccaagtactcagctgctcagcactcctacttaaggtaatcacagtggctacacccacacctgatggcctgagaaaagcttgtgtgtggctgcaggggtgtgatgcaggcaagaaactgagtgccagaagcaatacttgggatagagccaagaagggagttatccaagccttaccttccacttggccctggcaaagttcttttcaatctgggcacagacaccatccttgatgttcttatcagaagcagcattgccagaaatcctggaaagggtgcaagtgtgtctggatctgagagaatgagcctttgtggagactctgctcagcccttctatgtggcatccagggactaccaggcagagcctctgggctgccctgagctctaggtacctgcaccccttctaggcctcaaagatggggctgctgggtgtgagggggaccctggcctctcccaccctcccctggaccctgctcaccactcatgggagatggcctcttctgcagtgatccgctggtcttgctccacctccatcagccttgtgaccaggtctttggctgtggacaaaaccaaggaggggatagtcatgggcaccccatctcaatgtctagaggtgataaatgggctgggggacagaagcagaataccacagaggaagatgagagcaggacaccctccccactcccttgcgttctaccaagtgctgggcaggcacctcctcacctgcctgcgaaatatcatcccaatatggagagtcaaactcatagtcaccagccaggatcttgcggaagagattcttatcatggttctcataatcatcttcttccacctcctcatagaaaggtgggttgcctgaaagcctgcatgggggaagggtcacacagaaaggccacagacacatgcccccaccccatctgactgcaagcctgcttgtccatctgtccactcacaggatgtacatgatgactccaatggcccagcagtccacagggcgtccataccgctgccggcctaccacctctggggctacaaacacagcgcccatctgctggtcagtatcaggcctagccaggtccagtaccatccacaccagcttcctgagatgagcacattttccccctgcccagagcagctccc

SEQ ID NO: 1379 - DNA, 148 bp, Homo sapiens
caagtggaaggtgtggccgcagtggatggcggccacgtcgcgggagtgatcgaagaagtcggagcagatagtgcacagagcacggataggcatgatggctggactcaaggggcccaggcagccaaagaaactgctacaggtccggctt

SEQ ID NO: 1380 - DNA, 1796 bp, Homo sapiens
attcaacatttccgtgtcgcccttattcccttttttgcggcattttgccttcctgtttttgctcacccagaaacgctggtgaaagtaaaagatgctgaagatcagttgggtgcacgagtgggttacatcgaactggatctcaacagcggtaagatccttgagagttttcgccccgaagaacgttttccaatgatgagcacttttaaagttctgctatgtggcgcggtattatcccgtattgacgccgggcaagagcaactcggtcgccgcatacactattctcagaatgacttggttgagtactcaccagtcacagaaaagcatcttacggatggcatgacagtaagagaattatgcagtgctgccataaccatgagtgataacactgcggccaacttacttctgacaacgatcggaggaccgaaggagctaaccgcttttttgcacaacatgggggatcatgtaactcgccttgatcgttgggaaccggagctgaatgaagccataccaaacgacgagcgtgacaccacgatgcctgtagcaatggcaacaacgttgcgcaaactattaactggcgaactacttactctagcttcccggcaacaattaatagactggatggaggcggataaagttgcaggaccacttctgcgctcggcccttccggctggctggtttattgctgataaatctggagccggtgagcgtgggtctcgcggtatcattgcagcactggggccagatggtaagccctcccgtatcgtagttatctacacgacggggagtcaggcaactatggatgaacgaaatagacagatcgctgagataggtgcctcactgattaagcattggtaactgtcagaccaagtttactcatatatactttagattgatttaaaacttcatttttaatttaaaaggatctaggtgaagatcctttttgataatctcatgaccaaaatcccttaacgtgagttttcgttccactgagcgtcagaccccgtagaaaagatcaaaggatcttcttgagatcctttttttctgcgcgtaatctgctgcttgcaaacaaaaaaaccaccgctaccagcggtggtttgtttgccggatcaagagctaccaactctttttccgaaggtaactggcttcagcagagcgcagataccaaatactgtccttctagtgtagccgtagttaggccaccacttcaagaactctgtagcaccgcctacatacctcgctctgctaatcctgttaccagtggctgctgccagtggcgataagtcgtgtcttaccgggttggactcaagacgatagttaccggataaggcgcagcggtcgggctgaacggggggttcgtgcacacagcccagcttggagcgaacgacctacaccgaactgagatacctacagcgtgagctatgagaaagcgccacgcttcccgaagggagaaaggcggacaggtatccggtaagcggcagggtcggaacaggagagcgcacgagggagcttccagggggaaacgcctggtatctttatagtcctgtcgggtttcgccacctctgacttgagcgtcgatttttgtgatgctcgtcaggggggcggagcctatggaaaaacgccagcaacgcggcctttttacggttcctggccttttgctggccttttgctcacatgttctttcctgcgttatcccctgattctgtggataaccgtattaccgcctttgagtgagctgataccgctcgccgcagccgaacgaccgagcgcagcgagtcagtgagcgaggaagcggaaga

SEQ ID NO: 1381 - DNA, 631 bp, Homo sapiens
cgcgcggcgagaggctgtttgcgtattgggcgctcttccgcttcctcgctcactgactcgctgcgctcggtcgttcggctgcggcgagcggtatcagctcactcaaaggcggtaatacggttatccacagaatcaggggataacgcaggaaagaacatgtgagcaaaaggccagcaaaaggccaggaaccgtaaaaaggccgcgttgctggcgtttttccataggctccgcccccctgacgagcatcacaaaaatcgacgctcaagtcagaggtggcgaaacccgacaggactataaagataccaggcgtttccccctggaagctccctcgtgcgctctcctgttccgaccctgccgcttaccggatacctgtccgcctttctcccttcgggaagcgtggcgctttctcatagctcacgctgtaggtatctcagttcggtgtaggtcgttcgctccaaactgggctgtgtgcacgaaccccccgttcagcccgaccgctgcgccttatccggaaactattcgcttgagtccaacccggtaaagacacgacttaattggccacctgcagcagcactggtacaagatatcaaagcgagtatgtaggcggcgcttcaaagttcttgaagtgggg

SEQ ID NO: 1382 - DNA, 686 bp, Homo sapiens
  SITE (592): n equals a,t,g, or c
ggtaccgagctcgaattcgtaatcatggtcatagctgtttcctgtgtgaaattgttatccgctcacaattccacacaacatacgagccggaagcataaagtgtaaagcctggggtgcctaatgagtgagctaactcacattaattgcgttgcgctcactgcccgctttccagtcgggaaacctgtcgtgccagctgcattaatgaatcggccaacgcgcggggagaggcggtttgcgtattgggcgctcttccgcttcctcgctcactgactcgctgcgctcggtcgttcggctgcggcgagcggtatcagctcactcaaaggcggtaatacggttatccacagaatcaggggataacgcaggaaagaacatgtgagcaaaaggccagcaaaaggccaagaaccgtaaaaaggccgcgttgctggcgtttttccataggctccgcccccctgacgagcatcacaaaaatcgacgctcaagtcagaggtggcgaaacccgacaggactataaagataccaggcgttttccccttggaagctcctcgtgcgctcttctggttcgaccctgccggctaccggataactgtcccgnctttcttccctcgggaagcgtggcgctttctcataactcacgctgtagtatcttaatttcggggtagccgttcgcttccaaactggccttggtg

SEQ ID NO: 1383 - DNA, 706 bp, Homo sapiens
gcttcctcgctcactgactcgctgcgctcggtcgttcggctgcggcgagcggtatcagctcactcaaaggcggtaatacggttatccacagaatcaggggataacgcaggaaagaacatgtgagcaaaaggccagcaaaaggccaggaaccgtaaaaaggccgcgttgctggcgtttttccataggctccgcccccctgacgagcatcacaaaaatcgacgctcaagtcagaggtggcgaaacccgacaggactataaagataccaggcgtttccccctggaagctccctcgtgcgctctcctgttccgaccctgccgcttaccggatacctgtccgcctttctcccttcgggaagcgtggcgctttctcatagctcacgctgtaggtatctcagttcggtgtaggtcgttcgctccaagctgggctgtgtgcacgaaccccccgttcagcccgaccgctgcgccttatccggtaactatcgtcttgagtccaacccggtaagacacgacttatcgccactggcagcagccactggtaacaggattagcagagcgaggtatgtaggcggtgctacagagttcttgaagtggtggcctaactacggctacactagaagaacagtatttggtatctgcgctctgctgaagccagttaccttcggaaaaagagttggtagttcttgatccggcaaacaaaccaccgctg

SEQ ID NO: 1384 - DNA, 912 bp, Homo sapiens
gctcactgactcgctgcgctcggtcgttcggctgcggcgagcggtatcagctcactcaaaggcggtaatacggttatccacagaatcaggggataacgcaggaaagaacatgtgagcaaaaggccagcaaaaggccaggaaccgtaaaaaggccgcgtagctggcgtttttccataggctccgcccccctgacgagcatcacaaaaatcgacgctcaagtcagaggtggcgaaacccgacaggactataaaaataccaggcgtatccccctggaagctccctcgtgcgctctcctgttccgaccctgccgcttaccggatacctgtccgcctttctcccttcgggaagcgtggcgctttctcatagctcacgctgtatgtattctcagttcggtgtacgtcgttcgctccaagctgggctgtgtgcaagaacccaccgttcagcccgaccgctgcgcattatccggtaactatcgtcttgagtccaacccggtaagacacgacttatcgccactggcagcagccactggcaacaggattagcagagcgaggtatgtaggcggtgctacagagttcttgaagtggtggcctaactacggctacactagaaggacagtatttggtatctgcgctctgctgaagccagttaccttcggaaaaagagttggtagctcttgatccggcaaacaaaccaccgctggtagcggtggtttttttgtttgcaagcagcagattacgcgcagaaaaaaaggatctcaagaagatcctttgatcttttctacggggtctgacgctcagtggaacgaaactcacgttaagggattttggtcatgagattatcaaaaaggatcttcacctagatccttttaaattaaaaatgaagttttaaatcaatctaaagtatatatgagta

SEQ ID NO: 1385 - DNA, 1150 bp, Homo sapiens
  SITE (357): n equals a,t,g, or c
tcttccgcttcctcgctcactgactcgctgcgctcggtcgttcggctgcggcgagcggtatcagctcactcaaaggcggtaatacggttatccacagaatcaggggataacgcaggaaagaacatgtgagcaaaaggccagcaaaaggccaggaaccgtaaaaaggccgcgttgctggcgtttttccataggctccgcccccctgacgagcatcacaaaaatcgacgctcaagtcagaggtggcgaaacccgacaggactataaagataccaggcgtttccccctggaagctccctcgtgcgctctccttgtccgaccctgccgcttaccggatacctgtccgcctttcttcccttncggaagcgtggcgctttctcatagctcacgctgtaggtatctcagttcggtgtaggtcgttcgctccaagctgggctgtgtgcacgaaccccccgttcagcccgaccgctgcgccttatccggtaactatcgtcttgagtccaacccggtaagacacgacttatcgccactggcagcagccactggtaacaggattagcagagcgaggtatgtaggcggtgctacagagttcttgaagtggtggcctaactacggctacactagaagaacagtatttggtatctgcgctctgctgaagccagttaccttcggaaaaagagttggtagctcttgatccggcaaacaaaccaccgctggtagcggtggtttttttgtttgcaagcagcagattacgcgcagaaaaaaaggatctcaagaagatcctttgatcttttctacggggtctgacgctcagtggaacgaaaactcacgttaagggattttggtcatgagattatcaaaaaggatcttcacctacatccttttaaattaaaaatgaagctttaaatcaatctaaagtatatatgagtaaacttggtctgacagttaccaatgcttaatcagtgaggcacctatctcagcgatctgtctatttccgacatccataggtgcctgacttcccgtcgtgtagataactacgataccggagggcttaacatctggccccagtgctgcaatgataccgggagacccacgcttaccggctccagatttatcagcattataccagccagccggcagggccgagcgcaga

SEQ ID NO: 1386 - DNA, 87 bp, Homo sapiens
gatctgtctatttcgttcatccatagttgcctgactccccgtcgtgtagataactacgatacgggagggcttaccatctggccccag

SEQ ID NO: 1387 - DNA, 3558 bp, Homo sapiens
ccactgggcatgtgctccaggtccacccaggggtgcgcaaaaaagtcctggaaggagatgcgacggctggggtcccgctccaggagccgctgcagtaggtcccggcagtctcgggagagcaggggccgcaaggggagctgcagggaagggaacggcagggacagatcacactgggctcctccacccctacccctagcccaggggtctgcgaggaaccccagaggtacgcgttggacaggtggggaatctgagaccgaggaggaacaggatgggtcaggatgatggagcccagcggggagcgaggcctccatcagctgggctcccgatacacgcctcgctggagccctgagctgagctagaatcgtgtttctgggtccttatttccctccctggactatgctcctaggaaggctgggcctggctctgctttgcattctccccacaagggcctgcaaaatgggcactgtgctgccagctgtgggctgacctgaggccctgggacagcctggcacctcgacttccagcctagaacctgcccctccaccacaaaggcagcctggagcccatactccagtctctgcaggtcagaacgaggtctaaaccctcagggccctgactccctctgccccccagtggtcgctaaggccctgctagacacacctcgatgacccggttgctacggatcttctcttccagctccgagaacgacctggaggcaaaggggggctgcccgaagagggcttctgtggaagggaggcagagcggaggctgggagggaatgggtcaagcctggcctgacgcccctcagcaggggccctgggccagcagtcagttttcatcagaacccttcagaagtggcccagagaggccttgcctgaggaaactgtaggcctcagggtgagaagcagggaaaagaggtctcaccatacaggatgacccccatggaccagaggtccacgcgggcgtcatactgccgctggcacaccatctcgggggccatgtagaggggggagccacggagcacgtgcttctcatcccacggggacatgtgttgtgcgaaaccaaagtctgcaggcaagaggagaggcagcagggcttgaattccagctgcttcagctcctgacttgtaaagcctcaccccaggctcctctccaccctccagacccgccaggatcaaccctatttccaagcctctgctcatcattaggctggaacaccctcctatatctgcctctggggtataaaacctacccatccttcccagctcccttgggcaccttttcctaggaagcccacctgatcacaccagctacctgcataagcccccaccctctcactgtccccccaggcttaggttctatcacagtctctggcctccagtgtcaattatccaaatcttatcaagggtcaccacctcctactcccccaccacacccctcctatgtggccacagatggagtcacagacttgagccccaattctgatgacagaccaagtcctgtccctgcccacagagggatccctgatgcttgtcacacgctgaaccctggcactgttcccagattgacccctaaacctggacacacagtgagtcccaactctggccacagactgagccctaactccacccattatgctgctggacttgagcatgggtagcctgagaaagcttccaccttttgatgacaggggccaaccccagacttcacggcgtgtcactctttgaggactctatagagggctccataagaaccagggctgctgagtgagcccaggcagagggaggcctctgcactctccaaacctcatccctgctgtttcagacacagacctgccagttttaggtggggcttctccaaggagctcagtagaatgttctgtggcttcagatccaggtgagagatattccgttcatgcaggaattgcagggcgctagctgaggagcaggacccacgaagagagacagttcagagcccattcccgcctgcctctcgcctccccggctcacatctgcctcctcaagcctgcacaaccccagttcctgcctggctggtctaatgttttccatataagcaccaagatcacaccacttctaggagtttgccaccccacccgagtgcccaccctccttccctctgccccttcacaagtctccccacctctcagaagcttctctggatgccccagcccttgagatcctgctcttttccttggcacagcacttgagtcctacctacaggactctggaatgttctacaaggtccttatattatgttctatgtatggaagcctgaacaccccacagaggggttaccccctcatctctcccacagcgtccttgagcaagggttgagtgtatgagataaacaggaccataaaatttcaggctgtgcaggaggcagctgcaatgcgtgccaaggctctaagcctgggggaggggtgggatggtggggggcagagaacaagggacagagtgtcaggctggtgtcacaggcctttacctaattgctgcatgaagacacgcgccaccttctcaggcagaatcctgcgggtatggatgaagcgagacaggtcgccccctgcgcaaaactccatgatgaggtagatattgtcactgtcccactgtgtttagaggcagagaggcggcctgaagagagtgtcccttctccagctccctttggcagcggccccgccccaggctcacacctgaaagtctttcagctgcacaatgtggggatgtcgaatgcccttgaggatctcaatctccgtgagaggttctccaccgatgccttgttcagacttttcttggctacacactttatggctaccacttcacgagtgtccttctgcgagacaggagatttggggactctgccttgagggggccaggacccttgtctgactggaaaggctctatctggttccctctgttcccccaccccgcccctccccgggtctacctactgcacaccagcaccgggcttcccagctttcccttgtgaggccagtgaggaatgctgattctggaatcctggcttcccgacacagcctcagcctggtcttctccaaccctcggctagctgatccatttctttgcattctggagtgctcccggcagaggcatgtcactcagggttctagaaccgcccactctgcctcccaactggctccagtcccagactcctcccagcccaccaggtaacctgttttgagcctgttcttcagccactgaccctgcaggtgggtgcaggtgcgctctttaagacctaagcgtggcagtcggctccaacctccgccgagggtcagctggggcgaggccggcctcccgcccctaactattcccacactgtcgctaacctctcagagtctccccggccggcaccagccgagcttagctcgggcggggcacggggccatcggccggcacccaccttggcgtaggccttgtacaccgtggcgtacgtgccgctgcccaggcgctcggtgaggatgaagccgtccaggcgcgggggaccccagccgggccccgccattccggccgcctgcgcccgcgcgggc

SEQ ID NO: 1388 - DNA, 2662 bp, Homo sapiens
catgtggacccgtgttgtctgaaaatgtttttatttttacttaagcacaaaaattgagacgtaacatatacatttgtacatagaggggaaaaaataccagaaaggagttcataaaaccccagccgctgccagtatcattcagtggctggggcctgcggctgtctcgggcccagagccggaggctagttttgtgggaaggcaccccagtccacacacccactcggcagcctcgagggacagggtgctggttttaagggtggactcctacgtgtcccatcacagtgacacaccccccagggtgtgaaccagactccactgggtattagggggccctccgagagatggcttatcagtccctgctgagggatgcggttctggactggctggccctgcccttcctgaaagtctggatgctgctgatggggagcatgggcggggcaggtggcatctgaggcagagacaaaggcagccgtccctcggttcggggaggggggggggtagtcacagcaaacagggccaaaccaaccacaccaggacaggcagaccccaccctcctagaagacgctggacgctaggcaggacagcttggggtcagtgtccttggtcccttccagtccccaaatcccaaccaacggcattgtacattcagaaagtctgaagagagtaaggctcagcaaggggagggctccagagggctcaaagtgccatcccctgcaggagggtgcagggggataaagggctattaatccgtttctcaggaacacgaggcagggaagagcttaaggcaaccagccttctctggatccgtttatgaggcagagaagagcttgaggcaaccagccttctctggaagcctggagaccactggagtgacctggggaacagatctgtccaccagaacctgtgagaggcttattcccagcccaggcaggaaggactgggctgtgtctaagaagccagattcaggccaggcctgcagggtgggggagtcaaggcccaggaccctggcagaaagctccagctgggatgggcccaggtcagcctgtgatcccaactgtgtgggggtgtctgtgtgtgcacaggacgaagagaacttcagtcccactgcttccagagacaaaagaatcctaccaaaccatcaccagagaaggaaagagagctttgtttttttttgtacatagagggggaaaaaattccctgtccctcccgttccagggagagctggtcgctgagggaggaggaagagccacggcaagaaccctgccaggtctgtgctgggcacaaccaccaccacataaggcacccacggaaagtgcagctcagaaggcaggcgagagaaaggctgagggggagagaagagaggaggactaattcccctggaaggctccttgggcagcagatgaagcagctctgtggaaggttctgctgctgaagatgccctgggaaaactcctcctggcctgctggaagctggcccctgtccgtcggtagagggagtgcacctggcgaagaggggtggggtgagagaagcctgtcctttgggcccaccaggaagccagccatccaggttatactcccaaaggggtcaccagaagcctggcactgcctgaccccccacccagatccctggagaaaggtactggacctttgggggcctaggatgcccaactgcagtggtgaaaaacatctcgtggcaagggcaggaaacggttgcctgcctcctcccatttgctgtcagccctgcccacaccactcacccgctgcaggaggaagactgagagcacggcacagagggtgaagaagccagccaccaccatcatgatgactgatatggccagggaatgattatccagtgtagacagggctgcaatccaaccgctataaagggaagaagaggccagagggagcaaagtgggagtgggctccaaaagtcagcataaggggctcttctccaagtggctgctgtgtcctgaccatcaccttggcatctccccacagcacagggagccctgtgagccagaagcccttgcctgtgaggccagacctccgtgaaggctgacaggcccacactaccccattcacaaggggaatcttctggttatgtgaggtctgaaagggaggatgtggttgctgccttcacagagtcagaagtagcaccgggctgggtgctatggctctcacctgtaatcccagcactttgggaggctgaggcaggaggatcgcttgagcccaagagttcaagaccaacctgggcaacagagggaggccctgtctccataaaaaataaaaaaaggccaggttcgtgcctgtaatcccagcactttgggaggccaaggaaggcagatcacttgaggtcaggagtttgagaccagcctggccaacatggagaaaccttgctctactaaaaatacaaaaattactgcgcgtggttgcacacgcctgcaatcccagctactcgggagactgaggcaggagaatcacttgaacctggaaggtgcaggctgcagtgagccgagatcatgccattgtactccagcctaggtgacagggcgagactccaactcaaaaaaaaaaaaaattagctggctgtggtcatacatgcctatgctcccagctacttgggatgctgaggtaggaggatcacttgagcccgtgaggttcaa

SEQ ID NO: 1389 - DNA, 7934 bp, Homo sapiens
aatgagctgtgggttgtcacatcattcatggcatacggtgagtgggaaagggttcttggtagaaaggggttattgggactctgttgtcagattgcctgtgttttcctcctccattacctttcactgcctccatgcaatccttttctgcaggttctgcaaaagatctcatctgtacacacttcatggatggcatgaatgagctggcgattgcttacatcctgcagggggtgctgaaggccctcgactacatccaccacatgggatatgtacacaggtgcgttcttaggcggcctttcccatgattacagtgggtagctatgcccctgagccttcaggtaaagtgaagtttgactgaagttaatgaagccagagtttaaaatcaaggatctggattcttgctgaagatctctttgctctgaaaagaaacagggcccagcgcgatggctcacgcctgtaatcacagcgcttgggaggccaaggcaggtggatcacaaggtcaggagtttgagaccagcctggccaacatagtgaaaccctgtctctactaaaaatacaaaaattagccgggtgtggtggcacatgcttgtagtcccagtagctgggactacaagctgaggcaggagaatcgcttgaacctgggaggcggaggttgcagtgactggagatcacaccactgcactccagcctgggtggcagagtgagactcttgtctgaaaaaaaaaaaaaaaaaaagagagaaggatctggattctgaccttgccactgacttgggagatggtcacttagcctgttagtgctgaagccactgactttctctttgctgagcagcttggtcttgagtgttgtgtgagaggaacatctgatgtggacctttgtactccactctctgcctccttctttctgtgccccagagtcagtcttatgctgagagaccagggcgaagacagatagcttagtagatagtgtcaggaaatcagctcatagtagggaaaatggtaaaactggacccctacataactcctcatacagagaaggactgcagctggattaaaggcttctatgtaaaatgtgaaactgtagacttaaatagaaggaaatgtgagaaaatgtttttgtgacctgaggcatgtaataatttctcaacattttagaagcacaaaacataagacaaaagattgatgaatttgattagatcaagaagatttctatccaatacaagataccatgaaaaaggttaagaaacaagtgacagagcagatgatattagctttgtcaccacaggagattagtaacagggaaatcttgcaaatcaacaagaaatggacagcaaagcaagaaaaatgggccaaagatatgaagtttacaaaagaggaaaccccaagacaaacccatcataggaagagccactcaaatctcgcaatcagagaaaagcaaatgaaaaacaagatgtcaccttatacacatgagactggcagcggttgggaggctggacgagtcccagtgtggcaaggacggggagcctcctgtccaggtggtggaagatgcccggtgctgccagtcagggtcacagaaccagaaccatcaatgccacttctggatgtacaccctaaagaaaccctcgtgcagacccatcaggggacatgtttggatgtcaccattcacacgtgtgttggttaggggtagtgtgagtgtctgtccccagaaggatggatgagtaaaagtgttagatctcttcccagaaccaaggtgacaattagaagaaaagatgaaaggtacacagctagcaatacagatgtgtctggaaactacagccctgagtgaaaaaggaagaatgggatgcggaacacagtacccctaggtacactttacaagagtcctacagataagaagtacagattaaaagcattcgtaggaggtagggcaagaggtgttctagagcatacaagagcactgaacagtcccagcactctgggaggccaaggtgggtggatcacctgaggtcaggagttcgagaccagcctggccaacatcgcaaaaccctgtctctactaaacatacaaaaattagcccggcatggtggcaggtgccctgtaatcccagctactcaggaggctgaggcaagataatcacttgaacctgggaggtggaggctgcagtgagctgagatcgtgccattgcactccagcctggatgacagagctaaataagcttttaatctggtgatatgtaaatggagtcatgctattttatgtagatttgaagtttttcattaaaacatagttatagctggatgcagtggcagcactttgggaggccaaggggtggatctcttgaggtcaggagttcaagaccagcctggctaacatggtgaaaccctgtctctactaaaaatacaaaaactggctggatgtggtggcatgagcctgtagtcccagctgctcaggagactgaggcaggagaattgcttgaacctgggaggcagaggttgcagtgaactgagattgcgccactgcactccagcctgggcgacagagtgagactctgtctcaacaacaacaacaacaagaacaaaaaacctggttataggccggtcacggtgattcacacctgtaatcccagcactttgggaggccaaagcaggcggatcatttaaagccaggagttcaagactggcatggccaacatggcaaaaccccatctctactaaaaatataaaaattagttgggcgggcccagcgcagtggttcacactggtaatcctagcactttgggaggctgagacgggtggatcacgaggtcgggagatcgagaccatcctggctaacacagtgaaaccctgtctccactaaaaatacaaaaaaaaaaaaattagccgggcgtggtggcgggtgcctgtagtcccagctactcgggaggctgaggcaggagaatggtgtgaacccgggaggcggagcttgcagtgagccgagatggcgccactacactccagtctgtgcgacagagcaagactccgtctcaaaaaaaaaagaaaaaaaaaaattagctgggtgtggtggtgcacacctgtaatcccagctacttggttggctgaggcacaggaattgcttgaacccaggaggcagaggttgcagtgagcctagattgagccactgcactctagccgggtgacagagtgagactcttatctcaatgaaaacaaaaacatggttatgtatatgtaaaatacacatatacgtgtataacacacgcacacaggagagagctggccaggtggagtgtgtgaagaccaaaaatttgtagcaggaggggctcctgctctcgacatgacaccctccccgcttccccaggagtgtcaaagccagccacatcctgatctctgtggatgggaaggtctacctgtctggtttgcgcagcaacctcagcatgataagccatgggcagcggcagcgagtggtccacgattttcccaagtacagtgtcaaggttctgccgtggctcagccccgaggtcctccagcaggtctgtgtgtgggcccagaggagctcccctacccaactcatgattcccaagggagccttcaggcattgcctggagtcgggggctctcaacctcccagtggggtaaaggggttcctggagggagggagccctcagcgtgggcagcgcctgtccactgcagatggatgtggttcctcccagggggtcctaacctctattggatgaaatttcagctccctttagggacccttggcaccctatgagaagagtgagcattttggaaatgtttgctgctctctggatccctgtgctaagcaggggcatggggctggcacttcctgctccttacagagcatcgccagttacaggtggtaaaataccagttagtcttcagtagcacaggcaaggagagtcattagcagcaggtcctgatgtggggacagccatccttttcctctctttagttctaccctttttctaagaacaaagaccaaatggggtaatctgtggccttttttttctggcttagaatctccagggttatgatgccaagtctgacatctacagtgtgggaatcacagcctgtgaactggccaacggccatgtcccctttaaggatatgcctgccacccaggtaagcctgccgcccatcggtttccttcttgcctgcttgccttccacagatgttcgttgagtagctctcacactcaggacacagactaggaatactaagatgaaagaccctgtcttttccttcaagaagtcccacccagtgggggatagtgacctcactctttgtttacttcctgtggcaaacctggtggtaagggaggccagcttggggaggggagcccgggagcaggggtgcaaatggaggcccacacgctacatgtctatttaaaacatatacattaagctaactagtttttataaatgcataaaatatgttctgtcctcctacttggataaatatacctggaaggtcagtttctaatttagaattcccacagttcttaaccgcattccagctgacacctttggaacccccattctgtaagttcagcttctgttcatgaccctccagatgcctgtcctttggccacccctaggatccaagggtgcacagtcagtggcacagtctacccttgggaaaacagacccagggaagaggcttatgcaagcctcattaaatccagaaaatggatttggggtcatttgggcaaggattacctgggtcccagctacttggagtgtggtctggaactgggaggggcaggatgcaggctctaattaagccacttccggaacccacaggctgcttgcccggtggtaggggcagctggagggtggccagagtgcagccccccagagcaggggcccagggaagtcctgggaggaggcagccttgagttggaaggcagacagcagtcacctgtgtggaggaggaactaggacactcttctcggcagacagcagcatgtgcagagacccagagtctagaaaaaacagatctggagaacagcaaggaggtgtaaatggtataaatggccaaggtgcagtgcttcttggggactgccaggtgacaggcacagaaggaagcaagggtacattgtgaagggctttgatgccactttagagcactggttcctgtcctaaagcctgtggagcagtgctgaggattctaagcacaggagtgacagcataagatggctcatttacaaagaccaccccggcagatggattagatccagtagctcagttaggtgggtatggaagtctatgtgaggaatctaggagatctcagtaaaataattcagtgacagaggatgctcaggaaagaaaaggtgactgaggaggaacaagaagtccaggcctagaagcagcaccatccactagaatttgctgcagcgaaggagggcttctgtggctgcactgtctagcgtgggagccatgagactgtgtggctgtcgagcatttagaaggtgaccagtgagactgtgggactgaattttaaacctcatttaaatcgaaatagccacaagtggctagtggctatcacgttagtgcagctctagagcaatttccaggtttctggcttggacagcttatgcggtcatgaggacttccacgaggacagcagtcccaggtggggctggttttatatgtgttgagttggggtactttggaacagccacccagcctggcctccccttgggcatcttgctcccgtgtggcctgctgcagcgacagcccaggctgtggcactgcagggactgcctctcagacctcatcggatccacctgagcatggcagacggctgggcttcaaagcaggttcatctgactgctccttccctctagggtgaagactctacggtaaaaggaatttgatgccttggaaagggagagcggaaactgtgagccctgctttccagccatggcgaaagcgggtacttttgtgcaacccctctcctttcacgttggcctggctagggcggagctgccacgccagtgaccagcgtttctttgggaaaattggacttactccacttccaccttttccactcttcaaatgatcacatttgcatattgggaacagtgtatttgtgaagagactctcaggccttccagggaccaccccccccccccacccgctacagcccaggtcctggttctgtcctccccagatgctgctagagaaactgaacggcacagtgccctgcctgttggataccagcaccatccccgctgaggagctgaccatgagcccttcgcgctcagtggccaactctggcctgagtgacagcctgaccaccagcaccccccggccctccaacggtgactcgccctcccacccctaccaccgaaccttctccccccacttccaccactttgtggagcagtgccttcagcgcaacccggatgccaggtatccctgctggcctgggcctgggcttcgggagagcagagggtgctcaggagggtaaggccagggtgtgaagggacttacctcccaaaggttctgcaggggaatctggagctacacacaggagggatcagctcctgggtgtgtcagaggccagcctggggagctctggccactgcttcccatgagctgagggagagggagaggggacccgaggctgaggcataagtggcaggatttcgggaagctggggacacggcagtgatgctgcggtctctcctcccctttccctccaggcccagtgccagcaccctcctgaaccactctttcttcaagcaggtatcgtagccccttcgttctggttctggttctagttctggttctaacaactcacaatccctttagctttctctcccctccctttgaatgagagaaactaccccgcttccgaagcccctgaaagacactgctccttcctctcatggagttggctccgacagcccgtctgccaccaggccatggttccttgccccatggtgtcctgggacccagagcaacaggatctgtcacccacctctctcttctcccccagatcaagcgacgtgcctcagaggctttgcccgaattgcttcgtcctgtcacccccatcaccaattttgagggcagccagtctcaggaccacagtggaatctttggcctggtaacaaacctggaagagctggaggtggacgattgggagttctgagcctctgcaaactgtgcgcattctccagccagggatgcagaggccacccagaggcccttcctgagggccggccacattcccgccctcctgggcagattgggtagaaaggacattcttccaggaaagttgactgctgactgattgggaaagaaaatcctggagagacacttcactgctccaaggcttttgagacacaagggaatctcaacaaccagggatcaggagggtccaaagccgacattcccagtcctgtgagctcaggtgacctcctccgcagaagagagatgctgctctggccctgggagctgaattccaagcccagggtttggctccttaaacccgaggaccgccacctcttcccagtgcttgcgaccagcctcattctatttaactttgctctcagatgcctcagatgctataggtcagtgaaagggcaagtagtaagctgcctgcctcccttccctcagacctctccctcataattccagagaagggcatttctgtctttttaagcacagactaaggctggaacagtccatccttatccctcttctggcttgggccctgacacctaagtctttcccacggtttatgtgtgtgcctcattcctttcccaccaagaatccatcttagcgcctcctgccagctgccctggtgctttctccaagggccatcagtgtcttgcctagcttgagggcttaagtccttatgctgtgttagtttcgttgtcagaacaaattaaaattttcagagacgctgctggagaa

SEQ ID NO: 1390 - DNA, 7934 bp, Homo sapiens
aatgagctgtgggttgtcacatcattcatggcatacggtgagtgggaaagggttcttggtagaaaggggttattgggactctgttgtcagattgcctgtgttttcctcctccattacctttcactgcctccatgcaatccttttctgcaggttctgcaaaagatctcatctgtacacacttcatggatggcatgaatgagctggcgattgcttacatcctgcagggggtgctgaaggccctcgactacatccaccacatgggatatgtacacaggtgcgttcttaggcggcctttcccatgattacagtgggtagctatgcccctgagccttcaggtaaagtgaagtttgactgaagttaatgaagccagagtttaaaatcaaggatctggattcttgctgaagatctctttgctctgaaaagaaacagggcccagcgcgatggctcacgcctgtaatcacagcgcttgggaggccaaggcaggtggatcacaaggtcaggagtttgagaccagcctggccaacatagtgaaaccctgtctctactaaaaatacaaaaattagccgggtgtggtggcacatgcttgtagtcccagtagctgggactacaagctgaggcaggagaatcgcttgaacctgggaggcggaggttgcagtgactggagatcacaccactgcactccagcctgggtggcagagtgagactcttgtctgaaaaaaaaaaaaaaaaaaagagagaaggatctggattctgaccttgccactgacttgggagatggtcacttagcctgttagtgctgaagccactgactttctctttgctgagcagcttggtcttgagtgttgtgtgagaggaacatctgatgtggacctttgtactccactctctgcctccttctttctgtgccccagagtcagtcttatgctgagagaccagggcgaagacagatagcttagtagatagtgtcaggaaatcagctcatagtagggaaaatggtaaaactggacccctacataactcctcatacagagaaggactgcagctggattaaaggcttctatgtaaaatgtgaaactgtagacttaaatagaaggaaatgtgagaaaatgtttttgtgacctgaggcatgtaataatttctcaacattttagaagcacaaaacataagacaaaagattgatgaatttgattagatcaagaagatttctatccaatacaagataccatgaaaaaggttaagaaacaagtgacagagcagatgatattagctttgtcaccacaggagattagtaacagggaaatcttgcaaatcaacaagaaatggacagcaaagcaagaaaaatgggccaaagatatgaagtttacaaaagaggaaaccccaagacaaacccatcataggaagagccactcaaatctcgcaatcagagaaaagcaaatgaaaaacaagatgtcaccttatacacatgagactggcagcggttgggaggctggacgagtcccagtgtggcaaggacggggagcctcctgtccaggtggtggaagatgcccggtgctgccagtcagggtcacagaaccagaaccatcaatgccacttctggatgtacaccctaaagaaaccctcgtgcagacccatcaggggacatgtttggatgtcaccattcacacgtgtgttggttaggggtagtgtgagtgtctgtccccagaaggatggatgagtaaaagtgttagatctcttcccagaaccaaggtgacaattagaagaaaagatgaaaggtacacagctagcaatacagatgtgtctggaaactacagccctgagtgaaaaaggaagaatgggatgcggaacacagtacccctaggtacactttacaagagtcctacagataagaagtacagattaaaagcattcgtaggaggtagggcatgacgtgttctagagcatacaagaacactgaacattcccagcactctgggaagcccaaggtgggtggatcacctgaggtcatgagttcgagaccagcctggccaacatcgcaaaaccctgtctctactaaacatacgaaaattagccgggcatggtggcaggtgcctgtaatcccagctactcaggaggctgaggcaagataatcacttgaacctgggaggtggaggctgcagtgagctgagatcgtgccattgcactccagcctggatgacagagctaaataagcttttaatctggtgatatgtaaatggagtcatgctattttatgtagatttgaagtttttcattaaaacatagttatagctggatgcagtggcagcactttgggaggccaaggggtggatctcttgaggtcaggagttcaagaccagcctggctaacatggtgaaaccctgtctctactaaaaatacaaaaactggctggatgtggtggcatgagcctgtagtcccagctgctcaggagactgaggcaggagaattgcttgaacctgggaggcagaggttgcagtgaactgagattgcgccactgcactccagcctgggcgacagagtgagactctgtctcaacaacaacaacaacaagaacaaaaaacctggttataggccggtcacggtgattcacacctgtaatcccagcactttgggaggccaaagcaggcggatcatttaaagccaggagttcaagactggcatggccaacatggcaaaaccccatctctactaaaaatataaaaattagttgggcgggcccagcgcagtggttcacactggtaatcctagcactttgggaggctgagacgggtggatcacgaggtcgggagatcgagaccatcctggctaacacagtgaaaccctgtctccactaaaaatacaaaaaaaaaaaaattagccgggcgtggtggcgggtgcctgtagtcccagctactcgggaggctgaggcaggagaatggtgtgaacccgggaggcggagcttgcagtgagccgagatggcgccactacactccagtctgtgcgacagagcaagactccgtctcaaaaaaaaaagaaaaaaaaaaattagctgggtgtggtggtgcacacctgtaatcccagctacttggttggctgaggcacaggaattgcttgaacccaggaggcagaggttgcagtgagcctagattgagccactgcactctagccgggtgacagagtgagactcttatctcaatgaaaacaaaaacatggttatgtatatgtaaaatacacatatacgtgtataacacacgcacacaggagagagctggccaggtggagtgtgtgaagaccaaaaatttgtagcaggaggggctcctgctctcgacatgacaccctccccgcttccccaggagtgtcaaagccagccacatcctgatctctgtggatgggaaggtctacctgtctggtttgcgcagcaacctcagcatgataagccatgggcagcggcagcgagtggtccacgattttcccaagtacagtgtcaaggttctgccgtggctcagccccgaggtcctccagcaggtctgtgtgtgggcccagaggagctcccctacccaactcatgattcccaagggagccttcaggcattgcctggagtcgggggctctcaacctcccagtggggtaaaggggttcctggagggagggagccctcagcgtgggcagcgcctgtccactgcagatggatgtggttcctcccagggggtcctaacctctattggatgaaatttcagctccctttagggacccttggcaccctatgagaagagtgagcattttggaaatgtttgctgctctctggatccctgtgctaagcaggggcatggggctggcacttcctgctccttacagagcatcgccagttacaggtggtaaaataccagttagtcttcagtagcacaggcaaggagagtcattagcagcaggtcctgatgtggggacagccatccttttcctctctttagttctaccctttttctaagaacaaagaccaaatggggtaatctgtggccttttttttctggcttagaatctccagggttatgatgccaagtctgacatctacagtgtgggaatcacagcctgtgaactggccaacggccatgtcccctttaaggatatgcctgccacccaggtaagcctgccgcccatcggtttccttcttgcctgcttgccttccacagatgttcgttgagtagctctcacactcaggacacagactaggaatactaagatgaaagaccctgtcttttccttcaagaagtcccacccagtgggggatagtgacctcactctttgtttacttcctgtggcaaacctggtggtaagggaggccagcttggggaggggagcccgggagcaggggtgcaaatggaggcccacacgctacatgtctatttaaaacatatacattaagctaactagtttttataaatgcataaaatatgttctgtcctcctacttggataaatatacctggaaggtcagtttctaatttagaattcccacagttcttaaccgcattccagctgacacctttggaacccccattctgtaagttcagcttctgttcatgaccctccagatgcctgtcctttggccacccctaggatccaagggtgcacagtcagtggcacagtctacccttgggaaaacagacccagggaagaggcttatgcaagcctcattaaatccagaaaatggatttggggtcatttgggcaaggattacctgggtcccagctacttggagtgtggtctggaactgggaggggcaggatgcaggctctaattaagccacttccggaacccacaggctgcttgcccggtggtaggggcagctggagggtggccagagtgcagccccccagagcaggggcccagggaagtcctgggaggaggcagccttgagttggaaggcagacagcagtcacctgtgtggaggaggaactaggacactcttctcggcagacagcagcatgtgcagagacccagagtctagaaaaaacagatctggagaacagcaaggaggtgtaaatggtataaatggccaaggtgcagtgcttcttggggactgccaggtgacaggcacagaaggaagcaagggtacattgtgaagggctttgatgccactttagagcactggttcctgtcctaaagcctgtggagcagtgctgaggattctaagcacaggagtgacagcataagatggctcatttacaaagaccaccccggcagatggattagatccagtagctcagttaggtgggtatggaagtctatgtgaggaatctaggagatctcagtaaaataattcagtgacagaggatgctcaggaaagaaaaggtgactgaggaggaacaagaagtccaggcctagaagcagcaccatccactagaatttgctgcagcgaaggagggcttctgtggctgcactgtctagcgtgggagccatgagactgtgtggctgtcgagcatttagaaggtgaccagtgagactgtgggactgaattttaaacctcatttaaatcgaaatagccacaagtggctagtggctatcacgttagtgcagctctagagcaatttccaggtttctggcttggacagcttatgcggtcatgaggacttccacgaggacagcagtcccaggtggggctggttttatatgtgttgagttggggtactttggaacagccacccagcctggcctccccttgggcatcttgctcccgtgtggcctgctgcagcgacagcccaggctgtggcactgcagggactgcctctcagacctcatcggatccacctgagcatggcagacggctgggcttcaaagcaggttcatctgactgctccttccctctagggtgaagactctacggtaaaaggaatttgatgccttggaaagggagagcggaaactgtgagccctgctttccagccatggcgaaagcgggtacttttgtgcaacccctctcctttcacgttggcctggctagggcggagctgccacgccagtgaccagcgtttctttgggaaaattggacttactccacttccaccttttccactcttcaaatgatcacatttgcatattgggaacagtgtatttgtgaagagactctcaggccttccagggaccaccccccccccccacccgctacagcccaggtcctggttctgtcctccccagatgctgctagagaaactgaacggcacagtgccctgcctgttggataccagcaccatccccgctgaggagctgaccatgagcccttcgcgctcagtggccaactctggcctgagtgacagcctgaccaccagcaccccccggccctccaacggtgactcgccctcccacccctaccaccgaaccttctccccccacttccaccactttgtggagcagtgccttcagcgcaacccggatgccaggtatccctgctggcctgggcctgggcttcgggagagcagagggtgctcaggagggtaaggccagggtgtgaagggacttacctcccaaaggttctgcaggggaatctggagctacacacaggagggatcagctcctgggtgtgtcagaggccagcctggggagctctggccactgcttcccatgagctgagggagagggagaggggacccgaggctgaggcataagtggcaggatttcgggaagctggggacacggcagtgatgctgcggtctctcctcccctttccctccaggcccagtgccagcaccctcctgaaccactctttcttcaagcaggtatcgtagccccttcgttctggttctggttctagttctggttctaacaactcacaatccctttagctttctctcccctccctttgaatgagagaaactaccccgcttccgaagcccctgaaagacactgctccttcctctcatggagttggctccgacagcccgtctgccaccaggccatggttccttgccccatggtgtcctgggacccagagcaacaggatctgtcacccacctctctcttctcccccagatcaagcgacgtgcctcagaggctttgcccgaattgcttcgtcctgtcacccccatcaccaattttgagggcagccagtctcaggaccacagtggaatctttggcctggtaacaaacctggaagagctggaggtggacgattgggagttctgagcctctgcaaactgtgcgcattctccagccagggatgcagaggccacccagaggcccttcctgagggccggccacattcccgccctcctgggcagattgggtagaaaggacattcttccaggaaagttgactgctgactgattgggaaagaaaatcctggagagacacttcactgctccaaggcttttgagacacaagggaatctcaacaaccagggatcaggagggtccaaagccgacattcccagtcctgtgagctcaggtgacctcctccgcagaagagagatgctgctctggccctgggagctgaattccaagcccagggtttggctccttaaacccgaggaccgccacctcttcccagtgcttgcgaccagcctcattctatttaactttgctctcagatgcctcagatgctataggtcagtgaaagggcaagtagtaagctgcctgcctcccttccctcagacctctccctcataattccagagaagggcatttctgtctttttaagcacagactaaggctggaacagtccatccttatccctcttctggcttgggccctgacacctaagtctttcccacggtttatgtgtgtgcctcattcctttcccaccaagaatccatcttagcgcctcctgccagctgccctggtgctttctccaagggccatcagtgtcttgcctagcttgagggcttaagtccttatgctgtgttagtttcgttgtcagaacaaattaaaattttcagagacgctgctggagaa

SEQ ID NO: 1391 - DNA, 11316 bp, Homo sapiens
agttttctctactaacctatttttctttttcttttttagaccaatgatgcgagctcagagtcaatagcatccttctctaaacaggaggtcatgagtagctttctgccagagggagggtgttacgagctgctcactgtgataggtatgtgcaggggccgtccttactctcctgctttctgctccaggggctgctgcagctttctcagcagccccagatgtgtgtacagcagaggccatccactagttaggaggattcatgggcacagacttgcttctgtgggtcttctctgtttttttatgccaagtatgggaagagatcaaacttccaggaaagaagctcttttgccatctttcctttgtggctgccatgtttccggtgtcctggccatagtgagtcagaaaggttggctgagaaggaactgatgagagaaaaatcaagaaatgtgagccatgaacataacagttaaattctgctgggaaaaggaaaaaaaaaaaagtaacagtagtgaaaaatttaacattaagtttcttttgaaatcaagtcccttttttaaaggaaaattttcttaaaaccttttgttgttcttgtccttgcgtatggcattccctttttcttttaggcaaaggatttgaggacctgatgactgtgaatctagcaaggtacaaaccaacaggagagtacgtgactgtacggaggattaacctagaagcttgttccaatgagatggtaacattcttgcaggtaataaaccatgagtgtgtcacatggagggagggtgggctcttggctctgataggaattacaaggaattacaaagaaatgaagggagactaaacgttcggaagttatggaagctttcagtggagaatcctggccatttggcactaaggattgggctgaaatgctgctcagcctaatttatatttcccttttcttctccaaacactcccttctggcttttttattcatttatttattatttagaaagaagctaagtaacttgctcatggcagaggcaggattcaaacccaggccatcttgttccagacacaaggtgcctgccctgccaccagtggccatcttctggctctcagcctcctgtttgcctgatgttcctttctttttcttttctttttttttttttttgagacggattctcactctgtcacccaggctggagtgcagtggcacgatctcggctcactgcaacccccacctcccaggttcaagcgattctcctgccttagcctcccgagtagctgggactataggcgcacaccaccatgcccggctaacttttgtatttttagaaaagacggggtttcttcatgttggccaggctggtctcaaactcctgacttcaggtgatctgcctgccttggtctcccaaagtgctgtgattacaaatgtgagccaccgcatctggcctcttttttttcgagacagggtctcattttattgccctggctggagtacagtggcaggaccacggcttactgcagccttaacctcctgggctcaaatgattctcctgcctcagccccccaagtagctgggactataggcacaccacacctgactaatttttgtattttttgtagagacagagtttcaccatcttgcccaggctggtctcaaactcctgagctcgagcaatcaactcacctcagtctcccaaaatgctaggattacaggtgtgagccactatgcccagtcctgacattcctttctattcgagaagcaagtagccactctctcgttaaactgagagagggggcaggcatggtagctcatgcctgtaatcccaacactttgggagggcaaggcagggagattgcttgagcccgggagtttgagattgcactaccaaactccagcctgggtgacagactgagtccctggctcaaaaaataaaacaaaacaaaacggagagagactgtgagtctagtaagtgcttgggagttagactctcctttcctgatgccagcttagagtcagggcctggggcagttttccttcagtagagttagttgcagcccctcccctccttcatttacaactttttctgaattggtggttacctgatggtgctctaggacctgttcatctgttcatagtagtttggtgggtctgaggatggagcagaagccagtctcagctggccttctcctccatcaactgtgttttctttttcttttttttttctttatttgagacaaggtctggctctgttgctcaggctggagtgcggtggtgcaatcacagctcaccacagcctcaactgctcaggcacaggtgattctaccacttaagcttcccgagtagctgggactaaaggcatgcaccaccatgctcaactaattttttgtatgtttcatatagatggggtttcgccatgttgcccaggctggtctccaactcttgggctcaagtgatctgcctgcctcgcctcccaaagtgctgggattacaggcgtgagccaccatgcccggccatgttttcttttataatagaaacatagttttgggctgggcacagtggctcacgcctgcaatcccagcactttgggaggccaaagcaggcctaggcaacatggcaaaaccctgtctctacaaaaaaatataaaaaattagctaggtatgttgacgtccacctgtggtcgcagctaccagcgaggctgaggtgggaggatgacttgagcctgggaagttcaggctgcagtgagacgggatcacaccactgcactccagcctgggtgacagagcaagaccctgtctcaaaaaaataaaaaagaaaacatttttggccaggtgcagtggcttggtggctcacgcctataatcctagcactttgggaggctgaggcagaaggactgcttgagcccaggagtttgagaccagcctgggcaacacagtgagaccttgtctctacaaataacaacaacaaaatattttttgttttcttatcttaaagaggaattctatacgttggcccttgaaattgagataagcttataacttcagaagtcttcagtcaacagtttgccttcatcatctctgagtcggtgtgctggcaccctttgttgttggcagtttccctatctggcagaggcaaagcagtgctgggtccctgcagaggcagcagggccttgtttttcctatgttggcaggcacctgcttaggctgttcccatgactctgagaacacccagaaagtgccaggtccccctattgtccatgctgccatctttgtgttgagcggcatccttcagtgccatttggttctgacttcagcttcatcattgcttccagggcgagctgcatgtctccaaactcttcaaccatcccaatatcgtgccatatcgagccacttttattgcagacaatgagctgtgggttgtcacatcattcatggcatacggtgagtgggaaagggttcttggtagaaaggggttattgggactctgttgtcagattgcctgtgttttcctcctccattacctttcactgcctccatgcaatccttttctgcaggttctgcaaaagatctcatctgtacacacttcatggatggcatgaatgagctggcgattgcttacatcctgcagggggtgctgaaggccctcgactacatccaccacatgggatatgtacacaggtgcgttcttaggcggcctttcccatgattacagtgggtagctatgcccctgagccttcaggtaaagtgaagtttgactgaagttaatgaagccagagtttaaaatcaaggatctggattcttgctgaagatctctttgctctgaaaagaaacagggcccagcgcgatggctcacgcctgtaatcacagcgcttgggaggccaaggcaggtggatcacaaggtcaggagtttgagaccagcctggccaacatagtgaaaccctgtctctactaaaaatacaaaaattagccgggtgtggtggcacatgcttgtagtcccagtagctgggactacaagctgaggcaggagaatcgcttgaacctgggaggcggaggttgcagtgactggagatcacaccactgcactccagcctgggtggcagagtgagactcttgtctgaaaaaaaaaaaaaaaaaaagagagaaggatctggattctgaccttgccactgacttgggagatggtcacttagcctgttagtgctgaagccactgactttctctttgctgagcagcttggtcttgagtgttgtgtgagaggaacatctgatgtggacctttgtactccactctctgcctccttctttctgtgccccagagtcagtcttatgctgagagaccagggcgaagacagatagcttagtagatagtgtcaggaaatcagctcatagtagggaaaatggtaaaactggacccctacataactcctcatacagagaaggactgcagctggattaaaggcttctatgtaaaatgtgaaactgtagacttaaatagaaggaaatgtgagaaaatgtttttgtgacctgaggcatgtaataatttctcaacattttagaagcacaaaacataagacaaaagattgatgaatttgattagatcaagaagatttctatccaatacaagataccatgaaaaaggttaagaaacaagtgacagagcagatgatattagctttgtcaccacaggagattagtaacagggaaatcttgcaaatcaacaagaaatggacagcaaagcaagaaaaatgggccaaagatatgaagtttacaaaagaggaaaccccaagacaaacccatcataggaagagccactcaaatctcgcaatcagagaaaagcaaatgaaaaacaagatgtcaccttatacacatgagactggcagcggttgggaggctggacgagtcccagtgtggcaaggacggggagcctcctgtccaggtggtggaagatgcccggtgctgccagtcagggtcacagaaccagaaccatcaatgccacttctggatgtacaccctaaagaaaccctcgtgcagacccatcaggggacatgtttggatgtcaccattcacacgtgtgttggttaggggtagtgtgagtgtctgtccccagaaggatggatgagtaaaagtgttagatctcttcccagaaccaaggtgacaattagaagaaaagatgaaaggtacacagctagcaatacagatgtgtctggaaactacagccctgagtgaaaaaggaagaatgggatgcggaacacagtacccctaggtacactttacaagagtcctacagataagaagtacagattaaaagcattcgtaggaggtagggcaagaggtgttctagagcatacaagagcactgaacagtcccagcactctgggaggccaaggtgggtggatcacctgaggtcaggagttcgagaccagcctggccaacatcgcaaaaccctgtctctactaaacatacaaaaattagccgggcatggtggcaggtgcctgtaatcccagctactcaggaggctgaggcaagataatcacttgaacctgggaggtggaggctgcagtgagctgagatcgtgccattgcactccagcctggatgacagagctaaataagcttttaatctggtgatatgtaaatggagtcatgctattttatgtagatttgaagtttttcattaaaacatagttatagctggatgcagtggcagcactttgggaggccaaggggtggatctcttgaggtcaggagttcaagaccagcctggctaacatggtgaaaccctgtctctactaaaaatacaaaaactggctggatgtggtggcatgagcctgtagtcccagctgctcaggagactgaggcaggagaattgcttgaacctgggaggcagaggttgcagtgaactgagattgcgccactgcactccagcctgggcgacagagtgagactctgtctcaacaacaacaacaacaagaacaaaaaacctggttataggccggtcacggtgattcacacctgtaatcccagcactttgggaggccaaagcaggcggatcatttaaagccaggagttcaagactggcatggccaacatggcaaaaccccatctctactaaaaatataaaaattagttgggcgggcccagcgcagtggttcacactggtaatcctagcactttgggaggctgagacgggtggatcacgaggtcgggagatcgagaccatcctggctaacacagtgaaaccctgtctccactaaaaatacaaaaaaaaaaaaattagccgggcgtggtggcgggtgcctgtagtcccagctactcgggaggctgaggcaggagaatggtgtgaacccgggaggcggagcttgcagtgagccgagatggcgccactacactccagtctgtgcgacagagcaagactccgtctcaaaaaaaaaagaaaaaaaaaaattagctgggtgtggtggtgcacacctgtaatcccagctacttggttggctgaggcacaggaattgcttgaacccaggaggcagaggttgcagtgagcctagattgagccactgcactctagccgggtgacagagtgagactcttatctcaatgaaaacaaaaacatggttatgtatatgtaaaatacacatatacgtgtataacacacgcacacaggagagagctggccaggtggagtgtgtgaagaccaaaaatttgtagcaggaggggctcctgctctcgacatgacaccctccccgcttccccaggagtgtcaaagccagccacatcctgatctctgtggatgggaaggtctacctgtctggtttgcgcagcaacctcagcatgataagccatgggcagcggcagcgagtggtccacgattttcccaagtacagtgtcaaggttctgccgtggctcagccccgaggtcctccagcaggtctgtgtgtgggcccagaggagctcccctacccaactcatgattcccaagggagccttcaggcattgcctggagtcgggggctctcaacctcccagtggggtaaaggggttcctggagggagggagccctcagcgtgggcagcgcctgtccactgcagatggatgtggttcctcccagggggtcctaacctctattggatgaaatttcagctccctttagggacccttggcaccctatgagaagagtgagcattttggaaatgtttgctgctctctggatccctgtgctaagcaggggcatggggctggcacttcctgctccttacagagcatcgccagttacaggtggtaaaataccagttagtcttcagtagcacaggcaaggagagtcattagcagcaggtcctgatgtggggacagccatccttttcctctctttagttctaccctttttctaagaacaaagaccaaatggggtaatctgtggccttttttttctggcttagaatctccagggttatgatgccaagtctgacatctacagtgtgggaatcacagcctgtgaactggccaacggccatgtcccctttaaggatatgcctgccacccaggtaagcctgccgcccatcggtttccttcttgcctgcttgccttccacagatgttcgttgagtagctctcacactcaggacacagactaggaatactaagatgaaagaccctgtcttttccttcaagaagtcccacccagtgggggatagtgacctcactctttgtttacttcctgtggcaaacctggtggtaagggaggccagcttggggaggggagcccgggagcaggggtgcaaatggaggcccacacgctacatgtctatttaaaacatatacattaagctaactagtttttataaatgcataaaatatgttctgtcctcctacttggataaatatacctggaaggtcagtttctaatttagaattcccacagttcttaaccgcattccagctgacacctttggaacccccattctgtaagttcagcttctgttcatgaccctccagatgcctgtcctttggccacccctaggatccaagggtgcacagtcagtggcacagtctacccttgggaaaacagacccagggaagaggcttatgcaagcctcattaaatccagaaaatggatttggggtcatttgggcaaggattacctgggtcccagctacttggagtgtggtctggaactgggaggggcaggatgcaggctctaattaagccacttccggaacccacaggctgcttgcccggtggtaggggcagctggagggtggccagagtgcagccccccagagcaggggcccagggaagtcctgggaggaggcagccttgagttggaaggcagacagcagtcacctgtgtggaggaggaactaggacactcttctcggcagacagcagcatgtgcagagacccagagtctagaaaaaacagatctggagaacagcaaggaggtgtaaatggtataaatggccaaggtgcagtgcttcttggggactgccaggtgacaggcacagaaggaagcaagggtacattgtgaagggctttgatgccactttagagcactggttcctgtcctaaagcctgtggagcagtgctgaggattctaagcacaggagtgacagcataagatggctcatttacaaagaccaccccggcagatggattagatccagtagctcagttaggtgggtatggaagtctatgtgaggaatctaggagatctcagtaaaataattcagtgacagaggatgctcaggaaagaaaaggtgactgaggaggaacaagaagtccaggcctagaagcagcaccatccactagaatttgctgcagcgaaggagggcttctgtggctgcactgtctagcgtgggagccatgagactgtgtggctgtcgagcatttagaaggtgaccagtgagactgtgggactgaattttaaacctcatttaaatcgaaatagccacaagtggctagtggctatcacgttagtgcagctctagagcaatttccaggtttctggcttggacagcttatgcggtcatgaggacttccacgaggacagcagtcccaggtggggctggttttatatgtgttgagttggggtactttggaacagccacccagcctggcctccccttgggcatcttgctcccgtgtggcctgctgcagcgacagcccaggctgtggcactgcagggactgcctctcagacctcatcggatccacctgagcatggcagacggctgggcttcaaagcaggttcatctgactgctccttccctctagggtgaagactctacggtaaaaggaatttgatgccttggaaagggagagcggaaactgtgagccctgctttccagccatggcgaaagcgggtacttttgtgcaacccctctcctttcacgttggcctggctagggcggagctgccacgccagtgaccagcgtttctttgggaaaattggacttactccacttccaccttttccactcttcaaatgatcacatttgcatattgggaacagtgtatttgtgaagagactctcaggccttccagggaccaccccccccccccacccgctacagcccaggtcctggttctgtcctccccagatgctgctagagaaactgaacggcacagtgccctgcctgttggataccagcaccatccccgctgaggagctgaccatgagcccttcgcgctcagtggccaactctggcctgagtgacagcctgaccaccagcaccccccggccctccaacggtgactcgccctcccacccctaccaccgaaccttctccccccacttccaccactttgtggagcagtgccttcagcgcaacccggatgccaggtatccctgctggcctgggcctgggcttcgggagagcagagggtgctcaggagggtaaggccagggtgtgaagggacttacctcccaaaggttctgcaggggaatctggagctacacacaggagggatcagctcctgggtgtgtcagaggccagcctggggagctctggccactgcttcccatgagctgagggagagggagaggggacccgaggctgaggcataagtggcaggatttcgggaagctggggacacggcagtgatgctgcggtctctcctcccctttccctccaggcccagtgccagcaccctcctgaaccactctttcttcaagcaggtatcgtagccccttcgttctggttctggttctagttctggttctaacaactcacaatccctttagctttctctcccctccctttgaatgagagaaactaccccgcttccgaagcccctgaaagacactgctccttcctctcatggagttggctccgacagcccgtctgccaccaggccatggttccttgccccatggtgtcctgggacccagagcaacaggatctgtcacccacctctctcttctcccccagatcaagcgacgtgcctcagaggctttgcccgaattgcttcgtcctgtcacccccatcaccaattttgagggcagccagtctcaggaccacagtggaatctttggcctggtaacaaacctggaagagctggaggtggacgattgggagttctgagcctctgcaaactgtgcgcattctccagccagggatgcagaggccacccagaggcccttcctgagggccggccacattcccgccctcctgggcagattgggtagaaaggacattcttccaggaaagttgactgctgactgattgggaaagaaaatcctggagagacacttcactgctccaaggcttttgagacacaagggaatctcaacaaccagggatcaggagggtccaaagccgacattcccagtcctgtgagctcaggtgacctcctccgcagaagagagatgctgctctggccctgggagctgaattccaagcccagggtttggctccttaaacccgaggaccgccacctcttcccagtgcttgcgaccagcctcattctatttaactttgctctcagatgcctcagatgctataggtcagtgaaagggcaagtagtaagctgcctgcctcccttccctcagacctctccctcataattccagagaagggcatttctgtctttttaagcacagactaaggctggaacagtccatccttatccctcttctggcttgggccctgacacctaagtctttcccacggtttatgtgtgtgcctcattcctttcccaccaagaatccatcttagcgcctcctgccagctgccctggtgctttctccaagggccatcagtgtcttgcctagcttgagggcttaagtccttatgctgtgttagtttcgttgtcagaacaaattaaaattttcagagacgctgctggagaa

SEQ ID NO: 1392 - DNA, 469 bp, Homo sapiens
ttacactagatagaccagtttatttgaaaacctgtaacagatctgtctcttaactatctaaaattttaagactatgaattttagcctgtggtcatcaaaccactttggagctaaaaagttccaaagattgagattgaggcagaggatgctggtggcctttggcaggaaaggaggtagaagggtttgtcttgcaaccggacatgggtgtctccttaccctgggtgctagcacccaaagagcaggaaacctaagaaccagccccgcccatccctgccatgctggctggcgccagcgagtgtgagccagggggtgcaaatctgaggctccctgcagtgcttccagggcacatggcttacccttctcccagtccctcagggggaaggccctcccccagctcaggcacctcaaatgcccctctaacctgaagctgcactgaaccatcaggtgcccttgctttccgtttcctccc

SEQ ID NO: 1393 - DNA, 619 bp, Homo sapiens
ttacactagatagaccagtttatttgaaaacctgtaacagatctgtctcttaactatctaaaattttaagactatgaattttagcctgtggtcatcaaaccactttggagctaaaaagttccaaagattgagattgaggcagaggatgctggtggcctttggcaggaaaggaggtagaagggtttgtcttgcaaccggacatgggtgtctccttaccctgggtgctagcacccaaagagcaggaaacctaagaaccagccccgcccatccctgccatgctggctggcgccagcgagtgtgagccagggggtgcaaatctgaggctccctgcagtgcttccagggcacatggcttacccttctcccagtccctcagggggaaggccctcccccagctcaggcacctcaaatgcccctctaacctgaagctgcactgaaccatcaggtgcccttgctttccgtttcctcccaaattttaacagcagtttaaagaagaaaagtaagcctctttgggcagtgagaggctaaggtgaagggaatgacactgaccctgggctaggatggggcctggggcgagtgagtgtcgggggcggcggggagcatttccggccctcctcccc

SEQ ID NO: 1394 - DNA, 284 bp, Homo sapiens
caggcaatgactggcccgggctcttggtttgctaaagagggggctactcctggccacattttccctagagcaagattcagcgtttgaccttttgggatcttgtggtgaggaccttaaaaataggatcctaatgcatcaggaaattcatgagaacccctacctctccacctgcttctcttttccaaacatgctttcattctctagacatcccttctccaagtgagaatttcatagcttttagcaaatgcattgattgttggaaaggacaagcagattaacatttg

SEQ ID NO: 1395 - DNA, 619 bp, Homo sapiens; identical to SEQ ID NO: 1393

SEQ ID NO: 1396 - DNA, 11792 bp, Homo sapiens
tttaatggttgaggaaatagactttacttcctgatgggaaaaattacaaagccatattgcaaaaggcatcaaatataatgagtggagaattgcagtctaatacaatgaacaagggaaagaagttatttaatcattgggggtctcaaaatttcctcaagaagtaaaagaatagaacctacattgtagatttatcaaatcagatcatgcttctaaaactcagcacaatgtttggcacaataactttcaacatatgacagagaaaatgattatgattaatatgatgcacagacatcgtgttagtggtaaagatcgcaaactgataccagatgctaatttctgccacgcaacttattagctatataatcttgggtaatttcctcatctgtaaaatgtgattattaccaaattcataggattgttataaaaattaaagcacttcaaacagtattcataagtgtttaataaaaacaatctataacttaaaaattacaaatttatatagttagcccgttttgcatcactataaaggaataactgaggctgggtaatttataaagaaaaaaggtttgttttggcttacggttctgcaggccatactagcacggcaccaatatttgcctggcctttgatgaaggccccaggaaggttacaatcacaatggaaggcaaagggggagcagactcttttaagccaccagatctcacacgaactgagtgagaactcactcatcaccagtggctctaagccattcatgagggatcatccaccatgacccaaacacttcccatcaggccccacctccacccccaacactggggattacatttaaacatgaaatttgaaggagacaaacatctaaacaatgtcattctacccccagccccccaaatctaatgtctttctcacattgcaaaatataatcatcccttcccaaagtcttaactcattctagcatcactcaaaagtcctaagtctcatttgagactcaaggtaagttcctgccgcctatgagcctctgaaataaaatataagttatttatttccaagatacagttggtggtacaggcaataagtaaaacattcttgtcccaaaagggagaaattggctaaagaaaggggcaacaggatcctggcaagtctgaaacccagctgggaagacattaaactttaaatactggcactttgggaggccgaggcgggtgatcacgaggtcaggagatcaagaccatcctggctaacacagtgaaaccccatctctactaaaaatacaaaaaaaattagctgggcatggtggcgggcacctgtagtcccagctactggggaggctgaggcaggggaatggcgtgaacctgggaggcagagcttgcagtgagccgagatcgtgccactgcactccagcctgggcaacagagcaagactccgtctcaaaaaaaaaaaaaaaaaagccctaacatattccttgattccatgtcccacatcctggcacactggtgcaaggggtgggccctcgaggccgtgggcagctccactcctgtggctttgcagggtgcgtggcttccctcatggttgaagttgagtgcctgtggcttttccaagctcagagtgcaagctgctggtggctctacaattctcaagtctggagggtggcagcacccttcccatagctctactaggcagtgtcctgctggggtctctgtgttggggctccaaccccacatttcagtacgtacactataagcctcccgctgtacatgctctgtataatttccacatacccctcaaatgtgggcaaaacctgtaaatatcatgggaaatcatcatgggaaaaacatcatgggagagtatctgtatttgttttctattactgaataataaattaccacaaacttaaaggcttaatgtgacccatttatttatttatttatttatgatggagtctcactctgtcacccaggctggagtgcagtggcacgatctcagctcactgcaacctctacctccctggttccagctagtctcctgcctcagcctcccaagtagctgggactacaggtgtccaccaccacgctcgtctaatttttgtatttttagtagagacggggtttcaccatgttggccaggccggtcttgaactcttgacctcaggtgatctgcctgcctcggcctcccaaagtgctgggatttacaggtatgagccaccacatccagccaatgtgacccattatctcacagttctatatattagaagtccagcacagaacagatagattctcatactgaggatcatgcaaagctgaaatccaggtgtcagcccaggctgtggttatcatctgaagcttggagtactcttctaagctgactcagatttttggcagaattcagttccttgtggttgcaactgaggtcccaatttttttttcctgcttgctgacaactggaaggtaggtctcatctcctagaggccacctttaggttttagccaatgtggccctctcacatacttcttcaaggcttacaaggagaattcttcttgcaagggttcacttgattaggtcaggccctttcaacagtctcaaagtgagttgtttaggaaccttaactgcatctgccaaattccttcaactttgtcatgtaacataatctaataatggacatatcattatggcagtatcatcaagggatattttatttgtggttaaatgattgctgtgaacacaatctataaatatatgactaataggattttgtaactggctctataaactttaaattttgtatcattttacaatttacaaagtgcttgtatatattttgcatcatttgattttcatgactacctgtcagagaagcacagcagatattagcccaatgttattagtggctcacagcagctaagtgtatgtccaaagctttacagcaaattagtagtggagtcagctgggcttcagatcagagtgtttccaccctacatacagcccaggctctttttgctaaccctgtaattttcaaactgtgtttggtgatgcttgaaggagatttctcagggattactgtaagaactgggggtgatactaatgggtagggctaagtgttgatatggtggctctatttttatattttggaagttcaacccatgctttaataaccactgtcctgcaacagcctatgccttgttaaaggtaaagaagaatatttaggaaaaaaatcagttaaaaaaatggttgagataggtgtatataaaaagtcaagagtcttttccaataaagttttaagaagctgtcatctcttgcagcagctgttgaaccttttaaaaagaaagaaaaaaacaaaagaaccacattatacagttgctttaaaatatacactctggaaaatatgatgaaccccacccctttcactttttaaataagtataaaaaatgcataccttcttaatgtctggtctcttatttttcttttcatgcagacattgactagcaacagagtacatagcttcaactgaagtggaatcagcatcattcatctttttatcaatataatcttcaattgtcttttcttcatcttcaatttcttctttaatatctagctttaaaatgagtgttaaaactttaagagcttcaaatcatagtgaaagaaaatagaatatatattttaattatttaaattaatctactttgtaataacatgtgctctcattttactatcttatcttaaaaccttattaagaattgaagacccagcctgggcaacatggtgaaaccctgtttctactaaaaatacaaaaaattagccaggcatggtggtgcatgcctgtaatcttagctacttggaaggctggcaggagaatcgtttgaacccaggaggcagaggttgcactgagccgagatcacgccactccagcctaggtgacacagcgagactctgtctcaaaaaaaaaaaaaaaaattgaagacatacaggacaaatcctatgtaaataagtacagccatccaccacaaaatgacattttggtcaattggtcaatgacagatcacatatagatggtggtcccataaaattataataccgtatttttactgtacctcttttatgtttacatacacaaacacttaccagtgtgttacaattgcttacagtattcaggagagtattatgctgtatagcatacgtttgtagcctaggagcaataccatatagcccaggtatgtcgtaggtcatatcatctaggtttgtgtaagtacactctatgaggttcacacaatgaaactgcctaacaacacatttctcggaatgtattcctgtcattaggcaacacatggctgggtatgtgtatatatatatatataaatatatatatatacacacatatatatatacaaatgtatatttaattatttatacctcctagatacttccacccatttgccttccaatttttatatctatgttatgagctaattgcttatatgttcccattagcagcatttactaggtgggcagcacagggtggtctgcttcttgatgtgcttctaatagcgcaattccaacttttggaccctgactcctcctccctgtacccaacaaatttctctatgggtactaaggttgttgaatcaaagagaaaaaaggaggggaaaaaatagggagcaggccatgataaaaaaaaattaacagggagagaagtgtaggaataagatcgtggagttgggtgaatcatggtcccccaaaacatgtctatgtcataattcctggaacctgtgaatgtgatcttattaggaaaagaagggcccttttaggtgtaattaagtatcctgagatgagatcattccagattatggctaatcctggaggtaagccctacatccaatgagcaaggcaagattctctctggagtctccagagagagcatagtcttgcccataccttgatttcagactctggcctccagaactatgagcaaataaatttctgttgctttaagtcacacagtttttggtatatttttataacagtcctaggaagctaatacagatgaaaaaaactattcatgagaggtaggatgtaaactcttcaaaaccactttcaaagataaattctgaaaatgtttgacaacggcagaatctagtgacataacggttcttcagatgatcacttttttaaaaactgtgcttgtatgaaaatcttattactttagagtcacatcacagtcaaaccttaagaatgggtgaaagagtaaaaccttctccaaagatttatgattttcactattatatgatgaaatgcaaaacttgtgactgagatacagcttatgtttttctgcatttcattcttactcaagccaaagttttgaggcttttatatattttgaaggaaaaagtcttaggcaaaacgatggaaaacttaggtaaagtatatgctgcaacttagtgaatcaatctgggttcaatcttgagccctccatacccacagaggaggtcataggaactccaacttgaaggcagttggtcagaagttctggaggcctaaacttacaactggtgtctggtgggatggcagtcttggggactgagctcttaacctgtgggatctgactctgatgctatgtccaggaatgtagtgtcagaattaaattggaggagatccagctgacttccgctgcaaagtagattgcctgcttgttggtggggagaaacccttcccagtcgcatttggtcacagaaatcttctgtgttgattgttgttgtggtgtgagagcaaaggaaaaacatgatatgaatttttcctaacaatagcaaatttggtatgttttttattgtaactttgtaaataaaataccccatgatagaaataagtgataacttttactagcaattttattctgaaagaaatttgaatggaagccttttttttcccccctctgaaaatgctggaaacactgttattaacagtagccaccccaaaagtgacacaaaataaacataagctaaagaggacctcagaaatcatttagttctattctcattttacccacaaagaaatcagaacaaagaatatataagtgacttttctaggcttcacaaatacttcatgggagagctgagaatgaaaatatttaatgctttttccatatgctgtcgtgtaatagccaatggaaagattgccaatagaaaatgttatttttagatgtcaaatttatccatataaatttagactacaaaagcagagaaaaaaggattgaggaaaatgaatatttcatttaccaataactgaggttcacggtgttcatccacagctggaagtccagttattatttctagtaaaacctatgaagacaaaaaaaatcattaatataatacacaagataggctgggcacagtggctaacgcctgtaatcccagcactttgggagacagatgtgggaggataacttgagccccggacttcacgaccagcctgggcaacagtgagaccctgtctctacaaaaaattttaaaaaaacattggctgggtgtggtggcacacacctgtagtcccagctacttgggaggctgaagtgagaggatcactagaacctgggaggttgaggctacagcgagccataattccaccactgcacttcagtctgggtgactgagtgagaccttgtctctctaaaaaatatatatattatacatgatattaataaattatatatataatactcaagacaaaaactagaatgaatatgaatcttgcttacaaaatttgattaatcattctatacaaagctatgtcttttagatattaaagtggaaagaacatgagctttgggcatttctcaccatccctccttcagggacatcttggaccccaacatgaccataagcagctcttttctattggcaacttactaaagagtcagccccactcaacatatgttctaaggactcccaatccttttcctgcctcttggggattcttcacaagaataatttactctggctcttaggagaatattattttctaaacattaggcatattctatagccctatgccttattttcagtgctatgaagttaaatttccatatatgaaacacgtatgaaaaaataaaatgaagaaaaagcccccggcttcttcaaccacccacacctatctcttgctctatcttaaaagttattgggaatagagaggtagattagtaaatgtcaaaaaatgtgagactaaagtatatactgtatgacatgattcatttaatgcattaggtgtcatgctaattcataaagacagatggcaagaaaatcatttcttgtagtcatttcaaaaatcaactcaaaagttttacacattggaagaagtttttataaactttctggtataagtagaggttaatgtgaaaaacttatattgttacataagagagataaacaagatgggtgtattaaataatattctcttcattttcacaattatagcagaatgattatttttaataattatgtatacggaacttaccacaccaaagctgtaaatatcagatttgggtgttatttctccacgcaaagcttctggtgccatataagctgttgttcccacaattctgctagtcatgactgtctgggcaaacttctcagaagcccgtgcaaggccaaagtcagatattttagcagtaaaagcttcatccagtaagatatttgcactgaaaaaaatgtaaagtttgaagaaaaaaatgtttttcccaccccaaaaaagtcaaacagttccttagctagatgtacgtatgtatgcatgtatatatgtatatgcatacatgcatatgtacatacatatttacagagtgtaacgttttatagtatgcatcataaaagcctaaagtttatagaaataaacctagaattcagattatagctaaagagaagcaactgtcctctttttttatgtttcttgaggaaaacatttaggagaataaaaatgaaataaaactgtctacattagtaagagatattttcattattccacaaatcatttattatagggtaaattactacaaagtcttccaaggcacctttattaattcctttcttagtatgtatcaattcatttcaaaacaaatttccaaccaaagtatctcaattatgaatttctttattcttttgttctgtactatctggcttttgaagagaaaaaaatatggccaaaatatctcaattaattcattatgtgctttcatactttaattcaacacaatcttattgagaactccctatgttgtgtagtatttaagctcactgctgggcatggcggagtcttaaaatcttgtctgtgacaaaggcataaataattttttaaaacaatggtaatattaggtacaaaatgctgagagaacaaccatgtgcctggaaaaagtaggaaaaatttcaaacagagggtgaaaagtgtgcttagtattgaaggattattagaagttaatagttatatgagggaaagaaaggcactccaggcaaatggagtaacaggtacaaagtgacaaaaacatgatatggtatacatggtcaacttcaaggaacgagtgtccaagaaacatggagataatttgcattttatcctgtgagcaacaggataccagctaaagttttcacagtaggaaactgatgttattagacttaacttttaggaccatgacctagtagtgtggtagtgaatagatgagaactgataggctggatttaggttgactacgaaggtttgtaacaaagcaaatgggagataatgagggtttaaatggtcataacatgggataaatggaaagtgaaaattttgaggctcacacaacagaattttgtaattagcatgatatagagaatgagaacgtgttcagtttgagagacagaatgaacagtgacttcactggatcagaaaggaaatgtgggaagactttaggttgggaagagctgatgagtttgatttctaatgttctgacttaaaggctactgtgggatacccagatgaagtgtttttggtacggggatactaaaaatccaggattggaagctaataatacagattcaaaagacactcacatataagtagcagttaaaattaacataatatcactcagcaaaaacatacagagagaggccaggcgggtggctaatgcctgtaatcccagcactttgggaggccaaggcgggcggatcacctgaggtcgggagttcaagaccaacctgatcaacatggagaaaccccatctctactaaaaatacaaaattagcagagcgtggtggtggatgcctgtaatccaagctactcaggaggctgaggctcgagaatctcttgaacccgggaggcgacggttgcagtgagccaagaccgcgccatcgcactccagcctgggcaacaagagtgaaacttgtctcaaaaaaaaaaaaaaaaagaacatacagggagaaaagagacaatgatataagaacacaagaaagtaccaatccatgaaggataggagatggcgtttcttttctcatctagggtcagttcctctgcttgagctgctttctacattctcagtaaccctactgaacacatcatctcatttctctcttccatactatcctctcccttttaatctggatccttcctataggcacataagcacagcttaatctctgccagcttaaaaaaagtttcctgaatgacttatctatttctagctgtccccttcactagtaaaatgtcttaaaagacttgtctatactcctatctcagttctctagctctcactctctcaactacaatgtgatttctaaaccaactactacctggaaatgggtttccataaagtcaccaaagaccatggtgatgctaatccaatgattaaagcccttgactctttttgactactccctcttgggaaacactttctttcctcgttttcagggactccacactctccaggttttcatcttacccttctctgtatgtgtacttccttagattcctttttgtgatcatctcttctatttggccattaagtcttagggttccccaagacttaatcttgtgaccttttcttaatctacatctcccctcaagtgaatacagtcacttcaattatcacctgtatgcaagtaatacacatttatatcttcagctcagacctccagctccaaatctgtatatcacactgtctaccatctctactactacatcttaaaagcaccccaaacacaacatgtacaaaagagaattcacattttctaaccatctctctaaccccaacctaaccaagtcttttttcagtcctttctacataagtgaatcatgccataatcattccagaatgcaagtctggatgccattattccaggagtcattcctgatacttcgctcttcctgaacccctgcatagccaaggtatcaacaagttttgccattttaatctttctaatctgctcccctctcttcttatgaactgccacctatgatagcctactaactgcctcttcttacaaactgttctctacactagagttaaaatcatctttgcaaaacttaaatatgatgccatattcctacttaaaattttcaacggcatctcattacacttgtgataaaactaaaagccttaccttgatctattaagtcctataggacttagcttcctacacttctctgtagttttatctccaatccaccaccctataactttctgcatctcagtcatactgcatttacttcatttttttttagacagagtcttactttattacccaggctggggagcactggcacgatcatagctcacttcaaccttgaactcctgggctcaagcctcctccctcctcagctgccctagtgtctggaactgtaggcatgcaataccacgtttgactagtttttttgtagagatgaggtcttgctatgttgttcagggaacatagtcaggtctgctactcctggcctcaaatgatcctcctatcttggctcccaaagcatatttcatttcttgtaactcatcatgctcccatattctgtctcaccactggtcttacaaatgcagttccttctgcctagaatgttcttctccccatcatccattctacagttaccctcaaattgtgtctacttatttcctgcccattctttgaatctctgcttaaatgtcactttcttggaaacccttctttatattaatcctatgtactatactatataataataatacatataatatatatgtgaactgtacatattaacattctataattattttgtgcttatttgattgatgttgagctctatatatgaatatgttacttatagtaggtaaatatttaactagataaatacacaagaaagaaagagaactgaaaagtactcatggaggatgaaggtgattcagaaaagaatagtgatccataaactaagaaaacaactaatttccataaggcaaaagtgtcaagaagaacagaataaactactattaaaacaaacaaaaaaggtcaagtaggatgagtactggaagtaggtcactgggcttggaataaaggagattatagatgtccttattgagaagagctttcatggagtgatgggaaaaaagtccagatgctctaggttaagacctgcatatgaatcgtgaatagagtgacagcaaattattctttaaagacagctttccaaaaacttttaaacagtagcatttaccttttaatatctctatgaatatgatgattttcatgtagaaaattgatgccattagctgcaccctgagcaatcttgcatctcatgtgccaagaaagtggtggagtaccatcc

SEQ ID NO: 1397 - DNA, 11792 bp, Homo sapiens
tttaatggttgaggaaatagactttacttcctgatgggaaaaattacaaagccatattgcaaaaggcatcaaatataatgagtggagaattgcagtctaatacaatgaacaagggaaagaagttatttaatcattgggggtctcaaaatttcctcaagaagtaaaagaatagaacctacattgtagatttatcaaatcagatcatgcttctaaaactcagcacaatgtttggcacaataactttcaacatatgacagagaaaatgattatgattaatatgatgcacagacatcgtgttagtggtaaagatcgcaaactgataccagatgctaatttctgccacgcaacttattagctatataatcttgggtaatttcctcatctgtaaaatgtgattattaccaaattcataggattgttataaaaattaaagcacttcaaacagtattcataagtgtttaataaaaacaatctataacttaaaaattacaaatttatatagttagcccgttttgcatcactataaaggaataactgaggctgggtaatttataaagaaaaaaggtttgttttggcttacggttctgcaggccatactagcacggcaccaatatttgcctggcctttgatgaaggccccaggaaggttacaatcacaatggaaggcaaagggggagcagactcttttaagccaccagatctcacacgaactgagtgagaactcactcatcaccagtggctctaagccattcatgagggatcatccaccatgacccaaacacttcccatcaggccccacctccacccccaacactggggattacatttaaacatgaaatttgaaggagacaaacatctaaacaatgtcattctacccccagccccccaaatctaatgtctttctcacattgcaaaatataatcatcccttcccaaagtcttaactcattctagcatcactcaaaagtcctaagtctcatttgagactcaaggtaagttcctgccgcctatgagcctctgaaataaaatataagttatttatttccaagatacagttggtggtacaggcaataagtaaaacattcttgtcccaaaagggagaaattggctaaagaaaggggcaacaggatcctggcaagtctgaaacccagctgggaagacattaaactttaaatactggcctttgaaaaggccgaggcgggtgatcacgaggtcaggagatcaagaccatcctggctaacacagtgaaaccccatctctactaaaaatacaaaaaaaattagctgggcatggtggcgggcacctgtagtcccagctactggggaggctgaggcaggggaatggcgtgaacctgggaggcagagcttgcagtgagccgagatcgtgccactgcactccagcctgggcaacagagcaagactccgtctcaaaaaaaaaaaaaaaaaagccctaacatattccttgattccatgtcccacatcctggcacactggtgcaaggggtgggccctcgaggccgtgggcagctccactcctgtggctttgcagggtgcgtggcttccctcatggttgaagttgagtgcctgtggcttttccaagctcagagtgcaagctgctggtggctctacaattctcaagtctggagggtggcagcacccttcccatagctctactaggcagtgtcctgctggggtctctgtgttggggctccaaccccacatttcagtacgtacactataagcctcccgctgtacatgctctgtataatttccacatacccctcaaatgtgggcaaaacctgtaaatatcatgggaaatcatcatgggaaaaacatcatgggagagtatctgtatttgttttctattactgaataataaattaccacaaacttaaaggcttaatgtgacccatttatttatttatttatttatgatggagtctcactctgtcacccaggctggagtgcagtggcacgatctcagctcactgcaacctctacctccctggttccagctagtctcctgcctcagcctcccaagtagctgggactacaggtgtccaccaccacgctcgtctaatttttgtatttttagtagagacggggtttcaccatgttggccaggccggtcttgaactcttgacctcaggtgatctgcctgcctcggcctcccaaagtgctgggatttacaggtatgagccaccacatccagccaatgtgacccattatctcacagttctatatattagaagtccagcacagaacagatagattctcatactgaggatcatgcaaagctgaaatccaggtgtcagcccaggctgtggttatcatctgaagcttggagtactcttctaagctgactcagatttttggcagaattcagttccttgtggttgcaactgaggtcccaatttttttttcctgcttgctgacaactggaaggtaggtctcatctcctagaggccacctttaggttttagccaatgtggccctctcacatacttcttcaaggcttacaaggagaattcttcttgcaagggttcacttgattaggtcaggccctttcaacagtctcaaagtgagttgtttaggaaccttaactgcatctgccaaattccttcaactttgtcatgtaacataatctaataatggacatatcattatggcagtatcatcaagggatattttatttgtggttaaatgattgctgtgaacacaatctataaatatatgactaataggattttgtaactggctctataaactttaaattttgtatcattttacaatttacaaagtgcttgtatatattttgcatcatttgattttcatgactacctgtcagagaagcacagcagatattagcccaatgttattagtggctcacagcagctaagtgtatgtccaaagctttacagcaaattagtagtggagtcagctgggcttcagatcagagtgtttccaccctacatacagcccaggctctttttgctaaccctgtaattttcaaactgtgtttggtgatgcttgaaggagatttctcagggattactgtaagaactgggggtgatactaatgggtagggctaagtgttgatatggtggctctatttttatattttggaagttcaacccatgctttaataaccactgtcctgcaacagcctatgccttgttaaaggtaaagaagaatatttaggaaaaaaatcagttaaaaaaatggttgagataggtgtatataaaaagtcaagagtcttttccaataaagttttaagaagctgtcatctcttgcagcagctgttgaaccttttaaaaagaaagaaaaaaacaaaagaaccacattatacagttgctttaaaatatacactctggaaaatatgatgaaccccacccctttcactttttaaataagtataaaaaatgcataccttcttaatgtctggtctcttatttttcttttcatgcagacattgactagcaacagagtacatagcttcaactgaagtggaatcagcatcattcatctttttatcaatataatcttcaattgtcttttcttcatcttcaatttcttctttaatatctagctttaaaatgagtgttaaaactttaagagcttcaaatcatagtgaaagaaaatagaatatatattttaattatttaaattaatctactttgtaataacatgtgctctcattttactatcttatcttaaaaccttattaagaattgaagacccagcctgggcaacatggtgaaaccctgtttctactaaaaatacaaaaaattagccaggcatggtggtgcatgcctgtaatcttagctacttggaaggctggcaggagaatcgtttgaacccaggaggcagaggttgcactgagccgagatcacgccactccagcctaggtgacacagcgagactctgtctcaaaaaaaaaaaaaaaaattgaagacatacaggacaaatcctatgtaaataagtacagccatccaccacaaaatgacattttggtcaattggtcaatgacagatcacatatagatggtggtcccataaaattataataccgtatttttactgtacctcttttatgtttacatacacaaacacttaccagtgtgttacaattgcttacagtattcaggagagtattatgctgtatagcatacgtttgtagcctaggagcaataccatatagcccaggtatgtcgtaggtcatatcatctaggtttgtgtaagtacactctatgaggttcacacaatgaaactgcctaacaacacatttctcggaatgtattcctgtcattaggcaacacatggctgggtatgtgtatatatatatatataaatatatatatatacacacatatatatatacaaatgtatatttaattatttatacctcctagatacttccacccatttgccttccaatttttatatctatgttatgagctaattgcttatatgttcccattagcagcatttactaggtgggcagcacagggtggtctgcttcttgatgtgcttctaatagcgcaattccaacttttggaccctgactcctcctccctgtacccaacaaatttctctatgggtactaaggttgttgaatcaaagagaaaaaaggaggggaaaaaatagggagcaggccatgataaaaaaaaattaacagggagagaagtgtaggaataagatcgtggagttgggtgaatcatggtcccccaaaacatgtctatgtcataattcctggaacctgtgaatgtgatcttattaggaaaagaagggcccttttaggtgtaattaagtatcctgagatgagatcattccagattatggctaatcctggaggtaagccctacatccaatgagcaaggcaagattctctctggagtctccagagagagcatagtcttgcccataccttgatttcagactctggcctccagaactatgagcaaataaatttctgttgctttaagtcacacagtttttggtatatttttataacagtcctaggaagctaatacagatgaaaaaaactattcatgagaggtaggatgtaaactcttcaaaaccactttcaaagataaattctgaaaatgtttgacaacggcagaatctagtgacataacggttcttcagatgatcacttttttaaaaactgtgcttgtatgaaaatcttattactttagagtcacatcacagtcaaaccttaagaatgggtgaaagagtaaaaccttctccaaagatttatgattttcactattatatgatgaaatgcaaaacttgtgactgagatacagcttatgtttttctgcatttcattcttactcaagccaaagttttgaggcttttatatattttgaaggaaaaagtcttaggcaaaacgatggaaaacttaggtaaagtatatgctgcaacttagtgaatcaatctgggttcaatcttgagccctccatacccacagaggaggtcataggaactccaacttgaaggcagttggtcagaagttctggaggcctaaacttacaactggtgtctggtgggatggcagtcttggggactgagctcttaacctgtgggatctgactctgatgctatgtccaggaatgtagtgtcagaattaaattggaggagatccagctgacttccgctgcaaagtagattgcctgcttgttggtggggagaaacccttcccagtcgcatttggtcacagaaatcttctgtgttgattgttgttgtggtgtgagagcaaaggaaaaacatgatatgaatttttcctaacaatagcaaatttggtatgttttttattgtaactttgtaaataaaataccccatgatagaaataagtgataacttttactagcaattttattctgaaagaaatttgaatggaagccttttttttcccccctctgaaaatgctggaaacactgttattaacagtagccaccccaaaagtgacacaaaataaacataagctaaagaggacctcagaaatcatttagttctattctcattttacccacaaagaaatcagaacaaagaatatataagtgacttttctaggcttcacaaatacttcatgggagagctgagaatgaaaatatttaatgctttttccatatgctgtcgtgtaatagccaatggaaagattgccaatagaaaatgttatttttagatgtcaaatttatccatataaatttagactacaaaagcagagaaaaaaggattgaggaaaatgaatatttcatttaccaataactgaggttcacggtgttcatccacagctggaagtccagttattatttctagtaaaacctatgaagacaaaaaaaatcattaatataatacacaagataggctgggcacagtggctaacgcctgtaatcccagcactttgggagacagatgtgggaggataacttgagccccggacttcacgaccagcctgggcaacagtgagaccctgtctctacaaaaaattttaaaaaaacattggctgggtgtggtggcacacacctgtagtcccagctacttgggaggctgaagtgagaggatcactagaacctgggaggttgaggctacagcgagccataattccaccactgcacttcagtctgggtgactgagtgagaccttgtctctctaaaaaatatatatattatacatgatattaataaattatatatataatactcaagacaaaaactagaatgaatatgaatcttgcttacaaaatttgattaatcattctatacaaagctatgtcttttagatattaaagtggaaagaacatgagctttgggcatttctcaccatccctccttcagggacatcttggaccccaacatgaccataagcagctcttttctattggcaacttactaaagagtcagccccactcaacatatgttctaaggactcccaatccttttcctgcctcttggggattcttcacaagaataatttactctggctcttaggagaatattattttctaaacattaggcatattctatagccctatgccttattttcagtgctatgaagttaaatttccatatatgaaacacgtatgaaaaaataaaatgaagaaaaagcccccggcttcttcaaccacccacacctatctcttgctctatcttaaaagttattgggaatagagaggtagattagtaaatgtcaaaaaatgtgagactaaagtatatactgtatgacatgattcatttaatgcattaggtgtcatgctaattcataaagacagatggcaagaaaatcatttcttgtagtcatttcaaaaatcaactcaaaagttttacacattggaagaagtttttataaactttctggtataagtagaggttaatgtgaaaaacttatattgttacataagagagataaacaagatgggtgtattaaataatattctcttcattttcacaattatagcagaatgattatttttaataattatgtatacggaacttaccacaccaaagctgtaaatatcagatttgggtgttatttctccacgcaaagcttctggtgccatataagctgttgttcccacaattctgctagtcatgactgtctgggcaaacttctcagaagcccgtgcaaggccaaagtcagatattttagcagtaaaagcttcatccagtaagatatttgcactgaaaaaaatgtaaagtttgaagaaaaaaatgtttttcccaccccaaaaaagtcaaacagttccttagctagatgtacgtatgtatgcatgtatatatgtatatgcatacatgcatatgtacatacatatttacagagtgtaacgttttatagtatgcatcataaaagcctaaagtttatagaaataaacctagaattcagattatagctaaagagaagcaactgtcctctttttttatgtttcttgaggaaaacatttaggagaataaaaatgaaataaaactgtctacattagtaagagatattttcattattccacaaatcatttattatagggtaaattactacaaagtcttccaaggcacctttattaattcctttcttagtatgtatcaattcatttcaaaacaaatttccaaccaaagtatctcaattatgaatttctttattcttttgttctgtactatctggcttttgaagagaaaaaaatatggccaaaatatctcaattaattcattatgtgctttcatactttaattcaacacaatcttattgagaactccctatgttgtgtagtatttaagctcactgctgggcatggcggagtcttaaaatcttgtctgtgacaaaggcataaataattttttaaaacaatggtaatattaggtacaaaatgctgagagaacaaccatgtgcctggaaaaagtaggaaaaatttcaaacagagggtgaaaagtgtgcttagtattgaaggattattagaagttaatagttatatgagggaaagaaaggcactccaggcaaatggagtaacaggtacaaagtgacaaaaacatgatatggtatacatggtcaacttcaaggaacgagtgtccaagaaacatggagataatttgcattttatcctgtgagcaacaggataccagctaaagttttcacagtaggaaactgatgttattagacttaacttttaggaccatgacctagtagtgtggtagtgaatagatgagaactgataggctggatttaggttgactacgaaggtttgtaacaaagcaaatgggagataatgagggtttaaatggtcataacatgggataaatggaaagtgaaaattttgaggctcacacaacagaattttgtaattagcatgatatagagaatgagaacgtgttcagtttgagagacagaatgaacagtgacttcactggatcagaaaggaaatgtgggaagactttaggttgggaagagctgatgagtttgatttctaatgttctgacttaaaggctactgtgggatacccagatgaagtgtttttggtacggggatactaaaaatccaggattggaagctaataatacagattcaaaagacactcacatataagtagcagttaaaattaacataatatcactcagcaaaaacatacagagagaggccaggcgggtggctaatgcctgtaatcccagcactttgggaggccaaggcgggcggatcacctgaggtcgggagttcaagaccaacctgatcaacatggagaaaccccatctctactaaaaatacaaaattagcagagcgtggtggtggatgcctgtaatccaagctactcaggaggctgaggctcgagaatctcttgaacccgggaggcgacggttgcagtgagccaagaccgcgccatcgcactccagcctgggcaacaagagtgaaacttgtctcaaaaaaaaaaaaaaaaagaacatacagggagaaaagagacaatgatataagaacacaagaaagtaccaatccatgaaggataggagatggcgtttcttttctcatctagggtcagttcctctgcttgagctgctttctacattctcagtaaccctactgaacacatcatctcatttctctcttccatactatcctctcccttttaatctggatccttcctataggcacataagcacagcttaatctctgccagcttaaaaaaagtttcctgaatgacttatctatttctagctgtccccttcactagtaaaatgtcttaaaagacttgtctatactcctatctcagttctctagctctcactctctcaactacaatgtgatttctaaaccaactactacctggaaatgggtttccataaagtcaccaaagaccatggtgatgctaatccaatgattaaagcccttgactctttttgactactccctcttgggaaacactttctttcctcgttttcagggactccacactctccaggttttcatcttacccttctctgtatgtgtacttccttagattcctttttgtgatcatctcttctatttggccattaagtcttagggttccccaagacttaatcttgtgaccttttcttaatctacatctcccctcaagtgaatacagtcacttcaattatcacctgtatgcaagtaatacacatttatatcttcagctcagacctccagctccaaatctgtatatcacactgtctaccatctctactactacatcttaaaagcaccccaaacacaacatgtacaaaagagaattcacattttctaaccatctctctaaccccaacctaaccaagtcttttttcagtcctttctacttatgtgaatcatgccataatcattccagaatgcaagtctggatgccattattccaggagtcattcctgatacttcgctcttcctgaacccctgcatagccaaggtatcaacaagttttgccattttaatctttctaatctgctcccctctcttcttatgaactgccacctatgatagcctactaactgcctcttcttacaaactgttctctacactagagttaaaatcatctttgcaaaacttaaatatgatgccatattcctacttaaaattttcaacggcatctcattacacttgtgataaaactaaaagccttaccttgatctattaagtcctataggacttagcttcctacacttctctgtagttttatctccaatccaccaccctataactttctgcatctcagtcatactgcatttacttcatttttttttagacagagtcttactttattacccaggctggggagcactggcacgatcatagctcacttcaaccttgaactcctgggctcaagcctcctccctcctcagctgccctagtgtctggaactgtaggcatgcaataccacgtttgactagtttttttgtagagatgaggtcttgctatgttgttcagggaacatagtcaggtctgctactcctggcctcaaatgatcctcctatcttggctcccaaagcatatttcatttcttgtaactcatcatgctcccatattctgtctcaccactggtcttacaaatgcagttccttctgcctagaatgttcttctccccatcatccattctacagttaccctcaaattgtgtctacttatttcctgcccattctttgaatctctgcttaaatgtcactttcttggaaacccttctttatattaatcctatgtactatactatataataataatacatataatatatatgtgaactgtacatattaacattctataattattttgtgcttatttgattgatgttgagctctatatatgaatatgttacttatagtaggtaaatatttaactagataaatacacaagaaagaaagagaactgaaaagtactcatggaggatgaaggtgattcagaaaagaatagtgatccataaactaagaaaacaactaatttccataaggcaaaagtgtcaagaagaacagaataaactactattaaaacaaacaaaaaaggtcaagtaggatgagtactggaagtaggtcactgggcttggaataaaggagattatagatgtccttattgagaagagctttcatggagtgatgggaaaaaagtccagatgctctaggttaagacctgcatatgaatcgtgaatagagtgacagcaaattattctttaaagacagctttccaaaaacttttaaacagtagcatttaccttttaatatctctatgaatatgatgattttcatgtagaaaattgatgccattagctgcaccctgagcaatcttgcatctcatgtgccaagaaagtggtggagtaccatcc

SEQ ID NO: 1398 - DNA, 1050 bp, Homo sapiens
cgtcttgcctgggcattgctggtgggagatctcctcagagcaccagaggtggacgctgactttgcacatcttacatcgcaagccctgtttggagtttcctaggaagaatttgggttcagcaattgaggacacccccgtgggcaacaggcaaaggaggggcacattaggggatgaggagagcaggggttgggcattctcatgccagccttgaggcccagcacctacccctcacacagtcagggtatgagggagcacggaagccagagtcgttagtaaacatggcagtgacactgaggcagtgacactgagtatacccccacccttggtggtgctcctctctctgccttgggtaagaggcacagttgggggtgggtgcaatggctcacatctgtaatcccagcactttgggaggctgaggtggatggattgcttgagcccagggtttgaccagcctgagcaacatggcaaaaccccatctctacaaaaaatattttaaaattagctgggcatggtagtgtgtgcctgcagtcccagctactacagaggctgaggcaggaggatcccttgagccagggaagtggaggttgcagtgaaccaagattgcatcactgcactccagcctgggagacagagcaagactctgtctcaaaaaaaaaaagaggcacagaggcacaattagtattggggctcctgaacagcaagagcccaataatattgggcgcaacatgagcccactccccagtacccacgctggcccctccccgtggccgcctcagtgcccaggcacctacctacgatgagctggtggcacagctcacaagggctagctcgcttgaagacatgttcctggaagctgtgcagcctcactggtttgagcgctgccagggggcgtgggactgggcatggggagggggatggggtagccaggcccctgtccgaggctgtgggtggtggggagggagggggcagtggggttgggggcgtcagcagcacctcggtggggcacttgagctcagagcccgagcgaaggaagaagttctccaagctctt

SEQ ID NO: 1399 - DNA, 9692 bp, Homo sapiens
taaagaactaatcaaatctctttaatgtttaagcctatttgtatctgatattttgttacttgcagccaaaagcagcctagctgatacacaatcgtccccctgccccctggtcacccttacagctcagagatgaactctagagaaatgcaaagccccagttgggagccagccggagactctcctggtctttagctgggaaaataggactgtgggggtgggggcagcatcagatggatcacagactccaagcaaaggcatgataggagtttatttacagacaagacacagcaaccagcacccactcgggctctgaccaggggaggtggtagacaagaccccagatatatataaatatacatataggtcccagcaccatcagcaccagaacgttccccagccaggtccctgccagaaggaccaagagtcaggcaggattgaggacatagaaaggagagggccccagtctttgccaggtatcagtgatcacctgttatggtccccatgtcagaggaagaaactacccttggccttgaagtgtggacactgaggagcatgaggacggagagaccctctggaggcgcccccattcctgtgtccagcctgtgccctcaatgccaaggccacagaagcgaagtgccagcaggagcagcttggggaatggagacactgcaggcccctccaggaccatccaggagccaggcatggagttggggtcctaggccatggctgcccatcacacaggagcctcccccagtttgctggtggcacttgtgactcgcttattctcccggaggtttcggaggcgggcgctgaggctgctgatctcttccacataggcctggggcacccaaccccttctcaccatctgccaggcggaccccttccagccagcctagggacacataggccaagaacaacagcatcaaaggggtaccagggccaggcctggaagggaacaccacagccctgatgcaagctttgtctgcacccttggggccaaggtgacatcatctcagcatctctcagctccaggaaggaccctgtcttgagctgtcttgcagatgaacttctgacctgtttttcctgatatcctctgaaagggtatttcccactctcccccatcactctccatcctatatctttacaagcaggaagttcctcctctcatctaacctgattcccacatgctgtggcagatcaatacttgcagaacctttccctgtgatatcttagtcatctagccacctcctgcccacccaagccccatcagggacactttcccaggaggccccctcaccgtcactggtccaggtcctcactgacaggatgtcagtcttctccaaggtcagctcatctgggtgcagtgccttgtatgtcctaacacactgaacctgggggcaatctgacagcccaagggaggctcagggagtcccaagggcaggatggcagggggaggagcatgggtagggcagggaggggcagtaggaggaagtaagggggtgggaaggtggccattgaggcttctattcctctgccactcccatgccacaggcccacgttcaagcaggcataccctctgcccaccctggcctatctcctctcctaccctaaacacaagcgcaggattaatccagtccctcccagcttcagtttctgcctctataccaagggctgtcccctccccagctcaagccaacaccttgcttgtgaccttcagaccccaacgtccaactgcccccagataccccacagaaaacagtaacggccctgcaatgtgcccctaacatcactctggtgctccctttggcccatccttcccaactgggattcaagctgcatcgctcccctgtttaaagccctccagggcttcccagtcctcttagaataaaatccaaagtcctccctaggccctacaaggcccttcatggtctggcatcgccccctgctatcctcgtcttctcccctccactttccctccctactctcccctccactttccctccctactttcccctccactttccctccctactcgctcacaaagctccagccacaccagcctccctgctgttcctcactctaagctccctcctgccccagggcctttgtgctggctcttccttctgccagatgctcttccccagatcttttcgtgacaacctctcctcatccttcaggggtcaaatgttaattgccagggacctcccctgaccacctgggaatagagagcttacccccacccaggtgggactcctagctcaagccagagcatctacccccttcctggtcctcagctcttttcattagaccaggtgggctggtagcatccaaagccacagactgaggggccagacctcgcttgaatcccagttctgccgcttactggctgtgtgaccaatttacttcaccttctaagcctgagttttctcagatatgaaaaatgtctacctagtagggttgccatgaggattaaattagatttaatgcaaatacaaggcccctagccctgggcctggcctatggcaggcgctcagtgggcatgagtgccctttctttccctttactacctaaagctcagccctaactcctctgctcaaaagcctccattaaggctgggtgcagtggctcacacctgtaatcccagcactttgggaggctgaggcaggtgaatcacttgaggccaggagttcgagaccagccatggtcaacatggcaaaaccctgcctctaccaaaaatacaaaaattagctgggcatggtggcaggcgcctataatcccagctacttgggaggctgaggcaggagaattgtttgaacctgggaggtggaggttgcagtgagccaagattgtgccattgcactccagcctggatggcagggtgagactctgtctcaaaaaaaaaaaagccaggcgtggtggcaagtgcctgtaatcccagctactcgcaaggctaaggcataagaatcacttgaacccgggaggtggaggttgcaatgagcagagattgtgccactgcactccagcctggggtacagagtaaaactgtgtctccaaaaaaataaataaataaaggcctccaataagccaggcacaatggctcatgcctataatcccagcactttgggaggctgaagggaaaggattgcttgagtccaggagtttgaggccaggctgggcaacatagcaataccctatctctacaaaaaataaaaatagaggtgtggtatccaggtgtggtagtgcatatctgtggtcccaactactcaaaaggctaaggcaggaggatcacttgagcccaggaggttgagactacagtgatccatgatcatgccactgcactccagcctgggcaatacagcaagaccctgtctcaaaaaaaccccaaacaaaccttcaatagctccctagggacactataggaaggctctctatgattaggtcgcaccctggcttaccagcctcacttcacacccaaaggaaaaacctttattccagctgagcagatgcctcacctgccaccactacccccaccacccctcataccctggctctggctgcttcttgtcttgtttgcaactgacgcaaagatggagacagacctgggctctggtctcggctctgctacttactggctgggtgaacttacacaagtccatttatctctgaacctctcttctaacttgtaaaacaggggtgaaatgggaggctacgaaggctttatgatctccaggatgctgcctgtggacacagagtccacctgtgctatgtaagttctgcccagccttcaaggttcctcagagctacccctgactgccccagaagttggtctctctccccatagccctgccagcaacacagcacccaggatgggaggggaggagagcgggcaagggtccagcccagggatgtaagcagcagggatgagctactaccttccccctcactgatgacctccttgtcctcctgggggctggaggggcacaaggctgagatccatcgctgcttctcacttctagggaagggggaggctaagttgtcacaatatgcaaagtgcagttgcccagggcagggtgctgaaaccaaggctgggggagccagacatgatgtccaggcctaggacccaggtcatgtctgccccaccccagggcccaccccacaacccggttcccaagcctgtgccccacccagctctgagcataacaggcccagaaccccctggatgccagccctacccccatcctgcctaatgccacagtcctgaagccagagatagcagggtgtggaggtttacatccaagagatgcccagaggctgaggaggaggtggcagccccctgacaccacctgtggggcaggcacccctgctctggcctccagccctgccctctgcccctgtgtcctgcccaagtcagggaagagttgagcacttggggaggaacaaggccaggatgtcccaggggtgcccgtcatggggacggggtgcctgtcatggggagggggagcctcctctctcccatatccaggcccactcactccgtccgggcccgcagcaggaactggtgcttcatgtgctgcccgtggaggagctggaggaggaacacgtggccggggatgccctgcagcttcaggctcaggtcccgcacctgcagctcagccatcttggcatggacgaaaacggcaaacttccctagcctggaggaccgggggaggggaggtcagcctggcctgggccctggctccaggcacccaccctcgggatcaggtgggttctgactggaagtggggagaaggggttgcctgccctgccagcgttctcacagggtcctgcttctggatagggcactgctagtccccacaaggaaccaagagctccttccccgctggcttgctggtggaggctggaggtgatggagaccagtccctgagccccaagcacacttttgacctttctctctctcttttttttgtttttttatttgtttgttttttggttttttgttttgttttgttttaagacagagtctcgctctgtctcccaggctggagtgcagtggcatgatctcggctcaccacaacctccgccttccaggttcaagcgattcatgacctctctctgaacctctctgccaagcgtctgttccaaagagccaactggacagctcccctgaggagtgtctaactctcttccagtatataagccccacgaaggctgagcctcgtctctttgccactgtatctcagtgtctgatgatactgcctgacccacaatttgggctcagtaagtacttgtaggcaggatgggtggatgttccacagacgtcaactcattcaacaaaactcggcatcagaaaaaactcagcttctcccactccaagccagatcccctttactgttctccattccagtgaaagaccccaccagtttgcccaagaggaaattcagatgtcatgctcacctcttccctttccatcccccctacacccacctggtagctatgtcctgtctttcctccttattgtcccttgaatccacttatcctgaagtaccctgccacttctggagcatctaccctctcctgagcaactgcaagaccctctggcctctccccttccagttcatcctccaaattggccaggagcaaaatatcatccctctgcttaactctccatgctccctgctgcctcagaaaaagtccaacctctctatcatgaccttcaacatcccaacttccctctgctgcctttctcctttacaaatccagccacattaggcttcatgattcccaaacacacattctgctcttctaccctaccatgactctgctgtactcctgcactcaaactacctgtctacctggaaaactcctactcatccttcaaaacccagctcaaatgtcctgtcctctatgaagctttattgattctcactccacaccaggaaataccgcagtacacccttatatcaaaaccctgatgatatggttatcagaatgtattttcactgtctgagagcttctgtgagcagaaaacaagtctcattcatatttatgtccctagcactggcctgctacagaacagagattcagtgactgtttactaaatgaacaaacaaatcaggaatgaattcttcttatagcataacatgtccatccttttttgttttaagagatggggtctcactatgttgcccaggctagtcttgaactcctagactcaagtgatcctcctaccttggcctcccaaagtgctgggattacaggtgtgagccaccgtgcccagcccacatgtccatcctttatcccattcaccttatccaggtagtcttctacctcactcctcctaacaatcccagctaatactgaacaagtgttcactgtgagtcaggcatggtgctgccatcacagagctggcatcctcctggctcccccacctactagctccatgatctgagagtaacagagaagcctagttcccagggaggtatttggaggattaaagggaataatccacgtagcatgccttgcacagagtaggtactgagtaaatgttggcttctggcatagctgtgactcagggcagagttgggactctagggctatgctcttagtctctgctcttactggctgaagctcacagcatctccaagtcctcggcatacagtctagcccttgattctcccttctggaacatggacttgtctcacatctctgcctttgcttcaggagcctccaaatctcagggtgccctggcagcataccctggcacaggcagggactcccaggcccagggatggactggtcataagcccagtggtggggaggaagagagcctggctccactttacctacccacccctgactgccccgactcactccttccgccgagagagcagcaagcagtcattgaagaggtggaggtagactgccttgctggacagcttcagcttggcagggggtgctgcaggcagtggtgccagctctaccaactctccatgccgaaccagccagcgggcctgagagatcagcgggaaaatctagagggatggagaaggatgggtcaggcccaggggcaccaggcagagagcacaagatggtagatgggagggtgtgggcagcgattaactggcctgaagcccccagggcaaggaagaaacaagagctgccccttggggtccccatcccgctggctgcagacacacaccttgccctcaaagtggatcttcttgctcaggtggatgagttcctctgtcctcttcatggactgtacactagcattgcactcctgcaccagctgggggagccgtggggaggtcacctgcagcccctcagctccggctcccagagcccagcctcagactcttgcctggggaccggagactctgacagctgggggctgttttagagacgtgctgggggtccagggggggcctcaggagccaagcagcccctgccctgcccagctcacctccttgagcgcattgaaggccttggtggccatgtcttcgtcttcagagccctgtgctgtccgcttcaggatgttctggaaggtgggatcagcacaatgaggcagtcctcatactcccgagacccggcccgcccacaggtgtatctccctcgcccagccctcactgtggcctgtcccctcgaggtacctccaccaacatcttgaggcgggtgatcctctggaagggcaggataaggaaggaggtaaggggcagacgctggcacacaggagactcctccaggcgagccaggatgccagggaacctggggttctccaggctggaaaatggggaggactctggaatcacaggtaggcctgaattcctgggatccacaaccctggccatccacggggtcctcagggggcttctcagcacatccttactgccctttggggttgcatctcaccttatcctggtcacagagaccttttcagggacccctcccctcccagagtcaccttacgtcacccagccctcagtgcctacacctgcctgagactccctccacgcccccgcccctttcagagcccccagccctacagcaggcgctggtaggtgcgctcctggtaggcctggttggtgacatagggcaggtagactctgcggaaggccgggcagtggtccagcaccacgtcgcacacgctgaagcgcagcacatctgcctccagccgctgctccaggtcctgcaggaacctgaggagtcagagccaggatggagaccccagatctgggagctggccaaccactggctccgtccccaccccgggccaggccagaccacttcttcacctctcgctggtgctcttgacctcgggcagtttggaaaacagccactgcttgtcctgcgcccccagacactcgctcagctcggcagagcctaagaagtggcccacagccaccgacaggctgtggatgtaagaggcctcggaggtgatcagctcaaacttggcctgagggagggcgcacacggggtcgaaagggcaggaccagttcacctcggaggccctggcctcacatccccagaccccaggacgccacacctcgcgtcctcgccccttctctagccccactcctaatctggcgccgggcgggcccggcgacccacgtcccgccgcgggaaattgtgcaagcctttcttgtcctcgatcccgcccctctcctaagccccgccccgacgcgttcttcccagagccccgcccacccccccaggttccgcccctcatcctggccccgccttgttccgcgcccaccaggcgtttgctcttccaatggttccgctcctcatccggccctgtcctatcctaggtttcgtcccgctggctccgccccctacccgcacccaagcccggctcccctcgcctctcgctcagcggtttgctgtcctcgcttccagacggcctcgtgtagtcaggtcctagagccaaccttccgcgcggacagtcgcgccagcaaccccctttgtgtgtccccctccctctatggcccggttcccgctaagtccccggaccgcgtactccccggcccgcccccgccccgccgggtccccgcgcgcgcccacctcctgcagcttgcagtcccgcaggctcagcgtggccaggacgccgctgccgcgtacgtcggggatatcctgccacagcgagaaggtggagcctcgcgccgagcgctgcgcccggaaggagctgctgggggagaggttggcccgcggcggccccggcccctcctctgcgccctcggcctcgtcccccgggccctcctcctcgcgctgctgccgccgcagttcgcgggcgctggccacgtcgctgtattcctgatagaggacggctgggggaaagacgggcgggggagagcgtggggcgcccgccagcccctgcccggcttttcctcggttccctcaagagcccgcgtcacttaacctttgccgcggttcggatacctggacacagtgaattcattcattcattcattccataaacaaattgagcacctactgagtgctagataccgacagttccattctccgtttctcactcgatccctacctctcaactctccaaaccctcttttccccgtttccacaccgcagccccttcctccgttacctcctcccagggacgcccctcccacgtacagttaaggaggaatcgagactggcgccgctcgttggtgctcctggaccccaaaggcggctct

SEQ ID NO: 1400 - DNA, 9730 bp, Homo sapiens
agagccgcctttggggtccaggagcaccaacgagcggcgccagtctcgattcctccttaactgtacgtgggaggggggtccctgggaggaggtaacggaggaaggggctgcggtgtggaaacggggaaaagagggtttggagagttgagaggtagggatcgagtgagaaacggagaatggaactgtcggtatctagcactcagtaggtgctcaatttgtttatggaatgaatgaatgaatgaatgaattcactgtgtccagatatccgaaccgcggcaaaggttaagtgacgcgggctcttgagggaaccgaggaaaagccgggcaggggctggcgggcgccccacgctctcccccgcccgtctttcccccagccgtcctctatcaggaatacagcgacgtggccagcgcccgcgaactgcggcggcagcagcgcgaggaggagggcccgggggacgaggccgagggcgcagaggaggggccggggccgccgcgggccaacctctcccccagcagctccttccgggcgcagcgctcggcgcgaggctccaccttctcgctgtggcaggatatccccgacgtacgcggcagcggcgtcctggccacgctgagcctgcgggactgcaagctgcaggaggtgggcgcgcgcggggacccggcggggcgggggcgggccggggagtacgcggtccggggacttagcgggaaccgggccatagagggagggggacacacaaagggggttgctggcgcgactgtccgcgcggaaggttggctctaggacctgactacacgaggccgtctggaagcgaggacagcaagccgctgagcgagaggcgaggggagccgggcttgggtgcgggtagggggcggagccagcgggacgaaacctaggataggacagggccggatgaggagcggaaccattggaagagcaaacgcctggtgggcgcggaacaaggcggggccaggatcaggggcgggacctggggggtgggcggggctctgggaagaacgcgtcggggcggggcttaggagaggggcgggatcgaggacaggaaaggcttgcacaatttcccgcggcgggacgtgggtcgccgggcccgcccggcgccagattaggagtggggctagagaaggggcgaggacgcgaggtgtggcgtcctggggtctggggatgtgaggccagggcctccgaggtgaactggtcctgccctttcgaccccgtgtgtgccctccctcaggccaagtttgagctgatcacctccgaggcctcctacatccacagcctgtcggtggctgtgggccacttcttaggctctgccgagctgagcgagtgtctgggggcgcaggacaagcagtggctgttttccaaactgcccgaggtcaagagcaccagcgagaggtgaagaagtggtctggcctggcccggggtggggacggagccagtggttggccagctcccagatctggggtctccatcctggctctgactcctcaggttcctgcaggacctggagcagcggctggaggcagatgtgctgcgcttcagcgtgtgcgacgtggtgctggaccactgcccggccttccgcagagtctacctgccctatgtcaccaaccaggcctaccaggagcgcacctaccagcgcctgctgtagggctgggggctctgaaaggggcgggggcgtggagggagtctcaggcaggtgtaggcactgagggctgggtgacgtaaggtgactctgggaggggaggggtccctgaaaaggtctctgtgaccaggataaggtgagatgcaaccccaaagggcagtaaggatgtgctgagaagccccctgaggaccccgtggatggccagggttgtggatcccaggaattcaggcctacctgtgattccagagtcctccccattttccagcctggagaaccccaggttccctggcatcctggctcgcctggaggagtctcctgtgtgccagcgtctgccccttacctccttccttatcctgcccttccagaggatcacccgcctcaagatgttggtggaggtacctcgaggggacaggccacagtgagggctgggcgagggagatacacctgtgggcgggccgggtctcgggagtatgaggactgcctcattgtgctgatcccaccttccagaacatcctgaagcggacagcacagggctctgaagacgaagacatggccaccaaggccttcaatgcgctcaaggaggtgagctgggcagggcaggggctgcttggctcctgaggccccccctggacccccagcacgtctctaaaacagcccccagctgtcagagtctccggtccccaggcaagagtctgaggctgggctctgggagccggagctgaggggctgcaggtgacctccccacggctcccccagctggtgcaggagtgcaatgctagtgtacagtccatgaagaggacagaggaactcatccacctgagcaagaagatccactttgagggcaaggtgtgtgtctgcagccagcgggatggggaccccaaggggcagctcttgtttcttccttgccctgggggcttcaggccagttaatcgctgcccacaccctcccatctaccatcttgtgctctctgcctggtgcccctgggcctgacccatccttctccatccctctagattttcccgctgatctctcaggcccgctggctggttcggcatggagagttggtagagctggcaccactgcctgcagcaccccctgccaagctgaagctgtccagcaaggcagtctacctccacctcttcaatgactgcttgctgctctctcggcggaaggagtgagtcggggcagtcaggggtgggtaggtaaagtggagccaggctctcttcctccccaccactgggcttatgaccagtccatccctgggcctgggagtccctgcctgtgccagggtatgctgccagggcaccctgagatttggaggctcctgaagcaaaggcagagatgtgagacaagtccatgttccagaagggagaatcaagggctagactgtatgccgaggacttggagatgctgtgagcttcagccagtaagagcagagactaagagcatagccctagagtcccaactctgccctgagtcacagctatgccagaagccaacatttactcagtacctactctgtgcaaggcatgctacgtggattattccctttaatcctccaaatacctccctgggaaataggcttctctgttactctcagatcatggagctagtaggtgggggagccaggaggatgccagctctgtctgatggcagcaccatgcctgactcacagtgaacacttgttcagtattagctgggattgttaggaagagtgaggtagaagactacctggataaggtgaatgggataaaggatggacatgtgggctgggcacggtggctcacacctgtaatcccagcactttgggaggccaaggtaggaggatcacttgagtctaggagttcaagactagcctgggcaacatagtgagaccccatctcttaaaacaaaaaaggatggacatgttatgctataagaagaattcattcctgatttgtttgttcatttagtaaacagtcactgaatctctgttctgtagcaggccagtgctagggacataaatatgaatgagacttgttttctgctcacagaagctctcagacagtgaaaatacattctgacaaccatatcatcagggttttgatataagggtgtactgcggtatttcctggtgtggagtgagaatcaataaagcttcatagaggacaggacatttgagctgggttttgaaggatgagtaggagttttccaggtagacaggtagtttgagtgcaggagtacagcagagtcatggtagggtagaagagcggaatgtgtgtttgggaatcatgaagcctaatgtggctggatttgtaaaggagaaaggcagcagagggaagttgggatgttgaaggtcatgatagagaggttggactttttctgaggcagcagggagcgtggagagttaagcagagggatgatattttgctcctggccaatttggaggatgaactggaaggggagaggccagagggtcttgcagttgctcaggagagggtagatgctccagaagtggcagggtacttcaggataagtggattcaagggacaataaggaggaaagacaggacatagctaccagatgggtgtaggggggatggaaagggaagaggtgagcatgacgtctgagtttcctcttgggcaaactggtggggtctttcactggaatggagaacagtaaaggggatctggcttggagtgggagaagctgagttttttctgatgccgagttttgttgaatgagttgacgtctgtggaacaccctccacccatcctgcctacaagtacttactgagcccaaattgtgggtcaggcagtatcatcagacactgagatacagtggcaaagagacgaggctcagccttcgtggggcttatatactggaagagagttagacactcctcaggggagctgtccagttggctctttggaacagacgcttggcagagaggttcagagagaggtcatgaatcgcttgaacctggaaggcggaggttgtggtgagccgagatcatgccactgcactccagcctgggagacagagcgagactctgtcttaaaacaaaacaaaacaaaaagccaaaaaactaacaaataaaaaaacaaaaaaaagagagagagaaaggtcaaaagtgtgcttggggctcagggactggtctccatcacctccagcctccaccagcaagccagcggggaaggagctcttggttccttgtggggactagcagtgccctatccagaagcaggaccctgtgagaacgctggcagggcaggcaaccccttctccccacttccagtcagaacccacctgatcccgagggtgggtgcctagagccagggcccaggccaggctgacctcccctcccccggtcctccaggctagggaagtttgccgttttcgtccatgccaagatggctgagctgcaggtgcgggacctgagcctgaagctgcagggcatccccggccacgtgttcctcctccagctcctccacgggcagcacatgaagcaccagttcctgctgcgggcccggacggagtgagtgggcctggatatgggagagaggaggctccccctccccatgacaggcaccccgtccccatgatgggcaccccgtccccatggcgggcacccctgggacatcctggccttgttcctccccaagtgctcaactcttccctgacttgggcaggacacaggggcagagggcagggctggaggccagagtaggggtgcctgccccacaggtggtgtcagggggctgccacctcctcctcagcctctgggcatctcttggatgtaaacctccacaccctgctatctctggcttcaggactgtggcattaggcaggatgggggtagggctggcatccagggggttctgggcctgttatgctcagagctgggtggggcacaggcttgggaaccgggttgtggggtgggccctggggtggggcagacatgggtccctagggtaggcctgggtcctaggcctggacatcatgtctggctcccccagccttggtttcagcaccctgccctgggcaactgcactttgcatattgtgacaacttagcctcccccttccctagaagtgagaagcagcgatggatctcagccttgtgcccctccagcccccaggaggacaaggaggtcatcagtgagggggaaggtagtagctcatccctgctgcttacatccctgggctggaccctcgcccgctctcctcccctcccatcctgggtgctgtgttgctggcagggctatggggagagagaccaacttctggggcagtcaggggtagctctgaggaaccttgaaggctgggcagaacttacatagcacaggtggactctgtgtccacaggcagcatcctggagatcataaagccttcgtagcctcccatttcacccctgttttacaagttagaagagaggttcagagataaatggacttgtgtaagttcacccagccagtaagtagcagagccgagaccagagcccaggtctgtctccatctttgcgtcagttgcaaacaagacaagaagcagccagagccagggtatgaggggtggtgggggtagtggtggcaggtgaggcatctgctcagctggaataaaggtttttcctttgggtgtgaagtgaggctggtaagccagggtgcgacctaatcatagagagccttcctatagtgtccctagggagctattgaaggtttgtttggggtttttttgagacagggtcttgctgtattgcccaggctggagtgcagtggcatgatcatggatcactgtagtctcaacctcctgggctcaagtgatcctcctgccttagccttttgagtagttgggaccacagatatgcactaccacacctggataccacacctctatttttattttttgtagagatagggtattgctatgttgcccagcctggcctcaaactcctggactcaagcaatcctttcccttcagcctcccaaagtgctgggattataggcatgagccattgtgcctggcttattggaggcctttatttatttatttttttggagacacagttttactctgtaccccaggctggagtgcagtggcacaatctctgctcattgcaacctccacctcctgggttcaagtgattcttatgccttagccttgcgagtagctgggattacaggcacttgccaccacgcctggctttttttttttgagacagagtctcaccctgccatccaggctggagtgcaatggcacaatcttggctcactgcaacctccacctcccaggttcaaacaattctcctgcctcagcctcccaagtagctgggattataggcgcctgccaccatgcccagctaatttttgtatttttggtagaggcagggttttgccatgttgaccatggctggtctcgaactcctggcctcaagtgattcacctgcctcagcctcccaaagtgctgggattacaggtgtgagccactgcacccagccttaatggaggcttttgagcagaggagttagggctgagctttaggtagtaaagggaaagaaagggcactcatgcccactgagcgcctgccataggccaggcccagggctaggggccttgtatttgcattaaatctaatttaatcctcatggcaaccctactaggtagacatttttcatatctgagaaaactcaggcttagaaggtgaagtaaattggtcacacagccagtaagcggcagaactgggattcaagcgaggtctggcccctcagtctgtggctttggatgctaccagcccacctggtctaatgaaaagagctgaggaccaggaagggggtagatgctctggcttgagctaggagtcccacctgggtgggggtaagctctctattcccaggtggtcaggggaggtccctggcaattaacatctgacccctgaaggatgaggagaggttgtcacgaaaagatctggggaagagcatctggcagaaggaagagccagcacaaaggccctggggcaggagggagcttagagtgaggaacagcagggaggctggtgtggctggagctttgtgagcgagtagggagggaaagtggaggggaaagtagggagggaaagtggaggggagagtagggagggaaagtggaggggagaagacgaggatagcagggggcgatgccagaccatgaagggccttgtagggcctagggaggactttggattttattctaagaggactgggaagccctggagggctttaaacgggagcgatgcagcttgaatcccagttgggaaggatgggccaaagggagcaccagagtgatgttaggggcacattgcagggccgttactgttttctgtggggtatctgggggcagttggacgttggggtctgaaggtcacaagcaaggtgttggcttgagctggggaggggacagcccttggtatagaggcagaaactgaagctgggagggactggattaatcctgcacttgtgtttagggtaggagaggagataggccagggtgggcagagggtatgcctgcttgaacgtgggcctgtggcatggcagtggcagaggaatagaagcctcaatggccaccttcccacccccttacttcctcctactgcccctccctgccctacccatgctcctccccctgccatcctgcccttgggactccctgagcctcccttgggctgtcagattgcccccaggttcagtgtgttaggacatacaaggcactgcacccagatgagctgaccttggagaagactgacatcctgtcagtgaggacctggaccagtgacggtgagggggcctcctgggaaagtgtccctgatggggcttgggtgggcaggaggtggctagatgactaagatatcacagggaaaggttctgcaagtgttgatctgccacagcatgtgggaatcaggttagatgagaggaggaacttcctgcttgtaaagatataggatggagagtgatgggggagagtgggaaataccctttcagaggatatcaggaaaaacaggtcagaagttcatctgcaagacagctcaagacagggtccttcctggagctgagagatgctgagatgatgtcaccttggccccaagggtgcagacaaagcttgcatcagggctgtggtgttcccttccaggcctggccctggtacccctttgatgctgttgttcttggcctatgtgtccctaggctggctggaaggggtccgcctggcagatggtgagaaggggtgggtgccccaggcctatgtggaagagatcagcagcctcagcgcccgcctccgaaacctccgggagaataagcgagtcacaagtgccaccagcaaactgggggaggctcctgtgtgatgggcagccatggcctaggaccccacctccatgcctggctcctggatggtcctggaggggcctgcagtgtctccattccccaagctgctcctgctggcacttcgcttctgtggccttggcattgagggcacaggctggacacaggaatgggggcgcctccagagggtctctccgtcctcatgctcctcagtgtccacacttcaaggccaaggatagtttcttcctctgacatggggaccataacaggtgatcactgatacctggcaaagactggggccctctcctttctatgtcctcaatcctgcctgactcttggtccttctggcagggacctggctggggaacgttctggtgctgatggtgctgggacctatatgtatatttatatatatctggggtcttgtctaccacctcccctggtcagagcctgagtgggtgctggttgctgtgtcttgtctgtaaataaactcctatcatgcctttgcttggagtctgtgatccatctgatgctgcccccacccccacagtcctattttcccagctaaagaccaggagagtctccggctggctcccaactggggctttgcatttctctagagttcatctctgagctgtaagggtgaccagggggcagggggacgattgtgtatcagctaggctgcttttggctgcaagtaacaaaatatcagatacaaataggcttaaacattaaagagatttgattagttcttta

SEQ ID NO: 1401 - DNA, 4578 bp, Homo sapiens
tcaggaccttcgaggctcactcgggtggacccagacaactccaccctgggctcctctgtgctcagggcctgctcttgcactacctggcgaggctctaggaagacagcgtgggcctcggggcagccggggacctcttcacgctggtacacccgcatcttgcgccctagggttgagggcaaggagtgagagcacgggctggggtctcccccaacctcctccctgctgctgcccctggccctgagcacctggggaggttcaggcaccatgcccaagggaagggcctgtgtttctgctagcatctggtccccagagccctggggtccacgagaggggtaaggagagcacagggcctggctgcagtaggcagagggatcaggctgcccagaatggtgactcactcactgcataaccttggacaagtcacttgccttccctgagccccactagtttccttatcactaatctaccacttgtcctgacttttgggggaaccttgggacataaaggttaaggagctgcccagcccctcccctatccccctgccatggcacccacacccgccttccccagggtgactcacaggcagacttcttctccgagccgtggctggcccggcgctgtggctgtgtgtgtcggggactccagggtccctccagagctgggggctgggcaccaggacagtgtggccagctgccagccctgctgggccgcatccccccgctggtgatctctgtatctgagcctcctggggataatggccatagcaacccttggagaggggcaggggtccccagggaccagcggctgccaggagcccgaagctcctctggggcaacagggaaaaggtccagacacactgggctcgggggcttcagggcgggcagctctgcaaaggacagactctcctgctggcacactgctacagggtggtgggcagtgccaggtggcccagtcaggtggggctggagggtagcaggtggcccacagtccattcctcttttgctctgccacccacctggccctgcagaagagaagatatcagacctagacagaggacagtggggctggccagtaagccaccacccctggaggcctggacaaacccctgtgtacacttgtgtacacacatctccacaaacacactcacatgtctaattatatagaaatagctgatacttgcttggcattgcctgaatgataggccaagtactttacacatactatctcatttaatcctcacaacaaccctgtgagttgatgctcttattatccccattttataggtgaggaaactgaggcacagagaggttatttggtaaatggtggagccaggattctaacctggccgttctagctttgaaatcgatgattttaaccaccttgtacttctctaaaacacactgacatgtcaccagacatgcaaatacatacattgtcacacaaatccatttcccaacatatacatccacactacattttctcccaagtatagaatgacatgtacactttcatagatacagacatttcaaactcaggctcacacagtcacagacacacacatttttacacaaccgcatacattcacagacaactcctcacaaacacgctgacccgtccgatatttacacaggcacccaagatttctcaccctcctgttcccttcacatgcacacagacacacaccagcccacaggtccttgctctgatgtttctccccccatctccccgacccttgcccagagttgcggccttcagtgctgagtggtgcccacacccatgccaagttggctgggagggtcatggactggcaggcgggccaccacccagatcaggcaggggccttctcgaagttcaaagaggtgccccagcacccccggcttggagtgaaagaggggctgtcccccaccccagcttccagcccctgggtgggccaggctggatgggtcctttctgggcaggaagttatccctggggagccagccctccgatcagggcaggcctgatgatctgagaggcccaagcccccacagctcttgccctgtggccctctgccagcctccctcctgcagcccctcacctctctgggcccaggcccgctgctgatgctgtttggctgttccggcaggggaagccctctctctgcccagctggctgggggagatcccacccagacaaagagtttgattcatcaaaccctgtggtgaggcaagcagggagggagggagggagcaggcagcgggctgggcgggggcctaccctagcctggcctcgctgtgggcaggccgggcagccaggaccccccagaggccccctcaggccaaaggggcagtgcccagcctggcaggaccaggagagccaggaaatgaagactgagagagacccagagaaacagagaccacttagccagtaactgagaaaccaagaccccaagacgttcaaaaacagaaaaaccacagatgctgagacattcagggacccagagatggagacagagacactgacaatttcaggccaaccagatcctcagagacacagatgaagcccagaaaacccagggagacagatggacaaacatttcatgcccgtgggctgccagtctagtgggagagccaaaaatgaaaacagttacaatccaggttggcaagagccaagccagaggaaccatcagaggagggtgctcggctcaactcaacctgggtattccaggaagacttcctggaggaggtgataggtaactgctccacggctgaaatacatagtgcacttagagggaaagccttggcctgaacagtgacagtgtcagtcactattggagacagggagggagaagaggacccagcgagagatggctgggtctatggcaggccccagtctctctgcacagcttctcaactgcttccccctgctcccttcaccctgctgtctgggagggtgggaagaaggggactggctgctccaaaggggtcctctctacggtggccactctggcttgtaccatcagcctctgtccctctagcctgaaaagtacccatctgagcgagtctccctaagcctcggtctcctcatccggcaaataggatagtatttttattatcatcagtctttctctagacagaaggcagctcaggccttcacacagatggggaagatgaaggagtgaggctgagacacacattatatcgcaggagtgtgcacaaggaggcccctgcccacagacgggtctctttctctgcaggaatcagaagtcctcgacacagaagtcccacttgcttctgggggcacacatgtgcaggcatgtacacatgccccctgcccctttgtatgctgggagattctagcacttgggttctggaagctcctggagggcagggagggaccctctctcccatggctcacagggataagtaggcaaaacattgaggctttgcagcaggagcacccccagttaaggctgcagaggagaaggctaggtgaatgtggggagaggggacatagaaggcttcccggggagatgaagctggaggcaggtccctagcagggaagaagtcaggagtgtgtcagcctccacctatgctcaagccaaggggtaataagaatgacccatctagctgggatgccagccctgtggccctccaggggtttggcccacccaacctcaatgctggggagctaagagggacaagctgtgttcatattgtgtgtagctcatctctgttagaaaaaaacaaacaaaaacctcagaaagagaactggccccagacagcagggacattaccttcccaaggcacgatcacaggatagagactcttgtgtctactaggcaagggccactctggagcccaaaaagaataacctccgcccaagctttgaggcccagtgttgacactgaccagctgtgtggccttaggcaattcacagcccatcccttggcctcagtattcccatctgtaaagtggctcctaagggaccgcaccaccgcccaatgccctctctaagaaacatgtctcatcataaatgtctctgggccaagaaggatgggcaggggccgaggaaagtacccttggtgggtgctgctaattacagaagacgatgggcccacttagcaaggctgccagagagtccctggacactaccatgatcagaaaaagtgtttctggcctcctgtacctagcttttccctgccccctcccgggtgccccttgccttgctgcccaggagagctggtaccctgccagagcctctctgccctttaaggaataaagccaggtgggaagtcatggctggaaagtggatccaggccaagtggttcacagagccccagaaggccatagtgggtcagagccaggatcagagaccaggcgggcagcacaaagggctcactcagcggggaaaactggcgggaagagaatgggactgctggcacccaggtggggccctacctcagccagggagctccgtccagctgccagcacggtccagggctccgggacaccctgggggctctggggttgcagccaagtcctcagggggcgatgtcagcatgtcagcatggccccagagccgagcaaggcaagctcc

SEQ ID NO: 1402 - DNA, 4578 bp, Homo sapiens
ggagcttgccttgctcggctctggggccatgctgacatgctgacatcgccccctgaggacttggctgcaaccccagagcccccagggtgtcccggagccctggaccgtgctggcagctggacggagctccctggctgaggtagggccccacctgggtgccagcagtcccattctcttcccgccagttttccccgctgagtgagccctttgtgctgcccgcctggtctctgatcctggctctgacccactatggccttctggggctctgtgaaccacttggcctggatccactttccagccatgacttcccacctggctttattccttaaagggcagagaggctctggcagggtaccagctctcctgggcagcaaggcaaggggcacccgggagggggcagggaaaagctaggtacaggaggccagaaacactttttctgatcatggtagtgtccagggactctctggcagccttgctaagtgggcccatcgtcttctgtaattagcagcacccaccaagggtactttcctcggcccctgcccatccttcttggcccagagacatttatgatgagacatgtttcttagagagggcattgggcggtggtgcggtcccttaggagccactttacagatgggaatactgaggccaagggatgggctgtgaattgcctaaggccacacagctggtcagtgtcaacactgggcctcaaagcttgggcggaggttattctttttgggctccagagtggcccttgcctagtagacacaagagtctctatcctgtgatcgtgccttgggaaggtaatgtccctgctgtctggggccagttctctttctgaggtttttgtttgtttttttctaacagagatgagctacacacaatatgaacacagcttgtccctcttagctccccagcattgaggttgggtgggccaaacccctggagggccacagggctggcatcccagctagatgggtcattcttattaccccttggcttgagcataggtggaggctgacacactcctgacttcttccctgctagggacctgcctccagcttcatctccccgggaagccttctatgtcccctctccccacattcacctagccttctcctctgcagccttaactgggggtgctcctgctgcaaagcctcaatgttttgcctacttatccctgtgagccatgggagagagggtccctccctgccctccaggagcttccagaacccaagtgctagaatctcccagcatacaaaggggcagggggcatgtgtacatgcctgcacatgtgtgcccccagaagcaagtgggacttctgtgtcgaggacttctgattcctgcagagaaagagacccgtctgtgggcaggggcctccttgtgcacactcctgcgatataatgtgtgtctcagcctcactccttcatcttccccatctgtgtgaaggcctgagctgccttctgtctagagaaagactgatgataataaaaatactatcctatttgccggatgaggagaccgaggcttagggagactcgctcagatgggtacttttcaggctagagggacagaggctgatggtacaagccagagtggccaccgtagagaggacccctttggagcagccagtccccttcttcccaccctcccagacagcagggtgaagggagcagggggaagcagttgagaagctgtgcagagagactggggcctgccatagacccagccatctctcgctgggtcctcttctccctccctgtctccaatagtgactgacactgtcactgttcaggccaaggctttccctctaagtgcactatgtatttcagccgtggagcagttaactatcacctcctccaggaagtcttcctggaatacccaggttgagttgagccgagcaccctcctctgatggttcctctggcttggctcttgccaacctggattgtaactgttttcatttttggctctcccactagactggcagcccacgggcatgaaatgtttgtccatctgtctccctgggttttctgggcttcatctgtgtctctgaggatctggttggcctgaaattgtcagtgtctctgtctccatctctgggtccctgaatgtctcagcatctgtggtttttctgtttttgaacgtcttggggtcttggtttctcagttactggctaagtggtctctgtttctctgggtctctctcagtcttcatttcctggctctcctggtcctgccaggctgggcactgcccctttggcctgagggggcctctggggggtcctggctgcccggcctgcccacagcgaggccaggctagggtaggcccccgcccagcccgctgcctgctccctccctccctccctgcttgcctcaccacagggtttgatgaatcaaactctttgtctgggtgggatctcccccagccagctgggcagagagagggcttcccctgccggaacagccaaacagcatcagcagcgggcctgggcccagagaggtgaggggctgcaggagggaggctggcagagggccacagggcaagagctgtgggggcttgggcctctcagatcatcaggcctgccccgatcggagggctggctccccagggataacttcctgcccagaaaggacccatccagcctggcccacccaggggctggaagctggggtgggggacagcccctctttcactccaagccgggggtgctggggcacctctttgaacttcgagaaggcccctgcctgatctgggtggtggcccgcctgccagtccatgaccctcccagccaacttggcatgggtgtgggcaccactcagcactgaaggccgcaactctgggcaagggtcggggagatggggggagaaacatcagagcaaggacctgtgggctggtgtgtgtctgtgtgcatgtgaagggaacaggagggtgagaaatcttgggtgcctgtgtaaatatcggacgggtcagcgtgtttgtgaggagttgtctgtgaatgtatgcggttgtgtaaaaatgtgtgtgtctgtgactgtgtgagcctgagtttgaaatgtctgtatctatgaaagtgtacatgtcattctatacttgggagaaaatgtagtgtggatgtatatgttgggaaatggatttgtgtgacaatgtatgtatttgcatgtctggtgacatgtcagtgtgttttagagaagtacaaggtggttaaaatcatcgatttcaaagctagaacggccaggttagaatcctggctccaccatttaccaaataacctctctgtgcctcagtttcctcacctataaaatggggataataagagcatcaactcacagcgttgttgtgaggattaaatgagatagtatgtgtaaagtacttggcctatcattcaggcaatgccaagcaagtatcagctatttctatataattagacatgtgagtgtgtttgtggagatgtgtgtacacaagtgtacacaggggtttgtccaggcctccaggggtggtggcttactggccagccccactgtcctctgtctaggtctgatatcttctcttctgcagggccaggtgggtggcagagcaaaagaggaatggactgtgggccacctgctaccctccagccccacctgactgggccacctggcactgcccaccaccctgtagcagtgtgccagcaggagagtctgtcctttgcagagctgcccgccctgaagcccccgagcccagtgtgtctggaccttttccctgttgccccagaggagcttcgggctcctggcagccgctggtccctggggacccctgcccctctccaagggttgctatggccattatccccaggaggctcagatacagagatcaccagcggggggatgcggcccagcagggctggcagctggccacactgtcctggtgcccagcccccagctctggagggaccctggagtccccgacacacacagccacagcgccgggccagccacggctcggagaagaagtctgcctgtgagtcaccctggggaaggcgggtgtgggtgccatggcagggggataggggaggggctgggcagctccttaacctttatgtcccaaggttcccccaaaagtcaggacaagtggtagattagtgataaggaaactagtggggctcagggaaggcaagtgacttgtccaaggttatgcagtgagtgagtcaccattctgggcagcctgatccctctgtctactgcagccaggccctgtgctctccttacccctctcgtggaccccagggctctggggaccagatgctagcagaaacacaggcccttcccttgggcatggtgcctgaacctccccaggtgctcagggccaggggcagcagcagggaggaggttgggggagaccccagcccgtgctctcactccttgcccccaaccctagggcgcaagatgcgggtgtaccagcgtgaagaggtccccggctgccccgaggcccacgctgtcttcctagagcctggccaggtagtgcaagagcaggccctgagcacagaggagcccagggtggagttgtctgggtccacccgagtgagcctcgaaggtcctga

SEQ ID NO: 1403 - DNA, 7667 bp, Homo sapiens
tctccaaacttgaatcaataaatttattttctgcttaagcaggttgagttgggttttctatttgcaatagcaaaagtcctgactggcaaggtttaaaagtttgaagactctcacaggtaagtgcagctcaggatcctgtgagtgcagcagaaagtcttaagaaatggcaggggctggttgaacccagattttccattggctgagcagatatccccagaggcgtagaaaattaaatttgttttatgttgttccaaaagaggagaactgaggccagaggagcacacttctgagacactcatttttgctgggtagaggaactctctggcaagcaggaccatcgatattagagcagctggcctcaggagggagtaagagccccatccctgaaggtacacaagttgtggcagcaaccatctggcctgcagtttccagaggggagtcaggcgtggggtgggactggagtgaacgggtagatgcttccacatgcggcagttggcactgacggcaggaacacgggggtggcttaatgggtcctggggctcccctctggccctcaggaaggcaggagcatgaggggcttgggatgcagcacctgcaaatttgcacgttcctggcctcaggaggcctccagtacagaaaagaccatcaacgaagctctgcagccatctgctaagaaacgccacagggaggggacagcatggccagccggggtgccatcaggctttgggtggggatcctggaggatcagacccatctaggtgggagcgctggggtgcaacctggaaggaagataagcagggaaagagaatttggggacatgcagaatccacagctctcgccttcctggctcacagctcattcccacctccaggtctttgctcaaggtttgactcccaccaggactgccaatgctgctctccccacctcaccagtcctctctgtccttctggtcccacacctccaggaggccttgtgggctgcctccaactcactgaccccaccatctgccccctggggatcatagctcaggctctcccacctccacccacatatgtgggtgcaggatctccctggctcgactgggctctcctagggccagggaccaaggcatcttttccatcacctcctgcaggaatgggcagagtggggctccgtgacacccactccctggcccgggggtggggggttaccaggcattcattcataccttgggccttgcctctggaagatgagctccagagagtgagactggcccaggcagatgacaagtaggctgcggaaactgaggcaacctccatacccaccttctttctgtcctggcctaaatgccactcacagtgaaccaaaggccactgctcagccagggcctgctgtgtatgggagttgggcactagagtgggggactcttacccctagaggaggctgcaggcgcgcttctgctgccgcgtgggctgagggcacagcacggcccggatggcctcgtcgaacacggttttcaggcctctctgggtgagagctgagcactccaggtatttcaccgagtctggttggggagatggacaggagagccaaggcctaagtggcggggggggttctgggccaacatgtctcctatgccatacaaccccttccacgccatacacccctcccacgccatacacccctcccacgccatacaccctcccgtgccatacacccctcccacgccatacacccctcccacgccatacaccctccctcccacgccatacacccctcccacgccatacactcctcccacgccatacacccctcccacgccatacaccctcccatgccatacacccctcccacgcctcccacgccatacacccctcccacgccatacacccctcccacgccatatacccctcccacgccatacaccctcccacgccatacacccctcccacgccatacaccctccctcccacgccatacacccctcccacgccatacactcctcccacgccatacacccctcccacgccatacaccctcccatgccatacacccctcccacgcctcccacgccatacacccctcccacgccatacacccctcccacgccatatacccctcccacgccatacaccctcccacgccatacacccctcccacgccatacacccctcccacaccatacactcctcccatgcctcccatgccatacaagccctcccacgccatacaccccctcccacgccatacatccctcccacgcctcccatgccatacacccctcccacgccatacaccccctcccacgccatacaccccttcccatgcctcccacgccatatacccctcccacgcctcccacaccatacacccctcccacgccatacacccctcctatgccatacaacccctcccaccccatacaccccctcccacgccatacacccctccatgccgtacaccccctcccaagccatacaactgaacaccaggctctgggggccgccatccagtcccagtggggtcacctggaggctgtgtcaccaggagcaaggagtttaacgtcaccgtgcctcagtttcctcatgtctgtaatagcgagcgtgaactcagtgagagactaaggcctccagggcaggtctgtgtctttcttggacacatagcccttagtccgtggaaggagggcgggaattttgatgcttttctgtgaaggaaagggctcaagcatcagtgaccaaatctctgggagcctcaccttctagaaaattgtcttgcccatccctccaggattctcccagggttgcaaataatccccaggaggcctgaagccctcagggccccctccccaggaacttcccaacatcatcagccccttccttagcaccgtccctgtcttacagacaaggaaactgaggctcctggagagtatgcgactcatccaaactcacacgctggatgtattccctcaacctgggcccagctgggggccttctgggaggagtggcattggagagctcctctgtcctgccatgggaggcccagccttctcccacatgaagacccctcagggctagagcccggggcacagatgaggagaaaggcaggcctagttcccacccccagggacggcgttccatgacattctgcaaagagtccgtgtgacttcccatgtccatttcaagctgcacagtttccctgaagtgaaaaaccacaaaaccccttctgccgagatgctatgcaggcctgggggccgatgtcagaaccaagaggaaggagaagggaggggaggggaactctgggccctccgccaaagcccgcttgcttctctgtggcaggatggaaggggatggacgctggtcaccacctaccctgtgccaggcactgagctgggtgcttccaacaacaccggggtgagttcccatttcacagaccaggaaacaggcccagagtggggaagccaaggcccgaaggcacagagctggggggagaagtcgggatggcaggaggggcagcccctggaacaggggagcccactgaggccaggtgctggggagaaaggaagggtggggcagggacgaggagcctgaggctcagagaggatgtcactcgctctgagtcacatgctgggcgtctcccctctacctggaggcatatacgcccaccagggatcatgggcagtggttgtcatggggcttggctggcaagagcagggtgccctgagctcagcccggagtctggtcaccacagccccctgtgttgaggaggtgtcactgggcacttggccactgtctccttataagggaccacatctgcgtccacttcccccacatccaccaactgccttttccctggcacccagccacccactcacccaggacaagggtcctgagctggggggccagggctcactttggctcggcctctcactgctctaggactttagtcagttccccctctccgggcctcagtctcccatctgtctaggactcattgccatgcgatggctcatcaagctgaggcagggggcaggggagctacagagagggcaaggagggtgagggggcggtgggggcagtggaggtgcagggaggacagatggccctcagctttgtggcttagggagccagtccacccctgtcagaatcctggctgggtggccttaagccagcaacatgtccccccgagcctgtttcctctctgtaaagtgaaggtgacaagagctcttcgtcatagctgctgtgagaatgaagtggctcccaggaagtgctcagtccacatcagctgtgattatcagctgggctcagggctgcccccaaaacttgtcatcccagggctggggagtccaggtgggcagaggcagttgctgcttccctcactatccctgccagtccccccaggactccccctaggcctaagctggtctgaggcacagttaaaatcactgcccctgccccagctccatgcagggtcagccaggaaagactggctagaggccaaggcaagaactctgagtcaccaccttatggaggagagagggcctttggggattgtccaggtcagcttatgtggagagggagactgaggcccagagaggggcagccactaacccaaggtcacacagccaatcagtatcagagccaggaccagaatccaggcctccagcaccctccacatgatcccaaagcatgtgctttacaagggagaggtcagtgacagccaggccacaggctggagagctgcaccctgaatagaaggagtccaggggcaggggttggaggggtgctggttggtcagaaagagaaggcagggatgaatccttgatatttaaaaggaaagacttgcaggctggggagctgtggccctaggacaggggaagggagccagggtgtgagccatagtctgaggcccccggggaagatggctgtgtcaccacgctagtcacagaaggagggaggtggtggctgcggtttctcttcctgtgaagagatgtgagtccccagggccctcccagttccggcagggggaggtggggcggggctggggcggtggggcgggaggaggtctagtggattcaatttgggggccaaaccctgggcctgcagagtcctgtggtgaggcagagggcacagctcatatgaccaaacccagctggtggttttgggcttttgggcaaggatccctgagctacagacacattgggacctaccagggacagggacaggaacagccagcaggcctgggtaccatgcatgaagccagacccatggtcatcgcctccctgatgcaggcagccctgagccactacaaagaagcaccccccagcagtgagccaataatttgctgtccttccttcaaatctggctgggccacctactagctgggtgaccttgagaagttactatatttctccagcccagtgatttggaggcaaagaggggtcgagctgagaaaccaaagggagtggggaaagggaggagagaaggtggtggaaggaaatgtgtcaccctttagatctaatgcagcgccacctcctccaggaagccttcccagaacacccaagtttgacttgccacttgtcctccaagcaaccacagcacccccactcaatctctgcttctgtctgctcaaagcacacctccttattttcagtatctattaatagatactactcatactactaggacgactactactaacacagagtgcttctcacacacaggtgctgccctggcagctccacctggaataagttactgaattcccccaaccaccccaggaggcaggagctatcactatcccatgcttttctgataaggaaacacaggcagagagaggctacgtgactcgcccaaggtcacacagcaagtgcacagcacagctgagttcaaactgcacagcctggccctgcagcccgtgtttacaatcacaccacgaggccaagtcagggcctcccctgcagccagatcgcccctctgagcccgaggcccataccaatctccttggccagtgccaggccctgcgggtaggtgatgggagccagcttcttctccttcagtttctcgatggtgtccttgtcgtcccgcaggtccagcttggtgcccaccaggatgatgggtgtgctggggcagtggtgccgcacttctgggaaccactgggcaggtgggtggggggacacaaggttgtatgggtcaagagggggcgcgaggctgtgcggggatcagagggagtgtgagggtgtagggagaggagaggcagcaagttgccagaagatcagaggtgggcacgacggtgaggagagagagacgtgaggtggcacagggaggggaggccacgacgttgtgcaggaaggagggggcgcatgattgtaggaaaggaggaggcgaggttttgtgcagacataagaagcaaacatgaggttatgtgacaatcggaggcggacatgaggttgtgtggggaggaggagaatgcagccatggaaagtgggggtatagctaactatcgcagcaccccccaccccaggtcctctgaatcttaccccctcaagtccctctgccagccctggttggcactggggaccctctctgtatgcgacctctgctgccccagggaccagcctagagtcaccagttcctccctctgtccctcagggttacctgccccagagcccccaaggcccaccctgtccagctcaccttggcgcggacgttctcataagaggctgggctgacgagggagaagcagatgaggaagacgtcctggggacagagcaagcgaggttgctagtgaggagggcccagaggtgtcccaccatggcagccaccgagaggtggagcttggggctccctgagggtggaacaccccagggaatgctggggacttaggatctgggcagagcagagatacccttctcgcctctaccacgaggctgctgtttgttaggacgctcactaaaggccagggcctctgcgaagtggttatcctcacatgtcactctgcagcaagcactgctggtagccccattcctcagacagggaaagtgaggcttccagaggttaaagagtttgccaacgtgcactctggtgaggggaggatctgggattctagagtccatactccaatccatatactatccaccatctgattaccggccttagccgcctccctgcataccctggaggaagggcgaggacccagcagccacctgcaggcatcctccacctctcccctcccccagcactcccagggctcaccatgctgggctgcctcctggggccctgtgcagaatccacctgccccaccactggaaacagggggtgccagagcccaggaggcaatggggtgggaagatgggcacattgaggaccgggaaccaatgcagggctgagggagtgcaagaggaagcccttctctgcctgggacatgcaaggcaggcagactccctgagctgggccttaaggggagaggtagggtttcccaggctgagctggctggaagggcatcccaagcagagggaacagagacagcaaaggtcaggactgcaaggcaggtgggagcagcacaccgtctgtggataggagagcggccggagacggtcgtagtcctcctgcccagcagtgtcccacagccccaggttcactggcttgctgtccaccatcacattggctgaatagttgtcaaacctgtgggga

SEQ ID NO: 1404 - DNA, 282 bp, Homo sapiens
cctcctgagggcagggacttctgagcactgctggatccctggcacctagaacagtgccaggcacagaagaggtgctcaataaatgtgtgtttgatgaatgagtgagaagttgagatagaggagagtaattgtccgcaggagggggaggtctggcacctccacagaacttagcaagtcctgaggtgggactgactgtgcaggcactgttgtgcccatgtcggaacttcttaaatcctcacaacaaccccgcctctcttttaaagaaactcccctttgcttatc

SEQ ID NO: 1405 - DNA, 896 bp, Homo sapiens
gtttgtttgttttttgaaatggaatcacgctctgtcgcccaggctggagtgcagtggcaccatctcggcccactgcaaactctgccccctgggttcaagtgattctcctgcctcggcctcccaagtagctgggattacaggcatgcaccaccacgcccagctaatttttgtatttttagtagaaacagggtttcaccatgttgaccaggctggtctcgaacccctgaacttaagtgatccgcccgcctcggcctctcaaagtgctaggattacaggcgtgagccactgcgcccagccgcaatattttgtcgaatgaatgttcatcccgtctcaggctgggtccccccagaagcaaaccctgagacaaggaggtgatgtgaggggtttattcgggaagtgactccaggatgctgcagaaggggagtggggaggaataaaggaggggacagcagctgacacagggcaggtggttgagttgtcatggctgtggactgctgctgctctcagtcctgctggggccacctgggagacagaacggaccgtgctcagggcgtccccagagaaggcaggaagctagggtgctgtcattcatctcccatcttccagggaaagagggctgcttccggggcctttcagcccaccccagagtgtgcgtgaaagctgttagtcactggccatgggaagggccacggcaaacggtagaaagacacatgctgccgaggagatggtgtgaggcactgaccttgactcccaatgtctcccgccagacccagagagccctgcagggccatcgaacgagcctccagatgcacttgctaggcacctactatgcatcgggtgcagagccagcgctggggccaccaaggagtacatgcctgatcctgcccccacagctg

SEQ ID NO: 1406 - DNA, 4160 bp, Homo sapiens; identical to SEQ ID NO: 1269

SEQ ID NO: 1407 - DNA, 2446 bp, Homo sapiens; identical to SEQ ID NO: 1270

SEQ ID NO: 1408 - DNA, 4185 bp, Homo sapiens; identical to SEQ ID NO: 1271

SEQ ID NO: 1409 - DNA, 547 bp, Homo sapiens; identical to SEQ ID NO: 1272

SEQ ID NO: 1410 - DNA, 547 bp, Homo sapiens; identical to SEQ ID NO: 1273

SEQ ID NO: 1411 - DNA, 547 bp, Homo sapiens; identical to SEQ ID NO: 1273

SEQ ID NO: 1412 - DNA, 424 bp, Homo sapiens; identical to SEQ ID NO: 1275

SEQ ID NO: 1413 - DNA, 419 bp, Homo sapiens; identical to SEQ ID NO: 1276

SEQ ID NO: 1414 - DNA, 424 bp, Homo sapiens; identical to SEQ ID NO: 1275

SEQ ID NO: 1415 - DNA, 3585 bp, Homo sapiens
atgcttcagaagatgcagagcttctcttagttggaaataagtggactgtgaaacggacagagaaatcaccaggcagcagggggaaaaggtgagagggcgtgggaggcacggttgccacacactgtgcttagcgcttgaggtactgtttcttttaataaattacttattttaaaaattacaaagaaattatcaatacagtgataactcagtcacatcctcctaatttgtttgcacttttttgacttcgtgctcctttaaattcattctgaaatggagggagaaaaaaacacatcagtgtatacaacattattatctaacctgacattttatacagagaaacatattttaagccataaagttgcttttataatttactttaacgtactttaaacttccttggtttttgctaaggattgaatcatggagaaacgatgctattcacatttaaatgtcagatatgttacacttttagaaacttaggcaactgatttgactggaaggtcccggcatcaccttcaggatttttattgtcttttgttttgctagttgcttataatgtaagaatttgctacacttgtgaactttatctttgagcgtcagtgggactttctaccccttaatcccagcccttcccttgaagctgagcccagagacctcatgctcgcacgctggtctgtgaggccccacacagaggaaataggtgtgtgtttcttctcagtttgcacagcagatcactgggatgcggttctgtgaagcaagtgccaaggataacttcaatgtggacgagatatttttgaaacttgtcgatgacattctgaaaaaggtaaaaaaaagaatctacattataaaagtatatcatctgaaacctgttgtttccttatgcttttttattgagaattttgtatttagaaaccaaaatacagtagttgtgctcaggcgcaagaaccaggtatggttgttaactcagccacaggcacccggcctgctgtagccgtttcccacccagggtgcttctggtgtccttggggttggtatatggcatacttgcttcgccttaagatacagcagggtagacttaacacgggtgtagcaatatgctgtgtttatttgacatttgcttgttttcccacccccgtttttctgtgagaattcagttggagacctagccaagtctgcaggtgtcttagcggaaaagagagccccgtggtgctgcgcttgcatcccttcctgttctgctccctggtgggagccacttccttacagagacctttccatgatgctgagttgcaagaaaattgctagacagcttcattgagcagcagcagtttcttcaggcatctttaggcttacattcaaaaattgttaataagaactgaagtttatgttattaagtgaaatttgctcagttcatacataattcagaagcttctaataaagtaattgtttaggctgggtgtggtagctcacacctataatcccagcactttggaaagtcaaggtgggaggatcacttgaggccaggagttcaagaccagactgggcaacacagtgaagccccatctctacaaaaaaaatttaaaaattagcaaggtgtagtggcatgtacctggttgtagtaatcccagctacccaggctgatgcaggaggattgcttgagcccaggaatttgaggaatttgatacagtgagctatgatcgtatctacactccagcctgggtgacagaatgagacactgtctctatttaaaaaaaaaaaaaaaagtttatataattgccaaggttaggttatgtctgtctttagtaagtatgcaactccttggaatgcagaccatttttaaaatttattaatgtatttttattttgcctggttctgtgaaaatatatgtttatgaggttgatctgttctcttctaccatagggtattaagcaggctgggcattgttcatgttgtgatatgaagtgtcttgaacatggctttttttggcttaatattttaatgtctaattgatctttaacgatcggaggactttcaataataatacttttttttatataattgtataatttggaaagcatttacagttgacccttgaacaacaagggggctagaggtgctgaccccctaaacagtcagaaatctgagtataacttgactccctaaaaacttaacgactaaaagcctatcactgactggaagccttactgataacataaacagtcacttaacacataggttgtatgttatacgtattttataccatgttcttaaagtaagctagagaaaagaaaatgttattaagaaaatcataaggaagagaaaatatatttactattcattagtggaagtggatcatcataaaggtcttcatctgtgtcatcttcacattgagtaggctgaggaggaggaggaggaggagggattggtcttgctgtctcttccgggtggcagaggcggaggagaaggtgagtggggaggcaggagaggcaggtgaaacttgtattgaaaagcagctgtgtataagtggacctgtgcagttgaaactcatgttcaagggtcagctgtatgtgtaccttgtaaagtttaaacggattttttttgtttgtttatacgttagatgcctctggatattttaaggaatgagttgtccaatagtatcctgtcgttacaaccagagcctgagataccgccagaactgcctccaccaagaccacatgtccgatgctgttgatttcctactttggagacaaatgtggaattgattcctggcacggggaacaaccgttctattctgcactacaatcatttggacaatttgcctttcgcactttgtaatccaagtcagagctatacactaacttgtaattttgctatatgcaatcctgggtaagatttggactaagttacctattccctccgaattattatatttcattcattaccccagtgtctagtgtacatacactgggaaacctagtacttctaatatgaagaatgggagaaatgaaaggtataatgtttcttgaaataaataatataattgtccttattaattatattatgaggacagaagatattctgataagagagaacgtggtgctttgcttaccgttttaaagaaaatttgtaaaactaaagactttttgaaaaaaagctatcttaagtgctttttctttatttacaagacatttcccccagtggtagcatctgaagtattggagtgtttctgccacgaagcaaagctccattcatggccgtcatggaaggttatttattaatgttacataatggtagaatattactagttagagggttggatttgacttggtcctaaggccacagaatctctctcatggcttcctaagggatgtacctttatgcttttaagaactacaaagattcaataaagaaagaaatgtttttgaaactatagaaaaagattttaaaacacgctgctgtcctaaacaaatcctgtttaaaggaattttaaagagatgcattttactatatcaaagaacatacgtgtatttgcctaaacactctgtacctttgtaatgataaaacttcccccttctttacggtgaagct

SEQ ID NO: 1416 - DNA, 3396 bp, Homo sapiens
gaagatgcagagcttctcttagttggaaataagttggactgtgaaacggacagagaaatcaccaggcagcagggggaaaaggtgagagggcgtgggaggcacggttgccacacactgtgcttagcgcttgaggtactgtttcttttaataaattacttattttaaaaattacaaagaaattatcaatacagtgataactcagtcacatcctcctaatttgtttgcacttttttgacttcgtgctcctttaaattcattctgaaatggagggagaaaaaaacacatcagtgtatacaacattattatctaacctgacattttatacagagaaacatattttaagccataaagttgcttttataatttactttaacgtactttaaacttccttggtttttgctaaggattgaatcatggagaaacgatgctattcacatttaaatgtcagatatgttacacttttagaaacttaggcaactgatttgactggaaggtcccggcatcaccttcaggatttttattgtcttttgttttgctagttgcttataatgtaagaatttgctacacttgtgaactttatctttgagcgtcagtgggactttctaccccttaatcccagcccttcccttgaagctgagcccagagacctcatgctcgcacgctggtctgtgaggccccacacagaggaaataggtgtgtgtttcttctcagtttgcacagcagatcactgggatgcggttctgtgaagcaagtgccaaggataacttcaatgtggacgagatatttttgaaacttgtcgatgacattctgaaaaaggtaaaaaaaagaatctacattataaaagtatatcatctgaaacctgttgtttcctttattgcttttttattgagaattttgtatttagaaaccaaaatacagtagttgtgctcaggcgcaagaaccaggtatggttgttaactcagccacaggcacccggcctgctgtagccgtttcccacccaggggcttctggtgtccttggggttggtatatggcatacttgcttcgccttaagatacagcagggtagacttaacagggtgtagcaatatgctgtgtttatttgacatttgcttgttttcccacccccgtttttctgtgagaattcagttggagacctagccaagtctgcaggtgtcttagcggaaaagagagccccgtggtgctgcgcttgcatcccttcctgttctgctccctggtgggagccacttccttacagagacctttccatgatgctgagttgcaagaaaattgctagacagcttcattgagcagcagcagtttcttcaggcatctttaggcttacattcaaaaattgttaataagaactgaagtttatgttattaagtgaaatttgctcagttcatacataattcagaagcttctaataaagtaattgtttaggctgggtgtggtagctcacacctataatcccagcactttggaaagtcaaggtgggaggatcacttgaggccaggagttcaagaccagactgggcaacacagtgaagccccatctctacaaaaaaaatttaaaaattagcaaggtgtagtggcatgtacctggttgtagtaatcccagctacccaggctgatgcaggaggattgcttgagcccaggaatttgaggaatttgatacagtgagctatgatcgtatctacactccagcctgggtgacagaatgagacactgtctctatttaaaaaaaaaaaaaaaagtttatataattgccaaggtaggttatgtctgtctttagtaagtatgcaactccttggaatgcagaccatttttaaaatttattaatgtatttttattttgcctggttctgtgaaaatatatgtttatgaggttgatctgttctcttctaccatagggtattaagcaggctgggcattgttcatgttgtgatatgaagtgtcttgaacatggctttttttggcttaatattttaatgtctaattgatctttaacgatcggaggactttcaataataatacttttttttatataattgtataatttggaaagcatttacagttgacccttgaacaacaagggggctagaggtgctgaccccccaaacagtcagaaatctgagtataacttgactccctaaaaacttaacgactaaaagcctatcactgactggaagccttactgataacataaacagtcacttaacacataggttgtatgttatacgtattttataccatgttcttaaagtaagctagagaaaagaaaatgttattaagaaaatcataaggaagagaaaatatatttactattcattagtggaagtggatcatcataaaggtcttcatctgtgtcatcttcacattgagtaggctgaggaggaggaggaggaggagggattggtcttgctgtctcttccgggtggcagaggcggaggagaaggtgagtggggaggcaggagaggcaggtgaaacttgtattgaaaagcagctgtgtataagtggacctgtgcagttgaaactcatgttcaagggtcagctgtatgtgtaccttgtaaagttaaaacggatttttttttgtttgtttatacgttagatgcctctggatattttaaggaatgagttgtccaatagtatcctgtcgttacaaccagagcctgagataccgccagaactgcctccaccaagaccacatgtccgatgctgttgatttcctactttggagacaaagtggaaatgattcctggaaaggggaaaaaacgttctattctgcactacaatcattttgacaatttcctttcgcactttgtaatccaagtcagagctatacactaacttgtaaatatgcatatatgcaatcctgggtaagttttggttataagttacctatttccctccaaattattatatttcattcattaccccagtgtctagtgtacatacactgggaaacctagtacttctaatatgaagaatgggagaaatgaaaggtataatgtttcttgaaataaataatataattgtccttattaattatattatgaggacagaagatattctgataagagagaacgtggtgctttgcttaccgttttaaagaaaatttgtaaaactaaagactttttgaaaaaaagctatcttaagtgctttttctttatttacaagacatttcccccagtggtagcatctgaagtattggagtgtttctgccacgaagcaaagctccattcatggccgtcatggaaggttatttattaatgttacataatggtagaatattactagttagagggttggatttgacttggtcctaaggccacagaatctctctcatggcttcctaagggatgtacctttatgcttttaagaactacaaagattcaat

SEQ ID NO: 1417 - DNA, 6512 bp, Homo sapiens
cattcataaatacaaaattttatttgcacttcattagtgtagaaagaccacaatgcttttcataccacaacactcaagacacaccaagttattcaaatacataattacttaattaccttgactaaacaaaaccgggccgtttaataaaagatataccaaagatagagttcccaaattcctcctcggccccaaaaaaaaaaaaaaaaaaaaaaaaaaaaaaaaaaaaagaacacagtctaggcttaatcagaataagcttcaccgtaaagaagggggaagttttatcattacaaaggtacagagtgtttaggcaaatacacgtatgttctttgatatagtaaaatgcatctctttaaaattcctttaaacaggatttgtttaggacagcagcgtgttttaaaatctttttctatagtttcaaaaacatttctttctttattgaatctttgtagttcttaaaagcataaaggtacatcccttaggaagccatgagagagattctgtggccttaggaccaagtcaaatccaaccctctaactagtaatattctaccattatgtaacattaataaataaccttccatgacggccatgaatggagctttgcttcgtggcagaaacactccaatacttcagatgctaccactgggggaaatgtcttgtaaataaagaaaaagcacttaagatagctttttttcaaaaagtctttagttttacaaattttctttaaaacggtaagcaaagcaccacgttctctcttatcagaatatcttctgtcctcataatataattaataaggacaattatattatttatttcaagaaacattatacctttcatttctcccattcttcatattagaagtactaggtttcccagtgtatgtacactagacactggagtaatgaatgaaatataataatttggagggaaataggtaacttataaccaaaacttacccaggattgcatatatgcatatttacaagttagtgtatagctctgacttggattacaaagtgcgaaaggaaattgtcaaaatgattgtagtgcagaatagaacgttttttcccctttccaggaatcatttccactttgtctccaaagtaggaaatcaacagcatcggacatgtggtcttggtggaggcagttctggcggtatctcaggctctggttgtaacgacaggatactattggacaactcattccttaaaatatccagaggcatctaacgtataaacaaacaaaaaaaaatccgttttaactttacaaggtacacatacagctgacccttgaacatgagtttcaactgcacaggtccacttatacacagctgcttttcaatacaagtttcacctgcctctcctgcctccccactcaccttctcctccgcctctgccacccggaagagacagcaagaccaatccctcctcctcctcctcctcctcagcctactcaatgtgaagatgacacagatgaagacctttatgatgatccacttccactaatgaatagtaaatatattttctcttccttatgattttcttaataacattttcttttctctagcttactttaagaacatggtataaaatacgtataacatacaacctatgtgttaagtgactgtttatgttatcagtaaggcttccagtcagtgataggcttttagtcgttaagtttttagggagtcaagttatactcagatttctgactgtttagggggtcagcacctctagcccccttgttgttcaagggtcaactgtaaatgctttccaaattatacaattatataaaaaaaagtattattattgaaagtcctccgatcgttaaagatcaattagacattaaaatattaagccaaaaaaagccatgttcaagacacttcatatcacaacatgaacaatgcccagcctgcttaataccctatggtagaagagaacagatcaacctcataaacatatattttcacagaaccaggcaaaataaaaatacattaataaattttaaaaatggtctgcattccaaggagttgcatacttactaaagacagacataacctaccttggcaattatataaactttttttttttttttttaaatagagacagtgtctcattctgtcacccaggctggagtgtagatacgatcatagctcactgtatcaaattcctcaaattcctgggctcaagcaatcctcctgcatcagcctgggtagctgggattactacaaccaggtacatgccactacaccttgctaatttttaaattttttttgtagagatggggcttcactgtgttgcccagtctggtcttgaactcctggcctcaagtgatcctcccaccttgactttccaaagtgctgggattataggtgtgagctaccacacccagcctaaacaattactttattagaagcttctgaattatgtatgaactgagcaaatttcacttaataacataaacttcagttcttattaacaatttttgaatgtaagcctaaagatgcctgaagaaactgctgctgctcaatgaagctgtctagcaattttcttgcaactcagcatcatggaaaggtctctgtaaggaagtggctcccaccagggagcagaacaggaagggatgcaagcgcagcaccacggggctctcttttccgctaagacacctgcagacttggctaggtctccaactgaattctcacagaaaaacgggggtgggaaaacaagcaaatgtcaaataaacacagcatattgctacaccctgttaagtctaccctgctgtatcttaaggcgaagcaagtatgccatataccaaccccaaggacaccagaagcccctgggtgggaaacggctacagcaggccgggtgcctgtggctgagttaacaaccatacctggttcttgcgcctgagcacaactactgtattttggtttctaaatacaaaattctcaataaaaaagcaataaaggaaacaacaggtttcagatgatatacttttataatgtagattcttttttttacctttttcagaatgtcatcgacaagtttcaaaaatatctcgtccacattgaagttatccttggcacttgcttcacagaaccgcatcccagtgatctgctgtgcaaactgagaagaaacacacacctatttcctctgtgtggggcctcacagaccagcgtgcgagcatgaggtctctgggctcagcttcaagggaagggctgggattaaggggtagaaagtcccactgacgctcaaagataaagttcacaagtgtagcaaattcttacattataagcaactagcaaaacaaaagacaataaaaatcctgaaggtgatgccgggaccttccagtcaaatcagttgcctaagtttctaagagtgtaacatatctgacatttaaatgtgaatagcatcgtttctccatgattcaatccttagcaaaaaccaaggaagtttaaagtacgttaaagtaaattataaaagcaactttatggcttaaaatatgtttctctgtataaaatgtcaggttagataataatgttgtatacactgatgtgtttttttctccctccatttcagaatgaatttaaaggagcacgaagtcaaaaaagtgcaaacaaattaggaggatgtgactgagttatcactgtattgataatttctttgtaatttttaaaataagtaatttattaaaagaaacagtacctcaagcgctaagcacagtgtgtggcaaccgtgcctcccacgccctctcaccttttccccctgctgcctggtgatttctctgtccgtttcacagtccaacttatttccaactaagagaagctctgcatcttctgaagcatactgtggaattttaaaagaagccacatttcaaagatgggcatcgccatatactgacagcagaaatataaaccgatacagtatttttcgctaatttacatttgtccattcacttccactgtctttgaggttctaccagttcccaggcaggactgggcagcagtgcaaggcagggctcactgtgtcttagaaagaactagggcacaggcattaagaaccacaatgctcttggctgttgacccaacaattcccaagacctcttcctaaggaaatgattcaacatacaggcaaagctctacactcaaaatggttatcaactgaaaaacctacaagtcaaacaaaatggctcaagaatcaagttattttaaaaacacaggcatttaaaaaaacacacgcttcagaagaacagagaatgacacaggaaggactccatgacagaatattcacaaaataagcaagacgtaaagctaaatacagtgaagccaatttggtttttcaggatgccagaggtacagatttcttctttacttttgtgcttttcttcattttccaaatttctataatgaaggtatcattaattttataaccaggaaaaaagttaagctacatttctaagtttaaaaatacatataggtacaatgagatttctgtctttaaaaatgaggttaaaatctcttgagcaactaacttgtcgttctaaaaagttacttgaaacagactgcaacaaaaggaacctgaatggtgtggccgtgggccagcttacgcagccaggtgaggagtgccggccccttatcagggaggtgtgggtaacagtgacagcacccaccgcaggctggggcaatgggcccgcactcaggaaatgatgctctcactcaagtaaggtgaaaagcagcagttgatgacaaaaggaagacagcatcagacctcaagacctgggtgggcacagactcacaaactcaagtaccaaatggggtaggatttaggccatttcttttggttttgtattcatcctattagttctaaaagttttagactatgaggactgtccacttctaatttccacaggattgcactctgtgacttccatatcagggaacatcagtatccactgatgtgccaatggagggcctggtatgactgatgcccagtgcagagcaggctggggcaggggccgcctcaggtctgatccaaccttgcaaccctgatcctaacaacttttttttttaatgaaaaaaaaaaaaaaaaaagagagagagagagatggagtcccactatgttgcccaggctggtctcgacctcctgggttcaagtgatcctcttgctttggccttccaaagtgctgggattacaggtgtgagtcaccatgcctggccaccaatcctaacacattttaaagaggcatacatcatcaatgacatgcttggtaaagctggcaaacattctccaatgttatctagcagacaggtttaaatgcaatgtgtagataaaatccaatttatattgcatatgcttgttatgcaaaggaactaaacatgaaactactgcacgaggggaagaaaactcaaaatgtggtcaatggtatatcatcacatcccactcccaactgctctgccttctaaatgtgtatttgggaacatgtttcttagcggagaacccacggttcacattaaccacagggacacagcctatctgtatgattccatcacgagccaaaggagaactcgagctcctcttgctcaaaatgaggagctaaagggcatctataattgcgaggacagatgtccagtgggtgacggaggcgcgtgggacatccgcaggcaccgtggagaaggccatctcctcaaggttgtcactcagtggacgtgcatgagatgagtgtccaggtgacctttccgcagaaatgaaatgtcttatatctattccatgaaagcagctggatgtagtggaatgagcatgtttggcctctgtagttgagacagtccaggataccagacgaaaaatcctgattctggataaatttaattcttctttgcctcatccacaatacaggactacatccctatcccgaaggctatatatgggctaaatgatgtttagtctatatgaaaacatgctcaatacatgtgtttcccctccttcttttaataatgattaagactcacaagcagagagttcacattggacagaaaaatgcaacatttaccttatcaatcatcttcatccatttcggcaaatcatcaaatgtctccttcttagtgatatcatatactaatatgatccccttggcacttctgtaataagctgaggtaatgctgttgaatctctcctgacctgctgtgtccctaagaaaaagcagccaaagtcagttcccaaataatgcccaaagtgagcaccatcacattccaatgcaaacatagattatatgctgcagtttttctgcgaaaaaagaacgagagtaacccctatttccctttgacctgatgaccacacttaaagaaagtaggaaaaatttaggttgactaaaactatgacatagaaaatacctttatatttaacaactaaattagattaatggagatggattatgaaccaagatcaacatactctcctgaataactttttccctcaagacagaaaatcagcaacaggaatgctaatataacatcaaaata

SEQ ID NO: 1418 - DNA, 6071 bp, Homo sapiens
tgtagattttaaaacatagaggaacttcccttaggaagccatgacagagaattcgtggccttaggacctagtcagatccaacgcctctagactagtaatattctaccattatgtaacattaataaataaccttccatgacggccatgaatggagctttgcttcgtggcagaaacactccaatacttcagatgctaccactgggggaaatgtcttgtaaataaagaaaaagcacttaagatagctttttttcaaaaagtctttagttttacaaattttctttaaaacggtaagcaaagcaccacgttctctcttatcagaatatcttctgtcctcataatataattaataaggacaattatattatttatttcaagaaacattatacctttcatttctcccattcttcatattagaagtactaggtttcccagtgtatgtacactagacactggggtaatgaatgaaatataataatttggagggaaataggtaacttataaccaaaacttacccaggattgcatatatgcatatttacaagttagtgtatagctctgacttggattacaaagtgcgaaaggaaattgtcaaaatgattgtagtgcagaatagaacgttttttcccctttccaggaatcatttccactttgtctccaaagtaggaaatcaacagcatcggacatgtggtcttggtggaggcagttctggcggtatctcaggctctggttgtaacgacaggatactattggacaactcattccttaaaatatccagaggcatctaacgtataaacaaacaaaaaaaaatccgttttaactttacaaggtacacatacagctgacccttgaacatgagtttcaactgcacaggtccacttatacacagctgcttttcaatacaagtttcacctgcctctcctgcctccccactcaccttctcctccgcctctgccacccggaagagacagcaagaccaatccctcctcctcctcctcctcctcagcctactcaatgtgaagatgacacagatgaagacctttatgatgatccacttccactaatgaatagtaaatatattttctcttccttatgattttcttaataacattttcttttctctagcttactttaagaacatggtataaaatacgtataacatacaacctatgtgttaagtgactgtttatgttatcagtaaggcttccagtcagtgataggcttttagtcgttaagtttttagggagtcaagttatactcagatttctgactgtttagggggtcagcacctctagcccccttgttgttcaagggtcaactgtaaatgctttccaaattatacaattatataaaaaaaagtattattattgaaagtcctccgatcgttaaagatcaattagacattaaaatattaagccaaaaaaagccatgttcaagacacttcatatcacaacatgaacaatgcccagcctgcttaataccctatggtagaagagaacagatcaacctcataaacatatattttcacagaaccaggcaaaataaaaatacattaataaattttaaaaatggtctgcattccaaggagttgcatacttactaaagacagacataacctaccttggcaattatataaacttttttttttttttttaaatagagacagtgtctcattctgtcacccaggctggagtgtagatacgatcatagctcactgtatcaaattcctcaaattcctgggctcaagcaatcctcctgcatcagcctgggtagctgggattactacaaccaggtacatgccactacaccttgctaatttttaaattttttttgtagagatggggcttcactgtgttgcccagtctggtcttgaactcctggcctcaagtgatcctcccaccttgactttccaaagtgctgggattataggtgtgagctaccacacccagcctaaacaattactttattagaagcttctgaattatgtatgaactgagcaaatttcacttaataacataaacttcagttcttattaacaatttttgaatgtaagcctaaagatgcctgaagaaactgctgctgctcaatgaagctgtctagcaattttcttgcaactcagcatcatggaaaggtctctgtaaggaagtggctcccaccagggagcagaacaggaagggatgcaagcgcagcaccacggggctctcttttccgctaagacacctgcagacttggctaggtctccaactgaattctcacagaaaaacgggggtgggaaaacaagcaaatgtcaaataaacacagcatattgctacaccctgttaagtctaccctgctgtatcttaaggcgaagcaagtatgccatataccaaccccaaggacaccagaagcccctgggtgggaaacggctacagcaggccgggtgcctgtggctgagttaacaaccatacctggttcttgcgcctgagcacaactactgtattttggtttctaaatacaaaattctcaataaaaaagcaataaaggaaacaacaggtttcagatgatatacttttataatgtagattcttttttttacctttttcagaatgtcatcgacaagtttcaaaaatatctcgtccacattgaagttatccttggcacttgcttcacagaaccgcatcccagtgatctgctgtgcaaactgagaagagacacacacctatttcctctgtgtggggcctcacagacgcagcgtgcgagcatgaggtctctgggctcagcttcaagggaagggctgggattaaggggtagaaagtcccactgacgctcaaagataaagttcacaagtgtagcaaattcttacattataagcaactagcaaaacaaaagacaataaaaatcctgaaggtgatgccgggaccttccagtcaaatcagttgcctaagtttctaaaagtgtaacatatctgacatttaaatgtgaatagcatcgtttctccatgattcaatccttagcaaaaaccaaggaagtttaaagtacgttaaagtaaattataaaagcaactttatggcttaaaatatgtttctctgtataaaatgtcaggttagataataatgttgtatacactgatgtgtttttttctccctccatttcagaatgaatttaaaggagcacgaagtcaaaaaagtgcaaacaaattaggaggatgtgactgagttatcactgtattgataatttctttgtaatttttaaaataagtaatttattaaaagaaacagtacctcaagcgctaagcacagtgtgtggcaaccgtgcctcccacgccctctcaccttttccccctgctgcctggtgatttctctgtccgtttcacagtccaacttatttccaactaagagaagctctgcatcttctgaagcatactgtggaattttaaaagaagccacatttcaaagatgggcatcgccatatactgacagcagaaatataaaccgatacagtatttttcgctaatttacatttgtccattcacttccactgtctttgaggttctaccagttcccaggcaggactgggcagcagtgcaaggcagggctcactgtgtcttagaaagaactagggcacaggcattaagaaccacaatgctcttggctgttgacccaacaattcccaagacctcttcctaaggaaatgattcaacatacaggcaaagctctacactcaaaatggttatcaactgaaaaacctacaagtcaaacaaaatggctcaagaatcaagttattttaaaaacacaggcatttaaaaaaacacacgcttcagaagaacagagaatgacacaggaaggactccatgacagaatattcacaaaataagcaagacgtaaagctaaatacagtgaagccaatttggtttttcaggatgccagaggtacagatttcttctttacttttgtgcttttcttcattttccaaatttctataatgaaggtatcattaattttataaccaggaaaaaagttaagctacatttctaagtttaaaaatacatataggtacaatgagatttctgtctttaaaaatgaggttaaaatctcttgagcaactaacttgtcgttctaaaaagttacttgaaacagactgcaacaaaaggaacctgaatggtgtggccgtgggccagttacgcagccaggtgaggagtgccggccccttatcagggaggtgtgggtaacagtgacagcacccaccgcagggctggggcaatgggccccgcactcaggaaatgatgctctcactcaagtaaggtgaaaagcagcagttgatgacaaaaggaagacagcatcagacctcaagacctgggtgggcacagactcacaaactcaagtaccaaatggggtaggatttaggccatttcttttggttttgtattcatcctattagttctaaaagttttagactatgaggactgtccacttctaatttccacaggattgcactctgtgacttccgtatcagggaacatcagtatccactgatgtgccaatggagggcctggtatgactgatgcccagtgcagagcaggctggggcaggggccccgcctcaggtctgatccaaccttgcaaccctgatcctaacaacttttttttttaatgaaaaaaaaaaaaaaaaaaaagagagagagagagatggagtcccactatgttgcccaggctggtctcgacctcctgggttcaagtgatcctcttgctttggccttccaaagtgctgggattacaggtgtgagtcaccatgcctggccaccaatcctaacacattttaaagaggcatacatcatcaatgacatgcttggtaaagctggcaaacattctccaatgttatctagcagacaggtttaaatgcaatgtgtagataaaatccaatttatattgcatatgcttgttatgcaaaggaactaaacatgaaactactgcacgaggggaagaaaactcaaaatgtggtcaatggtatatcatcacatcccactcccaactgctctgccttctaaatgtgtatttgggaacatgtttcttagcggagaacccacggttcacattaaccacagggacacagcctatctgtatgattccatcacgagccaaaggagaactcgagctcctcttgctcaaaatgaggagctaaagggcatctataattgcgaggacagatgtccagtgggtgacggaggcgcgtgggacatccgcaggcaccgtggagaaggccatctcctcaaggttgtcactcagtggacgtgcatgagatgagtgtccaggtgacctttccgcagaaatgaaatgtcttatatctattccatgaaagcagctggatgtagtggaatgagcatgtttggcctctgtagttgagacagtccaggataccagacgaaaaatcctgattctggataaatttaattcttctttgcctcatccacaatacaggactacatccctatcccgaaggctatatatgggctaaatgatgtttagtctatatgaaaacatgctcaatacatgtgtttcccctccttcttttaataatgattaagactcacaagcagagagttcacattggacagaaaaatgcaacatttaccttatcaatcatcttcatccatttcggcaaatcatcaaatgtctccttcttagtgatatcatatactaatatgatccccttggcacttctgtaataagctgaggtaatgctgttgaatctctcctgacctgctgtgtccctaagaaaaagcagccaaagtcagttcccaaataatgcccaaagtgagcaccatcacattccaatgcaaacatagattatatgctgcagtttttctgcgaaaaaagaacgagagtaacccctatttccctttgacctgatgaccacacttaaagaaagtaggaaaaatttaggttgactaaaactatgacatagaaaatacctttatatttaacaactaaattagattaatggagatggattatgaaccaagatcaacatactctcctgaataactttttccctcaagacagaaaatcagcaacaggaatgctaatataacatcaaaata

SEQ ID NO: 1419 - DNA, 3367 bp, Homo sapiens
ttttttttttttttttggagacagagtctagctctgtcacccaggctggaatgcaatcagtgacatgatcttggttcactgcaacctctgcctcccgagttcaagcgattctcctgcctcagcctcccgacaacctgggattacaggcatgcgccaccatgcctggctaatatatttttagtagagacagggtttcaccatgtcggccaggctggtctcaaactcctgacctcatgtgatccacctgccttggcctcccaaagtgctggaattacaggtgtaagctaccagcccagcctccaattactttcaaaccaagattttgaaaattagaaaacaagaattttcatagcagaaaagatctgaaaatcctttacagagtaaaacttttattttttttttcaaatgaaatatctttccagagtgaaattttgtgcagaaatgaagcatgaaagtaattttttatttcttacctcatacctgaaggattaatgttagccaacattagctttgtaatcaatgtgctgaccttctagaataaatcataagggtacaaggaaatttaatactctaaattatagatgtgcacttgaccatatttcttccccttacaaaaccataacttctgttctagaaggttctgagtccccaatctactacactcagagggaaacagacatggagggagcccgaggaacagtgaagatgtgctgggaaccgggcagtgggctttttcccaattttctcagcagcactggctcaaaggctccctggcttggatgacagccgtatctgagccgctctgcagccagcagggcagtagtgggcagagtctcatggcacccgggcactattcttggccccatgacttggcttcttggaaaactcaacctctctgagctgagctctgtttcctcctgtgtaaaatggtggaagctgtaacacctctatggtaggctgttatcaacaacatgaaaatgtaggacaattgacactatttaagtctacaactctcctttaactgacattgattgttaatatctggttttgttgaaaagatgaccaatagtcccacacttatgaaaaatgctgtagaattagccttgttaggccgggcgcagtggctcatgcctgtaatcccagcaatttgtgaagctgaggtgggcaagtcacctgaggccacgagttcaagaccagcctggccaacatggtgaaacccccgtctctactaaaaatataaaacttagctaggcatgatggcagatgcctgtaatctcagctactcagaaggctgaggcaggagaattgcttgagcctgcgaggcagaggttgcagttaactgcaatcgcgccactgcactgcagcctaggggacagagagcaagactccatctcaaaaaacaaaaacaaaaacaaaaacaaaccagaattggctttgttattttcttaaccctagacagaataggtggtcaaaggaaaagggaggagagataccagataggtttgcaaatatggtaaagttcattattacccaactgctcctttgaaatctaaaagcgttcttttttctccaggctgacactggccacatccacatgaagaatgtaagcacatcaatcagtacagatgccagctgagccctgtttctcctttttaaaccaaatataaaatttgaagtcctcccacaaccatctgaatggacctccccttcggccagggcactctaaaatttaacctgaaaggctggtgctggccatgatgagcagtgggggtcagacattcctcactctaccctccagcatgaacatgaacacacactttaagtctggtaagaaacgtttagtctcttctctctgaagccagctacttagaggctcatctacatgataaaacctaggtctccacaaccccttatagtaacccagacattgctttctatagataataactctttcaaccaactgctaatcagaatatgtttaaatctacctatgacctggaagccccagcccctttgagctgtctcacctgtccagatcaaaccagtgtaaatcttacatgtattgattgatgtattatgtctccttaaaatgtacaaaagcaaagtgtactcttgaccactttgggcacaggttgtcaggaccacctgatgctgtgtcataggtgtgtccttagccctggcaaaataaactctctaaattgattgagacctgtctcagatactttttggtttatatcttatattatgataagcctagaaactgagaaccactgcaaatttctaattccaataaggctcaatggagaaggcttccaatcaggaaggactaacacttgcaaagcgatttctttaaagaccatctatgatttagctttacccaaagaaccccaaccaagtgcgccacagtggagtaagctggggggcaacaggctcttccatgcaaggccaccagagcctctcaccacacagcagggagttcctgaaaggggaggagaacacttcccttaggcacctgtgggactgggtccctagaaacaccccttggccatgctgttacaatttctggtttccttcagaggagacctgccaccaaattagttcacatcagtgatgccttattgtcaaacaagcacgaaagctcactggcaaattcatttccacataaagtgaagccatttgctttgcctcagaggatatgaggatcccctgctgccctgactggaaggtgaggagggcagaggtgggtatgtttctgtctacccaggtcctgcagtacacgatcagtagacatgcgctggtaacatgtttaaaaattagaaagttgatgccacatcaggcaaggcaaagaaacttcatcttttggcctcagaactgcaaaaacaaaaaaggaaatctgaagaatatgatagacgaagactgaattcttcaggatttctaaaagcaacttaaagaccacactaatagtcaccttcaaggtggctgagaaggaacagagttagataccatttggtttccataaagagtcaatgaataaaattatttctctaatcctaggcatttaggggtatactttactacttccaaaccaataaagagttaaatctttcagaggatggtttaccatcctcacaagttatggcttgtctaaattaggattcaatcaaatgtttttaatgttgaaaaatattctgtgctatttgagtactgttacaaaacattccccatttctttaaaaagttaaaaataataagcattttttctactctgaaatcagtggttaacacaatatcgctgaaccacaaatttaaataacaatcagatttaaggtcttcaataagcattttaggaattacatactttaataaac

SEQ ID NO: 1420 - DNA, 3367 bp, Homo sapiens
ttttttttttttttttggagacagagtctagctctgtcacccaggctggaatgcaatcagtgacatgatcttggttcactgcaacctctgcctcccgagttcaagcgattctcctgcctcagcctcccgacaacctgggattacaggcatgcgccaccatgcctggctaatatatttttagtagagacagggtttcaccatgtcggccaggctggtctcaaactcctgacctcatgtgatccacctgccttggcctcccaaagtgctggaattacaggtgtaagctaccagcccagcctccaattactttcaaaccaagattttgaaaattagaaaacaagaattttcatagcagaaaagatctgaaaatcctttacagagtaaaacttttaatttttttttcaaatgaaatatctttccagagtgaaattttgtgcagaaatgaagcatgaaagtaattttttatttcttacctcatacctgaaggattaatgttagccaacattagctttgtaatcaatgtgctgaccttctagaataaatcataagggtacaaggaaatttaatactctaaattatagatgtgcacttgaccatatttcttccccttacaaaaccataacttctgttctagaaggttctgagtccccaatctactacactcagagggaaacagacatggagggagcccgaggaacagtgaagatgtgctgggaaccgggcagtgggctttttcccaattttctcagcagcactggctcaaaggctccctggcttggatgacagccgtatctgagccgctctgcagccagcagggcagtagtgggcagagtctcatggcacccgggcactattcttggccccatgacttggcttcttggaaaactcaacctctctgagctgagctctgtttcctcctgtgtaaaatggtggaagctgtaacacctctatggtaggctgttatcaacaacatgaaaatgtaggacaattgacactatttaagtctacaactctcctttaactgacattgattgttaatatctggttttgttgaaaagatgaccaatagtcccacacttatgaaaaatgctgtagaattagccttgttaggccgggcgcagtggctcatgcctgtaatcccagcaatttgtgaagctgaggtgggcaagtcacctgaggccacgagttcaagaccagcctggccaacatggtgaaacccccgtctctactaaaaatataaaacttagctaggcatgatggcagatgcctgtaatctcagctactcagaaggctgaggcaggagaattgcttgagcctgcgaggcagaggttgcagttaactgcaatcgcgccactgcactgcagcctaggggacagagagcaagactccatctcaaaaaacaaaaacaaaaacaaaaacaaaccagaattggctttgttattttcttaaccctagacagaataggtggtcaaaggaaaagggaggagagataccagataggtttgcaaatatggtaaagttcattattacccaactgctcctttgaaatctaaaagcgttcttttttctccaggctgacactggccacatccacatgaagaatgtaagcacatcaatcagtacagatgccagctgagccctgtttctcctttttaaaccaaatataaaatttgaagtcctcccacaaccatctgaatggacctccccttcggccagggcactctaaaatttaacctgaaaggctggtgctggccatgatgagcagtgggggtcagacattcctcactctaccctccagcatgaacatgaacacacactttaagtctggtaagaaacgtttagtctcttctctctgaagccagctacttagaggctcatctacatgataaaacctaggtctccacaaccccttatagtaacccagacattgctttctatagataataactctttcaaccaactgctaatcagaatatgtttaaatctacctatgacctggaagccccagcccctttgagctgtctcacctgtccagatcaaaccagtgtaaatcttacatgtattgattgatgtattatgtctccttaaaatgtacaaaagcaaagtgtactcttgaccactttgggcacaggttgtcaggaccacctgatgctgtgtcataggtgtgtccttagccctggcaaaataaactctctaaattgattgagacctgtctcagatactttttggtttatatcttatattatgataagcctagaaactgagaaccactgcaaatttctaattccaataaggctcaatggagaaggcttccaatcaggaaggactaacacttgcaaagcgatttctttaaagaccatctatgatttagctttacccaaagaaccccaaccaagtgcgccacagtggagtaagctggggggcaacaggctcttccatgcaaggccaccagagcctctcaccacacagcagggagttcctgaaaggggaggagaacacttcccttaggcacctgtgggactgggtccctagaaacaccccttggccatgctgttacaatttctggtttccttcagaggagacctgccaccaaattagttcacatcagtgatgccttattgtcaaacaagcacgaaagctcactggcaaattcatttccacataaagtgaagccatttgctttgcctcagaggatatgaggatcccctgctgccctgactggaaggtgaggagggcagaggtgggtatgtttctgtctacccaggtcctgcagtacacgatcagtagacatgcgctggtaacatgtttaaaaattagaaagttgatgccacatcaggcaaggcaaagaaacttcatcttttggcctcagaactgcaaaaacaaaaaaggaaatctgaagaatatgatagacgaagactgaattcttcaggatttctaaaagcaacttaaagaccacactaatagtcaccttcaaggtggctgagaaggaacagagttagataccatttggtttccataaagagtcaatgaataaaattatttctctaatcctaggcatttaggggtatactttactacttccaaaccaataaagagttaaatctttcagaggatggtttaccatcctcccaagttatggcttgtctaaattaggattcaatcaaatgtttttaatgttgaaaaatattctgtgctatttgagtactgttacaaaacattccccatttctttaaaaagttaaaaataataagcattttttctactctgaaatcagtggttaacacaatatcgctgaaccacaaatttaaataacaatcagatttaaggtcttcaataagcattttaggaattacatactttaataaac

SEQ ID NO: 1421 - DNA, 104 bp, Homo sapiens
tttcacaattttatcctgaaagcatagagaaaacaaatcaacttgtcattttcaaaaacttaccctggctgtaatctcaataaaaggacatcttttaaagtcaa

SEQ ID NO: 1422 - DNA, 3327 bp, Homo sapiens
cgcgggatctcgagctgggatcgccctcttgggcttcggtgcgatcggcggcgggaggtgagagtgggcccggcgggctccgggaggaggtggccccagggaaggtgtggccgcggggaagtggcggcgaacagccccgacgcgaggacggggaaaccaaggcggcagccagggagaccctgaccgaggtgacctctgtttagggcgacaaccgggttggggctccccgcagtggccactggcccggcggtcccgcacccccagcccgcctctcctccaacaaaagaatccaggaagacggtggggcgggcgggaggcccggtgtgcggtggcctggcccccctactggtggagaggagggagcgcccttccccagacgcgggggaggggaggggtcatggccccacgggctgcccaccccctccctgtgccccagtgctgggcccaggacccccagtgaggccactcctctggcaaacatctgtgatctcttcccccttcctgggccccccctactggaatggcgtctctccccatccaggggcctggcttgtttttctccataacccttagcattaccggtccttatgttatctcttatttcactaattattctttcattaatttattagtatttattttgtttgcctacagtgtgtttccccctgtgggaatgtaggctccaggagggcgggagacttcgatttgtccactgatgtatccccattaattcaacagatccctcctgagggcctctctgagccctgcacggtgctgggtattggggttctcctgggaacttagctgagccccaccctagacattctggggctgggaacagtgctgtaaacacatatgacatcgtcgtgggatgaaggaaacaaaccagaaatgggggggtctactggtcaggtgaccttaggtcaggccaccttggtggtcagggccaccttagatgatatggtgatcatggaaggcctcccagattaggtgacttcagttaaagccaggaagtgctagaagggaaaagctaggaaccatgagggcatgtgtagctctgacctggactcaggcagggagctggggtctgaagagtaaaggtcaagacaaggggacccatccccttaagctgctcaggggttcctggctgggtggatgggtggggggattctcaggggtcagggaaggcttcccggtggaggctgtggtttcattaggcctcgaaggtggagtaggagttctcattctttgggataagctgactgggcttgagaattgttttgcaggttccctgggaaccaggtggtcgaagggctgagctgtgtggccagacaagaggtccctgccctcccccagtgagccctgctggtaagtgggtacagtgtgagggatttgggagacgaagctctgcgtctcattggccatgtaaccttgggcaagttcccctcactgcgctgggccttggttttccatgagtaaggacagctggactaagtgccgttcatgatgctgggggcacccacattcaatggctgtggttagctcttctcagctgtaccctgggtttgtgccacactcttgtgtacagagtagctccccatctggccctgaaggctgcagattgagacagaaaaataatgttttatctgaggaattggagcccctttaaataatcaggcccagacatactgaaacgcaacagctgtcaagtcttactcctcccttgagctaaagaattatctctttttctttttttttcttttcttttcttcatgtcagatcggtaatgtgcctacatggtaacaaggttcgagggtggcacagctcacacatgcatgtgaacacccaatcatcacgctcatgaactacaaaaggatcaagaattacctcttgaagccacttgctatgtggctctagagtgacaccaagtagccataaaatgctgtacactggacaccctatagttcataccctatagttcaacaatgtatagccaatcactaatcaatgttatttctttttttttttttgagatggagtttctctcttgtcacccaggtggagtgcaatggcacaatcttggctcactgcaacctctgcctcctgggatcaagcaattctcctgcctcagcctcccgagtagctgggattacaggcacccaccaccgtgcctggctaatttttgtatttagagacggggtttcaccatgttggccaggctggtctccaactcctgagctcaggtgatccacccacctcggcctcccaaagtgctgggattacagatgtgagccaccgcaccccaccaatcaatgttatttctataaaccaaggagaattcctgccaaacaactttgtcatccttgcccccttctgcctataaaaacctgtaggaaaggcccaacgcagcacaccccacggcaacttagaagtttgttctgggcagttatccttactctcgctcaagtaaactctttaaagttatatttgtgcctcagcttctgcctgtaggtcaataagattcaacagctatatgcaaataagaggccagtagaggcccaggagggtcatggaaaccctggaagcttggcctcagagttggagttgagaggaccccagatgaggggatagtttaagcacagtggtttcgatgggtctggggtccatttcagctcagctggggcctgtttctttggattttagaaagccgtgcccaggtcctgccatgcctcctgtctgatgcaatctcgttattcttttctcgaagtccgccagtgtccagttttttttgcatgatcctcacgacatccctttgagagaaaaggaaggaaagacgagcccacttctcaggagactttagggaccttagggacacagcaagcgagtaggagtcccagggctggggtccaggttgcctctggagccggtgctgttccccaggagggcacggaaccacctccctctctgatctgctgccatctctcttgcctcacagttcccgtgggagccatgaagctgaacgagaggagtgtagcccactatgcactcagcgactccccagcggaccacatgggcttcctgcgcacctgggggggcccagggaccccaccgacccccagtggcactggccgaagatgctggtttgtcctcaagggcaacctgctattctcctttgagagtcgcgagggccgggccccactgagcctggtggtgctggaaggctgcacagtggaactggccgaggctcccgtgcccgaggagtttgcctttgccatctgctttgatgcccctggagtgcgcccacacctgctggccgcagaagggccg

SEQ ID NO: 1423 - DNA, 135 bp, Homo sapiens
caggttcaagcgattctcctgcctcagcctcccaagtagttgggactacaggcgcacgccaccatgcccagctaatttttgtatttttagtagagatggggtttcaccatgttggccaggatggtcttgatctct

SEQ ID NO: 1424 - DNA, 27007 bp, Homo sapiens
gacagatctgcgcgtatcctggagccggcccagttgtgaactaggagagctttgggacctctgtcccaagcaagtaagaactttagccttaggagatgtaaataaagtagtatttgaagaagcacaggtacccaactgtttctttttactctttctccagtcctacttcttaacgtttttttgaatttgttactgttctcagcatattgtctcgtttgagaagggtatggcacgcagcgttgttgaaggagcgcctcagcttgggaggctgaaagttttatctctgtactgtcgacaaacaactttgatcttgatcggtttgcttaatttctttgagcatcagtttcataatgtgtaatgcctaattattggagccctgtcatgccgttaaatcgtgaactttctagttactatcttgttttattaactaaaccccttttaagtaaggatttgggtagagtatttgataatgaattgcactgcagcgtacaggtatatctttatttacttgtatacttaggatatgaatcatttttaagtagacgtgtattttataagaacagttttggatttacagaaaaactgcacaaaaaatggatgtgacactgcaggattgactgtatgtaagaagctatgatgatgtatccctagtgtctcacaggccagaattatgttcatcctgtcctgccctataataagaagtctcaaatactgcaaataagttttcatagagttaattacctgtcctattttcatttctgtaatggggacttgtaaacaggtacagtacctgtccttatttttaacctgtgagcgtctagtatacgtaaaccatatttaatagttattaaactattatggtataccttaaaaagcgatagagattagaaacttaactgcagaatatttgggtcttgtatcatagctgtacaactttgcaagcctgtttgctactcttgaacctagaatacattaatttttccctttttattaatacatttttaagagcactattttccttacagttttggtgaagacctttttaatatctatcttttaggagagatgaatggagagtatagaggcagaggatttggacgaggaagatttcaaagctggaaaaggggaagaggtggtgggaacttctcaggaaaatggagagaaagagaacacagacctgatctgagtaaaaccacaggaaaacgtacttctggtaggtgaggtcaatgattgttcaatttttttcacttaaggaagcaattcacgtctatcatacaaggcggtttatctcatacttcagtttgtcttttatttcatgctactccttagtaagtatttgaacattgatgtcccagatttttactaaaacccctaatttggatactctattaatgagagtctcatttggaaagagaagcatattggaaaaatgttcactctgtttctactaacctagtattttatttttttcagaacaaaccccacagtttttgctttcaacaaagaccccacagtcaatgcagtcaacattggatcgattcataccatataaaggctggaagctttatttctctgaaggtagggtttaaaaagtacaaaaaagcaccataaatcatattttcttaacttgtctttggatgctacatcttgtattactgtaattcatttactaacatatacctgctttaatcttagttcacccaaacaattaaatgatgtttatgtttcaaaagcattttagactttatatcagtcaggaaagcagaaaccatactaggtatttcaaaaaggggacttaatacaagaaattggatacaaaaatggaagactgaaagagcagaaaggaaatattgaggtaactccccagaaagtagtaattcaggaagcagcaaccatccttatggctaagagactaaaagaagttctgaggttaccagaatgtgggaattcaaaggttggagaggtcacagcatagctgttattttgacttttgaggggcaccctacaaagctatgcttggacttctgaaggctaccttacagagctgtgcttagaccactaaggcaaatgaagctggttgccactggtaactgagggggcatgactcagtggtgcttggaactggaggctagcactatcgttatcttctgcagctgcagagatgctgaaaagagttggaaacaagaataaattcctttctcttcctgccaccttcccgtctctaaagtgccttcaattggcagaatttaaagagaatctgagacatgtagggtacagatctgaattatagcatcgcagagcaggaagtagaacagtgggcctgaaatcaagggacaataacaaatacagctttgtgtagaaacacaggtaaggaatctccctttgataattaggaataccaattaacctacatcagtctgtataggtgcagggaactgtcttttttgtgctgttaaaatacccatttgtttcttatgtctcatgaggggtgtgtgtgtgtgtgtgtgtgtgtgtgtgtgtgcatactttttatttttttttgagatggagtcttgctctgttgcccaggctgaagtgcagtggcgcgatcttggctcactgcaagctctgcctcccaggttcacgccattctcctgcctcagcctcccgagtagctgggactacaggcacccgccaccacgcccggctaattttttctgtttttagtagagacggggtttcaccgtgttagctaggatggtcttgatctcctgacctcgttatccgcccgcctcggcctcccaaagtgctaggattccagacgtgagccaccgcacccagccgcatactttttttttttaggaaaactagacgtttgaggtccaggaccctccctgccccataccaggcatgcagtagtcattttgtgaatgaatagagtactttacaaatgttttctttattggaaatctgttcgtttttttccatcaatagaatctgtttcatgaatgatcttttgttcctttaggatgtattagccaccagcactcccattgctcccctagcagatagctcagaacactataagtgatctttggacagtcctaaagatggagttcaagaggtgccttagccttcaccatctgtgcttccaaactactttattgtactgttcttctgtgagagacatatttgaaaatgtagaactttagagtgttaaaaaaaaaaaggcttttcagttttgccaccagggtcaagtgttggtctgtctcctgatctcaggaaagactgtgattgtgattgtcttcagctctgtcagagtaagagcttagtttatgtgtctggctttggctttattataatttttagtttaagcttattgtctaaattatctgaactaacatgtcctattaggtgtcaaagatgcaaaacaaagtttcccagatagtggggcttttagagagagagagtttctgtctgcatttcacattatgcaaacctaaatttgttttagaatcttaagtttacattctatactagttcttatatgaatgtaatcaaaatacaaagcaattagaaaaaaatcatctaccatgtatatagtgctgcttttgtctcatgaaaaatgtgcatgtacctgtgtgattatttgtgctaatgccatatttgttggattagtttacagcgatagctctcctttgattgagaagattcaagcatttgaaaaatttttcacaaggcatattgatttgtatgacaaggtaagattcctctacagcaaagctaccagtcatgtgccatcttaccaatgtattcgaggtacttgtgattatgatcgtaggcactggagtcagacttccttggttcagacctcagttctgccacttacctgcagtatggactttgattaattacttctctgtgcctcagttttctttcatttggagatagaggtataaatacctacctcaaaggattgttaagaggcagtaatacattaatatatttaaaatatcagaaccatgcttggcacaaagcttatacttatgtcatacttaccattatcacatataaacattgtatgctttctcaaagtctataatagaatgctcagttaatggtaattgactacagaaaagcaattattgttttcatacttttatattttataggatgaaatagaaagaaagggaagtattttggtagattttaaagaactgacagaaggtggtgaagtaactaacttgataccagatatagcaactgaactaagagatgcacctgagaaaaccttggcttgcatgggtttggcaatacatcaggtaactatttgtcttatgcatacttttgtctaaacttttttaatgtttgcacacacatgcacaccttgtctaagtttaaaggaagattttacagtgactgtactttctataagagatacttagcttttacgaaaagatgttggctagaactgagaggttgcagttccgttctgaaagataccattcattctatatacaacagcttatctaaatgaaatatttacctccaacttatttggatttgcttaatcttgctaaagattgtgcagaaattaaactttgctttcaagaagttatacaatctcatagggaagataaaacaaggaatcatggtgttatcggttatgaacttagagcaaaaaagagcaaccttagatttaggttctgtggcatgaagcaaaccactgagtgtccctgtatatcaaatgtaaataacagtttgtactgtgcttgcctgagttttttttcagggtcaggtaatacaacatatatgaaaacatttttaactttttaaattttttaaatttattttttatttatttttttgagatggagtttcactttgttgccaggctggagtgcagtgtcatgatctccgctcactgcaacctctgcctcccgggttcaagtgattctcttgcctcagcctcccgagtggctgggtgcaccaccatgcccagctaagttttggagttttagtagagacggggtttcacgatgttggccaggatggtcttgatctcttgatcttgtgatccgcctgccttggcttcctaaagtgctaggattacaggcatgagccaccttgcccggccaaaaacattttttaggctagcaaacagatacatgcttcaaggtaatgaatagcaaatctcaggacaggcatacacaaagtgctggggcattcagaggggcattcttctacctcttgcctgtgctgtccattcaacatagaatccccttcccttcacatggacagattatttgggcctagctcagttgtctgtctgtaaaacctttctcatgaccacttttcgaaacttgcatggtattttgtctgtacatctttatggtccttatgacaattacagctgtatatatgcatcttattttgcctcttaggttgccagcaaactgctgtgtacaagtggtattaaatgtttgtttgttgtttatttatttatttattttgaaatggagttttgctcttgttgcccaggctggagtgcaatggtgtgatcttgcctcattgcagcctcagcctcccaagtagctgggattataggcatgcactgccacacttggctaatttttgtatttttagtagagatggggtttcaccatgttggtcgggctggtctcaaactcctgacctcaggggatccacccactttggcctcccaaagtgctgggataacaggtgtgagccactgcgcccagcgtgtttatattatttaatgttaaatgccaagggagtgagtattaggtattttaaaggtcatttttattttctgtgtcttgattggtcagtgaatatagagaaataggaatgcatttttttttttttaattagtatcaagaggtgatggttttggggactaatgtaagggcttttaatgttaggtttagttgggacagaaagtagcagactgggatgctggagtttttcagcacagggacagcaaaatccaatgtaaaacatccactataaagtaagtagtcataattaaatattagatatttaaagggctgttaaagttttctgtttttattctgtttctgtccataaactttatattctctataaaaatagagttctgtataaagaggatgttttgttttccaacttcagagtaaatgtctgtcctgtttaggtgttaactaaggaccttgaaaggcatgcagctgagttacaagcccaggaaggattgtctaatgatggagaaacaatggtaaatgtgccacatattcatgcaaggtgaggaatttgatgtattaaagtattacttagaatgggacattgaaggccatttaagaatgaaaacgctcattttataaaaatgaggaaatcagtaaaaaggacatgagttccttgccatctcattgatcatcacactgaaataaactcattgaaaattattcaaagacatcatgacagatacttcctaaataaggaagaaaatgttgatttcctaacctgcagatttttgtaaacattggttttggatgtgaacttatcaagaccctgctgtgtaagtttaataatccatgtatgggttgagtatccctaatctgaaaatctgaaatctgaaatgctccaaaattcaaaactttgagccctgacacgacactgaaaggaaatgttcattggagcacttcagatttttgaattagagatactcaactagtaatattgcaaatatttggaagtccaaaaattccaaaatacttctggtcccaggcattttggataagggatatactcagtctgtaatacactaagtgttctttgttaaattattaggtttttgttagatacaagggaataatgaaattattttgtttttcttgaattcatctttaagattttaaattcattagaagaattcattataaggtaatcatcagcattttgtttttcttttccagaatttatagaagaaaatttcctagcagttctttaaaaagaacttagaaacccaaaggtttttgaatctgtagattttccttttggcattatttttttccttaaatttcttttttcttttttccttgagaacagcctgtgagacaagaagaaaaaggaagatttagtgttgtttcttgttaagaatggtttggctgggcacggtggctcatgcctgtaatcccagcactgggagtccgaggcaggcggatcacgaggtcaagcgatcgagaccatcctggccaacatggtgaaaccctgtctctactaaaaatacaaaaattagctgggtgtggtggcacacacctgtagtcccagctactcgggagactgaggcaggagaatcacttgaacccgggaggcagtggttgcagtgagccaagatggcacccctgcactccagcctggcaacagagcgagactccatctcaagaaaacaaaacacaacaagaatggtttaattcttgtgatatttctgatatatcgaagggatgatttgatttgagaattccatagttgctcctaaaaggaacttgtgaaaatataaaaaacatcaattttctgttcattacttcctgttttgtctttagggtgtacaactatgagcctttgacacagctcaagaatgtcagagcaaattactatggaaaatacattgctctaagagggacagtggttcgtgtcagtaatataaagcctctttgcaccaagatggcttttctttgtgctgcatgtggagaaattcagagctttcctcttccagatggaaaatacagtcttcccacaaaggtaatacgttctttaactgcttctttatttatcttggtaaagaaggcaaatcagaatacagaaaacatttcccagtgtttctgaacacagagcttatttttattttttattttcaattttctgcttttatattatgaaatacttcagggtaagaaaaatacagaaataaataaaacattccactactcatcaccccgaatttacatttttcagctccggacacattttttaatgatataaagcattactggcacaattagtgtctgttttttacctataccattcccagggatgatcattatcctgaagttattataatatgcatcccttccattcatatttctgttgacttctaggtatacacaccaagttttttttcccctttatttcttctactatttagaagtgatgggttttttaaatctttattagcctttattaaactggattttaaaactatagaaaagtgcagagaataatgtaattaacatttatctactctatgatttggcaaatattaatattattttagcttaatttgtaacaaaaatatggttatataaagttgaagtctttctgttctcagttttattccctttatttgctccctagatgcaaccactatgctgaaattggcatgtattcttcaagtttacatttttattcttgactacatgtgtagagttagttttttgtattgtgtttacgtaaatggtatcctgaatgtaacacgcagctgtttttttatttggttattttgtagttctacctattttaatacatatcaaattctttcatttttactattgtggagtgttgctttaaataaatagccacaatttatccattttcctggaggtagacaattgtgctctttccagttttttataagaacaaatgatactgcagagaacattcttgtacatgtctccttagcagaggaatactaagttgtaggctgtacttttttttttttttttttttttttttgagacggagtctcgctctgttgcccgggctggagtgcagtggcgcgatcttggctcaccgcaacctccgcctcctgggttcaagcagttctcctgcctcagcctctcgagtagctgggactacaggcacgcgccaccatgcctggctaatttttgtatttttggtagagacaaggtttcactatgttggccaggctgttctcaaactcctgacctggtgatccgcctgcctcagcctcccagagtgctgggattggccggctgtacttatttttaactgtattagatgttaccaaattactttccagagtattgttcccaacttaaatctttgctggtagtgttaagtagttaccatttctctgtcttttcattaacacttggtattgttagacttgtacatttttgacagtttgttaggtataaataatactgcatttataatgtgaatttttctgatttctgttgtggttgagcatcttttcatatctttactggccattcagtttctttatcgaattttctatttatatctaatgttcattttcctgtttattggtttattctttaattttgttttttagagatggggtctcattctgttgcccaggctggagtgtagtgacatgatcatagctcattacaaccttgaactcctgggctcaggtgatcttcccatctcagcttcccacgtagttgggactacaggtgccagccactgtgcctggttctattagtttattgataggagttctttatacattctagatactaattattgttgattatatacattagatattttctcccagtctttggtttgtcttttaactttgtgggtttttttgttgtacagttttacattttgacatgatcaaattgttgtcttttcctccctaatttgtatattttatgccctgcttaagaagccgttcttcggctgggcttggtggctcatgcctgtaatctcagcactttgggaggccgaggcgggcagatcacctgaggtcaggagttgaagaccagcctgaccaacagggagagaccccatctctactaaaaattctaaattagccagacgtggtggcacatgcctgtaatccaagctactcgggaggctgaggccggagaatcgcttgaacccaagaggcagaggttgcagtgagccgagatcacgccattgcactccagcttgggcagtaagagcgaaactccgcctcaaaaaatacataaataaataagaagcccttttcactcaagcattataaacatatttcctacattgcttctaagaatcctaagttttgttttttatctttagatcttttgtccatctggaatttaagccattggtgaagggcataaaactagggatttaagctgggcatggtggcatatgcctgtagtcccaactactcagtagtctgaggcaggaggatcgcttgagccctggagtttgagactagcctgggcagcatagtgagacccccatctcttaaaaaaacaaactagtgatctaatttttaggtgaaaagctatttatcctgacaccatttattaattaagcccttgttaccatggatgtataatgtttcctcggtggtacccagagtcatcgttatcaccattgggctttactaaatttaacatttgctaaatttttgctcatgtgaagggttgaatccttagtgaggtaaatagtcccttgaagaattaaaaagggaaacataagatgtttatgtttgaaattcctaaggcttctttctctgactggaagaagagggtatgtgagattcagctattggttctgaataatcagtggtgttgatagatgggtttcatctggtgtttgtcttggcttaaggttcaaggtataacctttagcttagaggccagaatttaaatcctgatttaaaccagatattttcttccttttattttgaagacggggtctcactctgtcacccaggctggagtgcaggggcatgaatacagctcactgcagccttgacctccttaaatcagatattttctagacagtatttgttcagggtattttcatgccccctaataaattaggtagtagcattgactcatgtgtgatgtcgtgaagaggtcctccatttgtctgaactgtggggctttgaagtgacagaaagatggctgtttcagttgatctctattcccgccactattgttgcgtaacacatcactccaaaactcagtggccgaaaataaagccaatcattttattagttctcatgatatctgtggatcaggagtttggaagaactactcaactggctagttctggctccaggcctctcatggagttgtagtcagatggtggctggagtacagcaaggtggctgggggctggccaggcatcttcttctccatgtggctgtgtgggctagtttgggcttcttgcacacagtatagcagctcaggcactcagtctgcttatatggctgctgacaggttcaggtcaagaagtgcagttggtaggcagaaatggccttgccttttgtgagctagtctcagaagtcgtgcaacatcactgtgtcacattctgttggtaacaaagtgagtcccaggccttctcaaattccaggagaaggaattagccttcatttctttttttttttttttttttttttttttttttttgagacggagtctcgctctgtcgcccaggccggactgcggactgcagtggcgcaatctcggctcactgcaagctccgcttcccgggttcacgccattctcctgcctcagcctcccgagtagctgggactacaggcgcccgccaccgcgcccggctaattttttgtatttttagtagagacggggtttcaccttgttagccaggatggtctcgatctcccgacctcatgatccacccgcctcggcctcccaaagtgctgggattacaggcgtgagccaccgcgcccggccttcatttcttaatggaggagtagcaaggttctaaaaagtcttgaagataaatattgttgcaatcatatttggcaaatacagtctgccacagtctgaatttataaatgcttcttgagatccaaacaccaaacaagtgcctgtgtggcataataagtattacactctacagaaagtgcaaaaggagcctagatgagaaagctggggattaaagaaaactctggaaagccttttgaaaaggagaggattggcattgggcatgtgggacagaatgagagggttgttgaaggagcgagaggtggcatgggcacagaggaagcaataagtgcttcatgtgggaggcaagcaaagcaccttgcatacccatagcaggatacgaacagtaagtgagaaggatcaattggaaagtgcctcaaaagctgtcgatattaaattgttgcaggaggaaatagaaagtcattaatctctcagtggattttactttactagcatcctgagaccaacttttaaaacaatattaaatgaaatgttttaactgaattttcctgaggtgtgattatagtttatcaaaatctgaatgtgaattacttttgtttcattcagtgtcctgtgcctgtgtgtcgaggcaggtcatttactgctctccgcagctctcctctcacagttacgatggactggcagtcaatcaagtaagcgatcagactgttacataaaaggcaggctttagatgtcacactgttgagaaaatccataattttactgtattatattgtacgttttatctaaatgacaaagtgtataatagtgtataatagatggtttatttgatgaagagtttgtatgttaaaataattctttttttttttttttttttttgagacggagtcttgctctgtcacccaggctgcagtgcagtggcgcgatcttggctcactgcaagctctccctctgggttcatgccactctcctgcctcagcctcctgagtagctgggactacaggcgcccaccacaatgcctggctaatttttttgtatttttagtagaggtttagtttagaggtttcaccgtgttagccaggatggtcttgatttcctgacctcgtgatctgcccgcctcagcctcccaaagtgctgggattacaggcgtgagccaccgctcctagcctaattgtctttatttgaaatttattctctgtcagattccagaaaggattcattatgcaaatattgtgtcctaatgagaaatagttgattttatatctcaattatgtgattaattgaactggatataggccataagcaaagctgtgtgcttcattccatattgagctgtgatagaaataatattgttttgaagttttcaaataaagactccctttgaaatggcatgtttcattttatgttctcaatgttgcaatggggcattttactatagggttttttaatagctttttttttttttttttgcaagtcagagttttctttgtgtatgtgtttttcatcccataattgattacattttttctagctgtagatctatagctcatccctaaatataaaataatgaatggttttgaagtcagtgctctctagcaaacctggctgaaatgagatggtcctaagaactaagaacctagggaaaagataagatgatctgctgctaactgcttcacccccttcttccctgaaaaattaagaccaacatatataataattaattgtactatagtgagatctttacaaacaccccattttataaaagaggaaatggttaagactcttgagtatgatcgtgtggcctatgagtatggtagagcctgatttccaacctagtctgtgggacttttaccacttaagagggacaaagggttagtctggaggtagtaagttatttcagttgattattcacagtcacttacagatcaaacttcttgttctactctttcctcccttctcactactgcacttgactcatcttaaaaaagtgggtgtggggggtgaattgattgtgaagtggtgagtgatcttggagcaaggtttgaagtcgtgcaggttaggtggatgccagcgcctggcccatgacctgaaaaacattgagaggtagtctagatgtatgatgaatgtattccaaagttattattttaatgttcaatgattgtacttacattaattaagtaaaaaaagctttaataacatgtgcatgtttttaaaaattcaatcagtgtggaaaggcacagtccccacaacttgctgttacattatacataactttagataccattcttgtgtctttcatccttcgctttactgcagtcattctatgtgagctgaggacattagaaacatacttgttcttttatcttctagactttctccgttccgacattactttaaattgtcaaggtttaccttttgtcttctaattataattgtcttccagagtttatttataggtcatgtctaacaaaaacaataaacaggcatttacatttttatgttaataaaaatgcccgatatggcattccccgggataaataatatgagcttctgacttctccctccatcttttctactcctacttgcgtcttcagtggtcgaagccagtgctggaactggctggacagtttatccccccttagcaaaaaacctagcacatgcacaagcctctgtggatctgaccatcttcacgttccactgtctcttccattttaggggccattaactttattaccagaataattaacataaaacctccagctttgtcccaatatcaaacaccccttttcgtctggtaagtccttattatggcggtccttctactcctttcccttcccattttattaacataaaaatgtaaatatagctcaacaaagaaccaaatgaatgatcaaatgccaagcaaaggagctgtaatttatgtcactgggttttgttttgttggtttttaccccttaaatgaaaatgactcaagcatcaaattatcttttcttatactctgctagttatttggaattatcccacattttagtgtgcatcatatttggactgtaactttgtcatttagtactttatttttcctaaggtttctaagtgctggttttacttcttagagtatgcctgtaccatttcaccataattttccattctctcttcaatatactatggaatacatggaatccaccttttattcttaaaaaacaaaaacaaaaaaacacaccttccttctgcttgagtctggatcagtagttctccagacctgcattcctgcttcatcctgggatcttgcttcattgcattttttctaaggaatattcccaagtaaattttcagaaagtatacaggacaggtaaaaagttctaagcccttgcatgtctgaaaatgtctttatttggatcttagtctggctaagagtttgctagctattgaagtctatttggttttaattttctctgctgtttatgagaggtctggtgctcatctgattctcattcctttgaggactggacttttcctcctctttgtaaccattttatctatcatgctgtgaaacagtgaaagtgtatctagttgtctctatcctgcttgattggcaggatcttttgtcttcaactctagaatatctgactgatttctcagcttcctatcagatgcattgcttggattatttgttttaagtttttcctcattctttcattttctttgttctgttttctagatttctttggctttttcttatatcttctctataaatgcttgatttttatatacatgctttaaattttcttgattttgtacttgtttccccattgttccctttttgtagtggcttattcctgttttatcatggcaatattttctcaaaactcttaggcagtttgtttttaatactccctgaattattgccatttaattttcaaatgtctgatgaggaatgagaaagtatttgaagtaggtaggataggtttcctttgcaattttttaggtagtagttttttctcacaagactttacctctaaatacaaagataggggtttgggctatcagattttgctttatgaatgtgtttttgaattggaattgggtttctcagatggtagaatgaagagtctttattctgaagctctgatattctcactgcacagtttagctcccttcacagaggggatgggtttgtttccttagaacagtgctctggtttttgccagatgataaagtacgcattcttcccctacccacctgtccactcaccttctccaaaaattctcaacagctattccatgacttgtctttcggttgattactgttttcttccagccatctactcctgctctctattcctgccacatccaacttggaagcttctctggggctctgctaagaacgttgggtcccactttgcttgtacgcttatagcttttgcccatgtgtattctggactttattttgttttatccatcaatactttaccatttgctggtttcaaaaatttcattaatatctcatttgctgatgatacctctacatacccccaaatttttagtgactcattttggtggacattttggagggaggctaggcaaatacatatgttcatttggctatcttgaattggaaactgctgaagtaattttagatataccattaaactgttaataagcaaatctgcttttatcttcctcagcatcatgtgaaccctgaatagttaatatcttgcagaaaccatccaaagtaagtattctaactgaaaactatttaaactttttagaatccaggaattgatgtctgatgatcagagagaagcaggtcggattccacgaacaatagaatgtgagcttgttcatgatcttgtggatagctgtgtcccgggagacacagtgactattactggaattgtcaaagtctcaaatgcggaagaaggtagggtacaactcttttcattatttgtctctcaataatgattcatcaacgttcatcttttctaagatgctcctgaacctcaaataatttgaggaatttcttgttgcttacataagatgaaacattcccttttaaaaaaacatgtatttgtagctccctatgactttgttttatattctagttgagtcattgtagggaaaatgaaaataccaactattgtatttaacacttttaatttacaggttctcgaaataagaatgacaagtgtatgttccttttgtatattgaagcaaattctattagtaatagcaaaggacagaaaacaaagagttctgaggatgggtgtaagcatggaatgttgatggagttctcacttaaagacctttatgccatccaagagattcaagctgaagaaaacctgtttaaactcattgtcaagtatgtatgctgtcatttgaaattttattacataaatgcacgttgggggttctcttggctacaggtaacaaaaaactagtcaaaatggtcggcaaactacagtccatgtaccaaatacagtactccatccccttgagtatggcctatgaactaagaatggtttttatattttttaatggttgaaataaattaaaagaatatttcacaacacatgaacttatatgaaattcagatttcaactggatatggtggctcacgcctgtaatcccagcactttgggaggccgaggcaggcggatcacttgaggtcgggagttcgagaccagcctggccaacatggtgaaaccctgtctctactaaaaatacaaaaattggccgggcttggtggcgggcgcctgtaatcctagctactcgggaggctgaagtgaagaatcacttgaacccgggagatggagattgcagtgagccaagatcgtgccattgcactccagcctgggcaacaagagtgaaactctgtctttaaaaaaaaaaaaattctgatttcagtgtccataaataaagttctattggaacatagccacactcattcatttacataagtgtgctgcttttgtgctacagtggcagagttgaatagttgtgacagagaacatatatatggctcacatatttttgctttatccttttatagaaaaaatttgctgatctctagtttaaacaatacagaatatttactatcttatacaagaagtttgtcactcaacggaagagtgagggaacagtgaattccaaagccatttcaattagttctgtgtagggtgttgctcatagagattcaaatcgaattaacatatattcaaaaagtatttgataattttatttccatgctattgccatgccgtggagaagcagcaaagtataggcattttttgctttagtggttaagagcttttctttggagacaaacctaagttagactcctgctttgggcatttacttccagtgtgatctgggacatattacttaatttcccctttatttgtatcaccttaaaatggaaataataagacttacctcagaaggttgttctaaagattaagtgggattttataatgtacttaacataactactgcaacatactgttacttttgataattttttgacaactgtggggtaattttgaagaaataggagaaaatgagagagactgaataatagatatatctaagagaggtaaagaactgagaacgttttgaaatgcattgtattataaaaagtgatcttggccaggcacagtggctcaagcccgtaatcccagcactttgggaggccgaggcgggtggatcacctgaggtcaggagttcgagaccaaccggaccaatatggtgaaaccctgtctctactaaaaatagaaaaattagctgggcatgatggcaggtgcctgtaatcctagcttcctgggtggctgagacaggagaatctcttgaacctgggaggcggaggttgcagtgatctgaaatcgcgccactgcactccagcctgagcaacagagcaagactctgtctcacaaaaaaaaaaaaaaaaagtgattttgtcatgcttttctgttcagtaggctcaggtctgtaagaggatttgatgctttttctttctggctttaatatgttaattagctgactgagtaaagaatagtgctccacaggggttttttgtccttaaatcctacttccctctgaataaaagccattcagacccaccctggaagagaggctgctctaacttagcgttgctggggtggtcttggagtgagtcctttgagcaggtggccaaggaagcaacctggtcgacaatccaaacatctttggttcctcttaacagttgtaaattaaaactgaacatttttagtggtccctcttctcccatacttatagaagagtaagtatggaaaactttagttttcttcccacagtttgctttttccccctccatgtttgtgatttcagcatcaaaactagaatttttcatggtcctctattatcagtctagcagagattggcaaactaggcaggctgcctgtttttgtaagtcaaattttattaaaacacagccccacccagtttacttacattactgttcacagttgcttgcacactacaagttgaatagttgtgactgagacagtatagcctgtgaagctgaaaatactttctggccctttaagaaaaagtttgtcaacccagcctaggtgacagtagaagtttatgttttagtttaggttccttcagaagcaatgatttggatcaacatagtttacttgggaggtgattctggagttactggtagggaaatgatggcagccagtgtaggtgccttaacgaacaggtgacccactagcatctgggacataatcctcctgggccagtggaaaactccactgtggaaagccagcttcagtatttttccatttaagggcctacatttgggactgcccccaggagtattaaacacctcagcacttctggcctgcccatcctgcctgccaatgatgcttgtgtggccatagaaaggtctttggcagacaggtgcagatgccagtaggaagccggaacatactgaacagtgagtgccaaggggatatgagcacaccaccacctccttctgtgtttacatatattaaaagggaataaagactcatgttttactcctgattttctctcccaccctatttttgtttgttccttgtttataaaattgacaaatgtaaatgtactgttttatattctttctcttaattttttttagagacagggtcttgctgtgttgcccaggctggattgccgtggcacaatcagagctcactgtagcttcaaactcctggccttaagttattctcccacctcagcctcacaagtagctaggactaaaggtgtatgccaccatggctggctaatttttaatttttttttttatagatatcggggtctcactttgttgcacaggctagttttgaacttttgggctgaagcagttcttccaccttggcctcccagagtgcttgctgggattacaggcatgaacctgtaaaccaaaaataaaattccaaggccccccacccatttaaacagacttccttctcagccagggctcttaagatttaacctgaaagactgattcaggccacaaagggaagtgggggtcagacatgccttattatacctctctggcattaacatcaacacagattttaagtctaataagaaacattttacagcctgttctctctgaaacctgttagccaaagcttcatctgcatgataaaactttggtctctacaacctcttgcatcccaaacattcctttctattgatcccaggtctttagacaaactcaaccaattgtcaaccagaaaatgtttagatttacctgtaggctggaagcccatgctttgagttatcccacctttctggactttctggttctacaaatcactgcacctggcctcattttcttatttaatttgaccttttgacttgaactgaaaaaaatgaaattttatcccatcttagagtattatatactgagttcacttctcagtctcctttcagtgacttggctgcacagtctcaagatgtctgttcacataaaatacaatataatcccgtatcctaaaatggaagaccatgattgtgacgcattttaaggctagttgtgtaagaagagcaacattgtatttagttactttaagatgctttgcaagtatcctctgttccttatgcagagtttttaaaaaattctaacctttatagattaaccaagaactttgagaaatgtactgtaagaataaaatttcagttgaggggatgtaaattttttacatttgtctttgttgatattaagcaggttaaacaaattgtagaggagatctcctaatggatcaatgaagtataaattagaatttataagttgtgttctgtttttcagctcgctttgccctgtcatttttggtcatgaagtaagtattttacttcatctttactcaaaaagtatataaggttagcaaaaataacatataaaaactttacagaaagtagcaaatttctattggccagttatttatatcttaatatgctttgtaaattaatgatatgggaggcaagcaaactatagcttttttttttttaatttttttaattttttgagacagggttttgctctgtcacccaggctagagtgtgatggcacagtcatggctcactgcaacctccagctttggggctcaggtcatcctcctgacctcagcctcctgagtagctggaactacaggcatgcaccaccatgtgcagctaatttttttgtattttttgtagagatggggttttgccatgttgcccacgctggtctgtaagtcctggcctcaagtgatccacccaatttagcctccaaagtgctgggattataggtgtcagccgtatagctccttttaagaaaaaacttttaccaactagagtaaatatgaatgggcttttattttatttatttatttttttgagatggagtcttgctctgtcgcccaggctagagtacagtggtgcgatctcagctcactgcaacctccacctcccaagttcaaacagttctcccacctcagcctgccgagtagctgggactacaggcatgcgccaccagacccagctacttttggtaagaaatgggcttttaaagtgactagacactgccagtattaaagcaaaaacaaatatttctcgtttttgtggaatggatttatgccttgcaaggtagctcttagtaatttctaagatagctctgattttatatgttttcaagtttttactttttaatcatttacgtgatagaagtttgtttttagacttccttttcttagaaaaaaattatcatgcttttaaaacaatccccaaacaaattaatattatagaaggaggaataccccctttactagtcacctttatgttttccttacttctgttttttgttcttttttcgcacttgagcttgttaaagcaggtttggcattagcactctttggaggaagccagaaatacgcagatgacaaaaacagaattccaattcggggagacccccacatccttgttgttggagatccaggcctaggaaaaagtcaaatgctacaggtagacaatcagtcatttagtgtttgttcttttgcttgtaaaatgcgttaataattcacaagtgaattttctcaaagcatgtagtgtgtgtgttccagaggacatggttaggtggcgtaaatgaattggaatttgtgtgagtaatatgtaacttatatctgaccatatttttaaattgagccagtctcctgttacagaggctgtacaaacatcttggtctgttgagacatcaactattaggaaatattaaccatttctctaaccattgttttgctagtctttgttgttgttagttgttatgtgacctcacctatgaacagaatagttcaggggagttaaagcagggtcacctattctccctcatacaagtacataaacactgtattgggctttaagaacagtctgctaaaggtgtgggatctgtctgtatatatctccactgcttgtgagtccaaatcaaggcaacctttttttttgagacggagtcacactctgttgcccaggctggagtgcagtggcatgatctgggctcactgcaacctctgcctcccacttttaagcaatccctgtgcctcagcctcctgagtagctgggattataggtgcgcaccaccacgcccagctaatttttgtatttttagtagagacagggttttgctgtgttggccaggctggtcttgaactcttggcctcaagtgatccacccaccttaacctcccaaagtgctgggattaccggtgtgagccaccacgctctgtccaaagcaaggcaactgctgtgatcagtcatttgtagatccccaagaaaattctgcctctgccagtcagagcctagtggttttcctttcctgggttttatgatggctttagaaggtgctgcttattggtatgcttgtagtttccttaaagtgacaaccggtaagccagccgtaatgtgctttctactttatttttttgagacaaggtcttcctcttttgcccagactgaagtacagtggcgcaactttggcttactgcagcttccaccttgggctcaggcaattcttccaactcagcctctcaagtagctgggactatagacatgtgccaccatgcctggctaatgctttttttgtagagatggggttttgccatgttgcccaggctggtctcgaactcctgggctcaagcagatccacctgccttagccttccaaagtgctgggattaaaggtgtgaaccactgtgcttggccactgtgctttctaaaaatgcctgtggcccccttcttcactcgatgtggaaaattgaccagggcttctctggccctttagtaagttgtagtagtatggctcctaaatctttttccaaggattgggatcctggctgcacatcttaattacttttggagctctttgaaaataccatagcccactgcaagccaattgagttaagagtttctaagttagggtcctagtgtctatatgtgtacaacagtccacagatgattctaatatgcagccagccttgagaactgctttgatcttgtcattacattataaacccactgtccttcatatctgagtcatcctttattgcctgtggttgagtgttaaaccagtcattttaattcctagatattattataattccatagatatttcatctatgtttggttccttttggccatctggggctactttttaaaaaataaattctgttctgagacctcgctacaatgtagcctgacaacagaggctcagggtaccccttacaggtgaaacaaagctcatcatgaacaggaatctgggtgcagtggcttacgcctgtaatcctaacactttgggaggccaagtcggaaggattacttgaggcctggagttcaagaccagcctgtgcaacaaagtgagaccctatctctacaaaaaagaaaacaattagctgggcatggtggcgcacacctgtagtccctgctactccggaggctgcagcaggatgattgcttgagcctagaagttggagaatgcagggagccatcgttatgcaactgtaccccagcctgggcaatagagcaagaccctgtctttaaaaaaaaaaaaaaagaaaacattatgtttagaatatgtaggaaaagatgcaagtggggatctgaattgttacagctttcttttctgtcttttgtgtggtatacctgttcgtgtgtgtaactttggaattagtgaattataggtgggagcctgttttaacccctagagtgtcttatctgtacaaatctcataatttatacatactgcttgcagtatataaaacttcctttttttgctctttttttttttttttttgagtcggagtctcgctctgccgcccaggctggagtgcagtggcatgatcttggctcactgcaagctccgcctcccgggttcacgccattctcctgcctcagcgtcccaagtagctgggactacaggcgcccaccaccacgcccggctaattttttgtatttttagtagagacggggtttcaccatgttagcgaggagggtctccatctcctgaccttgtgatccgcccgcctcagcctcccaaagtgctgggattacaggcatgagccaccacgcctggcctttttttttttttaataaatgtttcttggcagatagttgttctaaaatgtgtccagtggtattgaaagtgttaataccaagaagttacattggcagtttttcttgttttcagacctggaataatgcctttggctcaatttaaaaatagaatctgtaatgttagtggaaattaaacatcctgaatagagtatggcatgtaagccacactaagccagggtttttaaaaacgagactaacaggctgggtgcagtggctcatgcctgtaatcccaacactttggcaggccaaggcaggaggaccaagctggacaatatagtgagatcccatctctaaaaacaattttaaaaaaaattaggtgtggtggcatgtgcctatagtcccagctactcaggaggctgaagtgggagaatcacttgagcctagaagttttagaccagcctgggcaacatagtgagaccttgtttcttacagaaaattaattagccagtcatggtggcatgctcctatagtcccagctactagggaagctgaggttgttgtaaccatgcgagttatagagaaacgccacactttgagacaaattaaagagtcctttattagccagcgacccagagacagctcacgcccaaaattctctcagccccgaggaaggggctagttttgtttttataccatggtctaaatagggaggggggattttagctgaagcaatttttacagaagcagaactggcagaaagttaaaaaaattaattggttacaaatgcagttacaaaaaaataaacagttccaggtaccggggcttaaactatcacaaagagataaatgtaggggttttgggtgccatgcactgcgcgtgcccccaggagctgctggtgcaactcgcctcagcatctcatcaacaggtgcattcctggacgtgctttgagtcagttttacactagctatgcctggagggaggtgaaagggtttacaagtgaagaagctaaaatggagtctgtccggctctctctctgctaggagagagtcactcgggttaaaacaaggtaggatatcacaaggtgggatgatcacttgagcccaggagttcaaggttgctgtgagctaggattgtgccactgcactccagcctggacgacagagtgagaccctgcctcaaaaataataaatataacaaaacaaattaaaaattaggctaacaccaactgttatgaaccatttactttatatttttgtgttttcttcttaccacctagtaaaccatcatactctgtgtgttataaggtttctcagaaagactatataagtaacaaaaataatgataattactatttattgagccagcagcataggataacagtgggtgtttgagatgtgaatactgtcccctagaattgggcagtgcactgccatacacggcagttttacattgggcacttatgtgccaggtaccaaattaaatgcctttcatacatgatttcatttattgttcagggcaatgctgtgataaaacataaggaagctgaggctcagagaggtctgagagccacacagctggtgcatggtggagccacgatttaaacaggtctgtctgactccagagagctatgcttttaactcttgtgctgtttacttttctggcctgttatagcatgtttgctcagaaggtgagcatgtattaagtcactttattacctgatgtttaaagaagcattggaaccttcaaaattaaaattggtactcatgtttttgcttttcgaacttgaaaatgaagcataaattggaattgtgttgagtatttatatgaccacagacttcagaatctgactgcctgggtttgattgaatcctgactttccaccttgatagctgtgtagttcctcattcactctttgttggccttggttttgacatcagtaaatcaggatataataatacctttctctgctggtgatggtgcaccttgtacactaaagctcttaaaagaatacctagcatatacctaacgtttgtgagcaactgctgttagctattacttcccttttactttggatgattctcttaaactttttgtttccttaggcagcgtgcaatgttgccccacgtggcgtgtatgtttgtggtaacaccacgaccacctctggtctgacggtaactctttcaa

SEQ ID NO: 1425 - DNA, 12712 bp, Homo sapiens
gggaaaagacatttgtttcctttaattgaatagtacacaaaaattctagtcactttatttagaacaaagaataagagtattggcaaattaatgcaaaaaagtaccctactaaacctttctatgcacaaaaaagagcagtaaaataaatactcagaactttcccaggttgtcaactattaaaataaaacctcagcatttcaaaaaagcttattccgctgcaggaaagaaggtggacatttttggtaccataataaatcacacactcacacatccatattgcttaggttgaagagaacggaatgaacagaggaaatttcttccatgaattgccctcctttcggtacccgccatgttttagttacgttgtattattccacttagcttaaaatataaagtcttgtagaaacacatttttaggatgttgaagttctcaagatatttgcacagaatatttagaagtacttagaggagttttgttaaatgcagttggtcatactacataccccatggttgcagttttgacagaccaaatgcatctgtgtcagaaatagacaaaaggcatatactcctccttcctagaaacgggtacatagacatgttcttattcttgggatatgaaaaaacaagtagtaatggcatttaaagtttaattactaactgtataatgcctgagaacaaaattcagagcaattctcaaaagggttaagagtcagactctgggcattttcgttttttagctgcaggctcctcagtctcgtgtgattctaaagtgcttgcattagatttgaggctggtgtctgctttaaggttgtccatggcaacggtgaagccggagagaagataacccccacctccactcatcagcagtttaggatgacttcgatctggcaaaacctaatcaagacagaaaagacattcatgctttcctaagacaataaagtccatgctaacaacacatataccaaaaatcagaatttaaacaacacaggttctcttgatgatttaaatggacatttttttttctttcttttcttttccctccctccctccctctctcccttccttccttccttcccttccttcctccctcccttccttcctttctctctctctctttctttttaagaggcagggtctcactgttcctcaggctggagtgcagtagtgagattttggctcactgtaacctcgaactcctggcctcaagtgaacctcccactttggctttccaaagtgctgggattacagatacgagccacggcaccaggctttaaatggaccaacttctaaggactaatttcttcacattacaatgcaaagaaaagtgtagaaattggtttaattgattttcttttgaaaaataaaactggccgggaatggtggctcacgcctgtaatcccagcactttgggatgctgaggcaggtggatcacaaggtcaggagtttgagatcagcctggctaacatggtgaaaccccatctctactaaaaatacaaaaattagccaggcgtggtggcacacagctgtaatgccagctactcgggaggctgaggcaggagaattgcttgaacccgggaggcagaggttgcagtgagccaagatcgcgccactgcaccccacctgggcgacagagcgagactctgtctcaaaaatgaaaaaaaaaaaaaaaagagaagaaaaagaactgaagcagttttcagttcagcccaggtttatctagaaactgaagcatgtttctggcggagaatgggtaatggtcttggcagtactctagaactgtgcatatagctttctttctcctggcttcaggaagcttcatggccaataatggagcttgggtctatggagaagttgctactgaatgtactacactccaaacctcccttccccgctaccctgttaactctgccaaggcaacttctctcctctttctcctgtaaccttagccaagacagacaacctccacaaagggcagggttacccaaggctcaatagcatccccactacagtatggtaagacaccaagcaatgagacggggcctacggcagcatggaggtgctcccctcagatctcccttcatgagggaacagctgagaggcattcaggcagtagaacacctccagctgccgctcctttgggatccactgcagcattcataccgagggaggccatgggttgcttccagtcagtaactgagcatgggtaccagagctggagcatttctgcttaacacagggctccttgaatggcgatctttccacttgggctcgccatcagcctcatggagactttctccagagcagcactgcaggctcttcctaccatcctcctttctctacccgctccttgcccaggcatcaacctgcaccaccaatcttgctccctctccccttatctttctaaggcatttccctcaataaatctcttacacttcaacttccatcttagcatatgtcttccagaagacctgaactgacacagagcccaccagtaaatcctgaaaacttgctgcaaaaacatcctggcagagaggaaagggccagtttctcatccacctgggaattttgctattgtcaattacatcatccacagtgatactgaggccttggggaaataagaaccataatggtttgcattttaaatgcctttagggcagagttacagagtaatatattctgacataacaagagaaaaaaagggtcacaaaaagtcaggggcatattctctgagtaacagccatgagaaatctccatccctgtagaaagaaacagagacatctctatttttattttgttttgtttttgagagagggtcttactctgtcacccaggctggagtgcagtggtgggatctcggctcactgcagcctcgacctccagggttcaagcaatctttccacctcagctcctgagtagctgggactacaggcacctgccaccatgctcgactgatttttatattttttgtagatacagggtcatgcccagccaatttatgtatttttttttgtagagacagggtttcaccatgttgcccaagctggtcttgaactcctgggctcaagcgatctgcctgccttggcctcccaaagtgctgggattacaggcataagccactgtgcctggctgagataactctatttaatgacttctagtactactgcaaggaaagtcaagtctcgggagggcagctcttgggactggctgtaagaacacgtacctgataatttctgagccaggtttcagacagcctgaggttgatgacccctcccctctcccgcagttttgtgtagcattccaacagaggctgcagacaacaacagaattctgttaagaactacttcctgggatgcagtttaagaatcaacattcagacataagaattcctgcccattccattccagtattacctctttgtactgacagtagaccacaaacggccttgaaggggccacaaagtccagcaaagacagcagcaggggagtggggtggaaacgactagctacaattaaactgtaaggaaaatgccagacaaattatttctctacaccctcaaagtggagcacaggttttaaaatgcatttaaaatgatcatgtatttaatttgcatgactcacaaagagaagagatttaaatataacattctagaaatccaaaacagaatacaatcatgagctatttctttctaggaaacgcgaactaggttagaagctcttgtggtacttggcaactctaagtcgcatttaatgacattcttgattttttaaaaaaaatcacctggaaacaaatccaacactgcataagctgctttgtggatatctgttatagcctgtatcgcagcatttgagtgccccatcccctgcatccagtgggaccacagggcccatcttgatgcagtgatggagaagattcaatttcttctgaaaccctgaaaccagcatcatcaattccccacccctgccagcctcagcctcctttctttaaaaaaacccccaagacaaaatcctcatctcgggtcccactagagtcaaagcagacaaggagaaagagaatgccaatctgtctgaagcagagcccacatgcactgaggagtctcctgccttcttccatcaacgcacccatctgcgtttctttcactcagcagagcggcagcctctaaatgtcttttcctctgctcttcttgtctcctctgtttttcctgaatcttcaaaaagaaaaataagaaatcaatgtactggggtctttcagtcaaatttatggaaatgctctggcctgtcaaaacatttcaacaatatttatcaacttggactaaaccaatagaagcaggttgtttataaggaagttgcaaatacacaagaaagcctatatactataaaaaccatgattaagctatctatgcaacgcttctgtatcctaaagctccatcccgaagaccgaatcacacgtttgtatacatgtacacacactcgttctctgttttgatagttatcatcttgggagctaatacaccaaagccaaactaaatctcatgacttaactgaagttaactgagggactgagattatgggggtggtggggactcttggcatccttacataatcttttttgcttcctctctctttaggccccttatgttctggatcttgagaaattgtttccattgtttcctggtcttctgggtggttgctctctggggcctctgccatgctgtcttcattctcttgttcagaagcctgtttttcctccagtgtgccattactttcttcaaccaaagcactgtcttttggctctgaagataacatcttggcagaaaatgttccatgtagaagactgtccactttgttgagagggaattcataaagaccactgagaaaagatttgggaaatccaaaacatgctgttgctgcccgaacaggtcctcctccagggtatagctgaataatggagccaaaacctgaacagataaaagaaacaaacatctgcccgtggagtgactctagactacgtaaaccctcagtgagtcctccacagtaatgagactgaaggtctttctattagtactttattcagaggctgaaggatggtgcagctcctcagggagtctgtttggagtctatgagtattaccaatggaggtaatataattctaaagcagatagcaggaagactcaaagaagcttatccccacttgatactattgtaaaaccctgtgtctgcaaatttggatgtcacatgattggtgacggactctgcttcccctcactccgatcctcaaatggagcagttacaagttcttaccttctatggggtcagaaaaaaaccagacaaatcaggctgtgttgtattcttccagagagaatacatgcttagtaatcttcccactcaatcccttcaatttaggcccaatgaaatgagcaccagctacccaggagtttactaaaatcactgtcccgaaagccctagccagccacaggctccagcatcatgcccactgacagtgaagctagaaaggacaattgccatgggtttgggggtacccatgggtggggggctgggtgatggagactgtgtaagaaggtccccatgctaggagccgtgcaggttcacccaagtcactttgttaaccctgaagtaattcaatttggctttccatgagtttacatttttggaccacctttactcacatcagggtggggttttgttgaaaatggaaatattaaatcttacctcccattcgttccatcattgcacccagcaccaagcctgcacacgtttccatcacaatcattttgttgccagcacggatatttcccaacgtcaacatctgggctagtgtatcgtatctcatgtggctaaagtaaaaacaataatttgttcatttttagctaagtaaagcctattattttaatcatcatttttcaagttttgtttgctttattaaaattgtgttgataagattattgattgctttggaggtgacagtaaaaggacttacaatttatgaggtaggaggatactttatgcaggtgagcaagctttttcattttacttaaaatcatgactttcttaaagacatatttcccccaattatacttttgaaaggaaacaaagcgtacttaatttttccaggttctcttgcataatacataattgaaagaatacgggtggatggcttcacaacagtaatgatggcttcatatctgggggaagaaaaaacagaacgctgatttaaaaaaatgacttaaaatattttatttgtaataaaatgtatattttataaacatataagaagtttaatattgtgggccttttaaaataaaaactacttacttttttttcttctttttaatatatttatcttgggcaaattctgtcttgtctcggaatgttgtactattttcaattaactgctgaactatttcctataagaaaaggagcaagtagattttctgaaactttactttcacaaaacaagtaatttccaaaggcttcttacccaagaatggatccaatggtctgattctccaatcccttttccacagaagtccaaatagatgaactttatatttctatactctatttggaatttataataaaatacaagtactttataactccacttaaaccaacgtaaaagaacagagatatccaacaaaaggagaagagaggtaaaggaaactaatttctgaagacactggctgaaaacattactgaaaatgaacaaagttaaatcctgatatgcactgttattacattctctaccactgacattagtaatgtcattcacttatattcctgtatataagacataaaatctttgaaatgttgagtaacatgtacatttcaacctatttctatcaaagctataacgttatttttttgttttaccttaggtacagtctgctttaaaaacccaacagtttcctaaatgccaaacagacaaaaacaaaactaaaaatcctttgaatattacctctcctttaatgcccttgtccttcaaagcttttatgtcatcttgagtaagtttctgagatttcccatcatcaactatatttcgattatcagtgcccgcttctttagtctctaaggaaagaaattgctctattgacatttatggtctgaaattatttgacactttctttttctgagttcatatccacatccagtccatcagccactcaagtctggcctcccagctgcactgcccccatcacactatcctttcctgccaaaactactccaagcctctaagtcatcttcctgctcccagtcttgcccccctactatccacctggatgccagagtgctctttgtttaaatgcaatttgactcatctaccccatgcttaaaaccatacagtggcttcccatagcaataagaatacactccaaagatgacctgcaaggtcataaatgatctggcccctgcctatcattcctggcctgatctcttgacactttagcttcagccacaatggccttctttctgttccttgaacacacccagcaaggtcccacagcaggcttttggcacctgctgcttcctctgcctggaaggttctacgacagatgtctgagtggctggatcctttctatcacttgaggctgagctcattctcttgctttaccaaattagtacacgcccctgctttattatcttcatagcatgtgtcacttcaccatcagaaatcatgctgtttgcttgtctacttgattatttttggtgttccaactggtaagcacattttatacgacagtctatcttatgaactgctataattgcagcgccaaattatacctggcatatatttggtgcttagtaaaaatatggatattaatttaaatgtatctaaataacaggtttgactcaaaactttaacagtatttaacttcaaataattacttgtgttttaattaataagatactctcaatgttcattttaataaatataattttaattaacaataacagcttttggacaagaggttgttaagaaataataatagtaatagctaaaattatgggcccttactaaaagcaagacactattcagaacttcctatgagtcatatcatagaacactcaatacaacctaggcattaaatgtgtttatgaccctattttacatatataaggatataagactcacagaaatcaaataagttgcccaacggtacaaggcaagtgatgaaggtagaaattgaacttagctggatccaaaaccagacctcttaacctctacaccatatgctaaccacctcacagctgttacataacttctgggcactgaaagaactttacattatgttcttgcaatgacgcagcaacgactcataggattaaatgcctggcccaagaacagagaaccatttaatggtgggctggagccagaatccaggttatctcatggccaaaggcagtacttgcttcactccactgagctgcagttcttagattatgagttaagatttcttttgggatagcatggcctagcacttgggaattaggtggaggctgagatgtttctgactagtcagttggagagcatctatttcacgcatccaaaatgtgcacctgcagtaggctcttccctcttcttcttgggctgtagacttcctccactggtcacttcaaatgcagttccataactatggccaatgacgttatccaggtagaaccactgtttttcgaaagttacttttctagggaaaaaaagtaatcaattaactgaatatcttttctatccagtacagaaaagacatgttcactacagtttatttcaaaagtggtctccacaatggatgatcagcagcattatctctgaacataaagcaacaaaggaactagagagaacctggttgggatagagacgtaaaattaatgaataagccacaagaacactgaattttggaaaggggaagcaaagactcatcgaagtaacaaggatttaacaaatttcttgggcttggtctgatcggccattttatttgaaaattatctaataaaagcaaattatacttgcaaataaacactgacaatctacacacttggaaatggagcctaacactgacaatgctctactgaggaccaggcaacttgaggtttcctatgacatagattttttatcttattgcaatttaaaagagaaatcccacaggaacacaatgctttcttctcaaaagaaaactaacatctgctgagtgccaaccaggggctaggcagtgtgtgcgaggtgtgattcacactttttgatttaattctcacggtaatcctgggacatagctctttccagaagagcaatccgaggcccagggagaagtatcttgtccaagattcacagttgcaaggtgttgttggagctgggattcaaattcaaatctgtgtctgaccccaagcctcattctttccactataccacacggtctactccagcaaagacctaaggacggtagaaagcccacctagcttcaggacatggcccatgtgcacagaacactgaattctgggaatcatgtggtggttaattctgattgtgccccatcccactccttctcttcctttctctgtgccaccaggaagctgattacgacagaatatactgccacatcacccacgctcccgtgtcagaggcttaccaccattgctggtctctgggtgtgtcacctttattggttccctaaatcggccacacttttgagtcacatcttcattaaagcttactcaaaccatctgagggaaatcctgtatgatcgtaagtgattcagatatggccaattcttgttatttgctgggtccctagatacttacatacaacagaatgtaacagacactcaaaatatttgctaatgtaaacctcctcagatgttgcaattcagctcagcccagatgtgcaccccctatcctcatcctttaatcacctaggtgctttgaaacactggatctggccaggtgtggtgggtcacacttgtaatcccagaactgtgggaggccaggtgggtcacttgagtccaggagtttgagaccagcctggctgacggggaaaaactccgtctctacaaaaaataaaaaaattagccaggtgtagtggcacacacctgtagtcccagctacttgggaggctgaagcaggagggtcacttgaattcaggagtttctctacaaaaagtacacaaattagttactgaggaggctgaggtggaagattgcttgagcccaagaggcagtggttgcagtgagccaagttcacgccactacactctagcctgggggaccgagtgagatcccgtctcacaaaacaaacaaacagacaaaccaaacaaaaacactggatctgagatgggtgggtttacctctctgagagcctatgtgatatgcagaggggatgatgcgtgtcacttaaaactggctggtttgacaggtcactgccccagtcgggaatgtggggccccgttagagggataaggaggccacatctttactgggaaggagtaggatttgcagagtctacttctcagagagcctggactgttttttgcccaatcagatgagtgtagccccaagggtgatgagggagtctgacctgggatgcagctgagctgagagagtcatttcctaaataaaatggaaactgccactatgacttctgcgaagaagagggcctgttgaaaagtatttccaaataaatgtttagggcagtggtctccaacccttttggcaccacaaaaggggaaggtcaactactgttcatgcctgtaatcccagcactttgggaggctgaggtggccggaattacttgagcccaggaattggagactagcctagacaacatagtgaaactctgtctctgcaaaaaaaattaattagtttaaaaaagaaaaaaaagaagaatttaaaaatggttaaaggttggtgcaggtattacatttccggactaaaagaaacatacccctcataaaagaaactttttatctttactaaattagtgcttgtgcaaaaagcttggttatcaccagcttagtgctctggagacttgtttcttgactattttatgatgcttgcttcaccttaaataccagtcaacagtttgcttaaaccaggagtaaaagaattcatctgaagtaagtacttatcagaaattccaaatctcatacttcccagtctgcagaaagctgttctcctgacattgcattcaacttatctctgtcaaaagtaatacaataacctagctcaaaagaaactgtggccaggtgcggtggctcacacctgtaatcccagcactttgggaggccgaggcgggtggatcacctgaggtcaggagttcgagatcagcctggccaacatggtgaaaccccgtctctactaaaaatacaaaaaaaaaaaaaaaagattagccgagtgtgatggtgccagagtcccagccactagggaggctgaggcaggagaatcgcttgaacctcggaggcagaggctgcaatgagccgagattgcactactgccctaaagcctgggtgacaaagcaagactccgtctcaaaaacaaaaacactgtggttgtatttctcagataaattaatccaaatatcccaataaattttcaccattaataagctcttaggacttaacaacctcaccagcccttccagaaagttatcaaaatcccacttctttacttctataaaacagagcgatactagccagcaggtgcacaaaccaaacctaatttggagttctgaggccttgagcaaattgctttttagcaattttcccagcgttgaatcctttggtgagtaaaacgagggaaactcaaagtgattccacactctgtggtgaattgtctccttcatctattctgtgtatcctgcttgggtagagaagaggatagaaagccagactaggtaggagacgtttcattttttgtgggatagatcctgactgggggattagggaagaaggaggatctatggtggaaaaaaagggggaacctgaaggagactctggagacaaggatgagatcctaaagtgaagaaaggagggggtgtctctggaaagacagtgaagatcccaaggtcctagggaaagaacttcaggacaggtgattagggtgtggagagggaggcattggcaccctagggccaagaatggaattctggggaaggaactctgtggaaagactgaaaaggatgctgaaggtggacggccagatatgaaatcatggagggggctccgggaaaaacaggagggttaagggagattatgaggttcgaagacgggatcctggtggaaaagccttctgtgacagaaagacccgaggagacaacgagggcggggaatggggaccgagagagccaagaatggcaccctggcggaagaattctgtggagaaacctggagggagggggtatctacaaggtgggggcgggagacccctaaaatcagcgatctgacttactttctccgctggacttgtactgctttaaacacatcttcacgtttcagcaccacgaagtcgccgtcgcggatgcggtggtctccgggatgctgtggttgtgggcccggctgctcccctgagccctccatgacgctcagccggtcgccgtgctccacggcgtcccgcccctcctcctcggttgtcgccaccgccagcctcacttcccacaacctggcgcactaggagccctccgaccggcaccgcccccacgtgttgcacgccgcttcc

SEQ ID NO: 1426 - DNA, 350 bp, Homo sapiens
  SITE (315): n equals a,t,g, or c
ggaacaccagcataatggcttcgaacagcgtttttaccacttcgtgaatagaaagctggacgaatggcgtggtgtcataagggtagagaaccttcattccctgcgggaagaatggctgtaattccgccagttttgccttaatggctttcgcggtatcgagagcattcgcgccggttgccagcttaatccccaggcccgccgccggttttccgttgatacgagcgataacgttatagttttcaccgccaagttcaacccgtgcgacatctttcaggcgtaccaccgagccgtcactgtttacgcgcagggtcactntgccgaattcttccggatttttaaaccgcgtctga

SEQ ID NO: 1427 - DNA, 350 bp, Homo sapiens
ggaacaccagcataatggcttcgaacagcgtttttaccacttcgtgaatagaaagctggacgaatggcgtggtgtcataagggtagagaaccttcattccctgcgggaagaatggctgtaattccgccagttttgccttaatggctttcgcggtatcgagagcattcgcgccggttgccagcttaatccccaggcccgccgccggttttccgttgatacgagcgataacgttatagttttcaccgccaagttcaacccgtgcgacatctttcaggcgtaccaccgagccgtcactgtttacgcgcagggtcactttgccgaattcttccggatttttaaaccgcgtctga

SEQ ID NO: 1428 - DNA, 351 bp, Homo sapiens
ggaacaccagcataatggcttcgaacagcgtttttaccacttcgtgaatagaaagctggacgaatggcgtggtgtcataagggtagagaaccttcattccctgcgggaagaatggctgtaattccgccagttttgccttaatggctttcgcggtatcgagagcattcgcgccggttgccagcttaatccccaggcccgccgccggttttccgttgatacgagcgataacgttatagttttcaccgccaagttcaacccgtgcgacatctttcaggcgtaccaccgagccgtcactgtttacgcgcagggtcactttgccgaattcttccggatttttaaacccgcgtctga

SEQ ID NO: 1429 - DNA, 14698 bp, Homo sapiens
gtttttttttttttttttcccctaagatggagtctcactctgtcacccaggctggagtacagtggtgcagtcttggctcactgcaacttctgcctcccgagttcaagcgattctcctgcctcagcctcccaagtagctgggattacaggcacccactaccatgcccagctaatttttgtatttttggtagagacgggatttcgccatgttggccagggtggtcttgaactcctgaccttaggtgatctgcccgcctcggcctcccagagtgctgggattataggtgtgagccactgcgcctggccacactccactctttctagcagacactcttgcccttgcatctgcaggaacagaagtgtgtcccggccagtggagaactctccccggagctccaggagtgggcaccttactcgcctgggcattccagccggcacagcaaccccccgctataccctagcaggccgtctgtgggtgagtcagccagccaggggctggggctgagggtcggtgtaaactcgggatgcctagtctccagggagaggggaggcagcatttcagagagctgccatgtgttttcagccctgaggtccagagaactgggaaatgctgtcctgtctgggatggtttgtcttatagccatgacatgtcttagcttgtcaacatgctttctccccatagcaacctgggaaataggaagcatgaaagagacttcccccctttttacaaatggagacaggccaggagccacagccacattgtgaattggtggttaaaactcatctcccaagtccttttcccaaaagactgcggctgcgtcctgggatacaggggaaaggcttgtgtaagtcctgggctggctgggtcctttggggcgtcttttctcaccaagcccatttctaggtactgttccccggagtttgacccccagcaccactgtgagctccatcctgcggaaccccatctacactgtgcgcagtcacagggtcggcccctgcagctctccacctgcggcccgagatgctggcccccagggtttgcatcccaggtatgtgaaggcaccctacgcttctctgtaccccagctgcccaagcctgcctggacatggaaccatgagtgcataaagaggctcattggtggagaagcttccttgcctgcctgggaggggactggctagagcagcacagggaaagggagccttagggctgctttctgaattcatcagcacaaggtttcaaaaggtactggaaggacacgatagtgatagcagctgatgtttgagtgcttatgtcccagccactgtgctcagacctttatgaatatcatttcaccgaatcaacagcaacctcatgggctaagtcctattactgtttctgtcttgaagatgaggaaactggtacttcataagagggtgggctggctccaagccactcttattcattcatttgacagatattttttgagcacctactacatgccttggtctatcctaattataagaggatacattgctgaactaaacaaattagcttctagctcatgtcgtttggtttttcaaatgtgggaggcagacaaaaaaaaaaatgaacgaagtgatatcagatggtgccaagaggctatgaaggcagtcaaacagggtgacaggctgggctgtaacttggaagagggtggcaagttagagtgggtggtcaggaagggccctgtggcagaggggatgctgctgtgaccagaaggatgaaagaggccagctgcacaagacctgggctggagcctccagggagaagggccatcggtgccaaggccagggcacccaggcacagtcgtgggagcttggcaaaggggcagcgagtcaagaagaggtttgaggtcacagggcacaaaccctgtgggacctgcagccgtgatgaagagtttggattttattctaaggacagtggagaccactgtagagtttaagcagggaagagatgtcacctcattacatagctggaaaaagatgctgttgaggcctggtctcagggcagcctgatgtgggcgatccctgctctgcccttcattttcttaggcacgctgtcccgagtgaggcacataggtcccctccccaaagtcctctgtgccttgtctctccttacccacttcctgggaggacaggttccccctccccaggcccacccaggttgcaaaacctctgttttttatcacttcttcctagtgagcctaatcctgaccctatggctggagtgggtatgatactgaccgccccatgtgtgtggccctttctacttcctgaaggctcttagtggatgccacctccgggagtggctgagggcagcctgctatcctcggctgataatcagtggctcctgggcctcccttctgcccgcttgggaacccttgcctggtctgtgtgtttctccccagtggccacatctgttcctggttctcctcccgaactcctcacctcttgtttttacgcagtgtccagcaccagggacgcctgagcctggacctgagccacaggacctgcagcgactactccgagatgagagccacccatgggtccaactcactgccctccagcgcccgcctgggtaactgcaccacttggactttgtgctgcagagggtgccaagcttttcatctctgcctgcatcctaatgtccagatctgcgggtgggctccccacacgagctcctgtcacctcctgggactgagctcatttctctactgggaagggctgcttccttcatgggccagccatgcccatgctgctgtcagagccattgctttcgccttccgctttctgtgggggccttatggccattcaggtgacccctcagctaggagccttgctctgtgtccctgaggttgttggcctcattctggactgttttgtatggctcttcatacatttttgtatggaaagtgaaccccagaggagagtcggacaaaggtagcccatggagatcttggggaactctggcgctggggagaaaagatggagcagctgccgtgtctcttaggctgctgttccgtggctggaagtgagacttgtgcgctcctgttctggagcagtctgggcctgcacagttcattgagataaatgttaaacgtctgcttttcttgactgttccatatcaaggctcccttgggaataaacagcagggcccagctttgcatttattatcctgactggtagcctggtggagaggaaggacagggtggtgtttaaccatgaggcctgaagttttgttcccttatggaacaataggttcttcgagtaacttgcagttcaaggcggaacgcattaaaatcccatcaacaccaagatatccgcggagtgtcgtgggctccgagagaggtaaggacttctcgacattcccatctctcctgcttttcctgcggtctgactcctcatggtggagtctctgggcttagctgagaacttcatagtcatctcagtcagtcagtaaaaattcactgagcccagcagtaggcctggtggtgtggggggtagggggcaatgcagagcctagcatctgagctccagactatgcgatgcagtggggatagagctgtgtgtctggatcgcacctgcctcttggtcttggctgttggggaagtgagatgggagttcacaccggcattacccgctcctctctgcaggttcagtgtcacattctgaatgcagcactcctccacagtcacccctgaacatcgacaccctgtcctcttgtagccagtcccagacctcagcctccacattgcccagaatcgctgtcaaccccgcgtccctcggggagcggagaaaggacaggtgagcatggccggtcatcggtggagtgggtaaaccagtggacagtgtgcatcccggcagcgggcctgggctctgcagggaaggggcttagtagaagcagcaggagtagcttgagtgtcccagcatttgctggtgtcaccagtaagtgccatggggcactggatgcagggaggtggggcgtgtgtggatggcaaggcagggagccaagagggctcacagtagatgatgctggaaatgacctgacggtgatcgtgccatcatggcaccatttacaccttcctgggcccttgttcaagcactttacgtgtggctaagtcacgagatccttacagggaccctgccagtgtcgttattattgttatccctgtttcacagttgaggaaactggatccagacgttggagtgacagacctgtggccacgtggttagcggctggcaccgggactcattcttaccctttgctttttccctctcattcgaagctttctgttgtgaaataaaatatacacaggaagaaagcataaatgtgcagcctagctttttactggtactggttcattttagaatgtaggtccatcttaggtttcaggttgactgtaggcttgctgtctgtccagaggcacctcctccatggaatccgtcacccccgcgcactgtgcacacacatccctctctgttgttcccctagatggaacttactagattgtgtttatatttaacagcttctgtctagattgtagatcttaaagagctctgataaacttacttttatttaatcaccaaaagaaacacagatactctctttcatttgagtccagaaagctgaggcctctgtagctgtgagcctcagcaggggtgggccctatgttaagaaaacatatttttttttgagacagagttttgctcttttcgcccaggctggagtacagtggtgcaatcttggctcactgcaatctctgcctcccaagttcaaggcgattcttgtgcctcagcctcctgagtagctgagattacaggcgcccaccaccacgcctggctaatttttgtatttttagtagagatagggtttcaccatgttggtcaagcttgtcttgaactcctgacctcaggtgatccacccgcctcggcctcccacagtgttgggattacagacgtgagccaccgtgcccagccagagaaaatcttatatttgacttgaaaatctgaacttaaaaggcaaccaaccagagaacctgaggggtaacggaaggacagcaaaacacagaggcctggcccccgtaggggaatcgggtgtaactcggaagaaatgctgacggagctcttaccatgtggcacgcgcaggagcatgctggcctgttttactcagccccggccctggccacagagaggacgggaccttccccaagtgaagtgggttcttcagttgtggaaaaggccttgccacccactgccaagcattcccttagctccccacagggcacggagagccaggacctgctccaggagggagaaaaatgtgagtgactcctgccctcacggtggttaggatccgattggagatgaaatttgacatgtgtgacctgactgagcaacagctttctttttaaaaatggccccgtttcccagattctgaagtacagtattttatacttgttatggaaaatcagagacatagaaaagtagaaagaaggccgagtgctgtggttcacacctgtaaggaggccgaggcaggtggatcactggaggtcaggagttcaagaccaacctggccaacatggtgaaaccccgtctctactaaaaatacaaaaattagccaggcacggtggcaggcacctgtagtccctgctactcaggaggctgaggcaggagaattgcttgaacccgggaggcggaggttgcagtgagctgagattgcgccactgcactccagcctgggtgacagagcgagactctgtctcaaaaaataaaaaacagaaaagtagaaagaagaaaaaagtcacagattatttcttcaacaagagattcaattgccattaccctttggatatatatatatatatatatatatatatatatatatatatatataaacatgctttattatttatgtacataatcaaatctcccttaatattatgtttttagctatttttaatagtttaagtatactttataaacctcttttgagaagcagctgttgtttagagaaaacttctatgcatattacaaacaattcaaatcattcagaagactataaagtaaagattatctctggctgggcgcggtagcctatgcctgtaatcccagcactttgggtggctgagacgggcatatcacctgaggtcaggggttcgagaccagcctggccaacatggtgaaaccctgtctctactaaaaatacaaaaattagctgggcgtgatggtgtacacctgtaatcccagctacttgagaggctgaggcaggagaatcattggaacccaggaggtggaattgcagcaagctgagatcatgccactgcactccaccctgggtgacagagcaagaatctgcctccaaaaaaaaagaaagaaaaaaaagattagctcagatcccctcaactggagacaccattgttaacacttggtaatgtcctacataagaagcctccttgtgcataaatccacacatacttttgtttgcagatgcagataaatataagtgaaatgatgccgatcgggcctccccaccccgtggtgtgtcccttacgtctttgcatgtcactggaacctgggaacctggttcagatcattgttctgttgggtggctattgctgtgacttagttgcttgctcctttattgtgatacacgtgttgtacggaggtggacctctttctgctctgggcctctgtttcatcatctaaggctggggcaggagggtgatgtaggggtggctgtgtgctgagggctctgcagctctcaacagcacggggctgtaatccgtgttgaattggaagggactgtgggtgtagtctggggtggatctgtctgagctggagggtcaagggaggatttccagagtgggcaagtttgggaagtgggaacactttggagggtgggagagagcagggacaactcaagaagaattttaatttccccttcccaagagggctggggcatagggccacaggctgagactgccaagtgggaagctgctctgcctccaggtggccggggtggggtggtttaggtgcctccccgctagaatctatcctgaccatgtgctgtagaggggacctggactggccccctcagcctttggctatatggttttatcctgcgaggaaaatctcaggtgtccataccttggaggaatgaagccctgagtggcgtgaagtcccaacgggaggctccgcatcacttgactgtcttttctgttatgttccaggtgtctctgattgtctttctcctctgagcgtcccttatcttctttctaacctttgtcaccttccagatgtctctgccaccacagatctcttctgaggctgcccgtggccaccaggcccaggtcttccaccatgcagttggcctgcccagaggctccctgccgagcccctgccccggcgcccttgggtgcactgtacagccccagggcagcaagtgcatggctgcagccttgctcccagccttctccctttacaaaggcttgggtctgcagcagcttaatttccgtgaccagtttgcatcactctgtgtagccagtaaacataaaactggattattttctgttgcccccttaggatggaatgtcatcccaggagccatctcttttcctcggagggcatctcaagaccccccagagtttgtaattgcatattgtggggcagctcctctcctgtaatgaaaatccacatgtatcagtgtttatagttcacacggaccgttctctgtgtctttggcctgggtggttgcgtgtctgcgtgtgctgtgctcgtgttgcgtgaggctgtgggaatgtgatcgtttgtcacacaggggtgggcccaccatgtccccatgtagctgtgtcacaatgggagcatccaggctcggggccctttctgcactgtcagatcatatgcctgatcagagagctcaggctctccccaacccttttgtttgaccctgagtccccgaaacttttgacttttccttaggccttatgtggaggagccacgccacgtgaaggtgcagaagggctcagagccgctgggcatctccatcgtgagtggagagaagggcggcatctacgtctccaaggtgaccgtggggagcatcgctcaccaggctggcctcgagtatggggatcagttactggaggtgagagggagctgccctcctgcatggcgcccatggaaacctgcacttcttccccctctcctcctcctagggaacagcactgctcccaagtccccagggcctcctccctgtccacagccccgacccccccactgagcccatcctggtgtttccccagttcaacggcataaacctgcggagcgccacggagcagcaggcgcggctcatcatcgggcagcagtgtgataccatcaccatcctggcccagtacaacccccacgtgcaccagctcagcagccactcccggtccaggtgagtgcgggcctcccagggccgtctgggctgggggtggagaggtgggtgcagcagcactctgctcattttagggagacccagggtgccagccgtaagttctggggatcctactgctgctaaagagagagttgaccagccctggattttggaaaaggggcatatatagagaggctgtctcctcctgaaatggggtgtggaaacagatggctgtggtccccctgaccagcaggggcccatggtagccaggagttgtggccccgggggtggattctcactcaaagtgtttggctccctgtccaggagcagatgctgtacacctgtctgtatctgcccctgagctgtgggttgaagggcagaaaagaaggggaggcatgccctgcagtgctgcgccacaagctcagcaggagagatgggatgcacaggcagaggaaaagagacaggatgctcacagcttcctgaggtcagatgcctttggagagggcccctgagctgaggacaggtggaggggagaggacaggtggatgtcatgggtccaggcttctaatgtgtctgctctgctcagggcacagggtgcagggctatgtgacctggtccccatttatagctcagatctagttgccacaggagtgggggtggctctgggtggcttcgtactgctccttatccctcctgtcctccgcctccagctcacacctggaccctgccggtacccactccactctccagggcagtggcaccaccaccccggagcatccatctgtcatcgacccactgatggagcaggacgaggggcctagcacccccccagccaagcagagcagctccaggtcagcagacgttgctgtgagccttccctgtgtccgcttcggctgggtggggctgagcacattctccaagtggcgtgggcactgggcagctggcctcatgtgctgcaggccgcacaccaggtcttcaggagttgggccgggagcacggcattccttttttccttccctactctctcttttcctttctctttttctcctgttttctattgacttgttttttcccctgcatcttctctttctcttctccttttcttgttcactcgctttctgagtctgtctttggacacattcccacagtcatcacccggccaggccctgggctctggccacccacagcagtgcttcccccaatgaggtggcagaccagtgccgggcacgtgcagcagagtcagggtgctgggagggcactgccggccgccgcagagcaggcaggaagatcactggagtgtggcaggggaggtggcagctggattaaaatgttcaggacaggcaagagccaagagtgggcataaagagaagtccaggccgagggagcagcagagttcaggaggaggaaggagctccatgggagctgcacagcgtccagcctggcctggggctgcagggagggccatccaggccatggtgtgacatgatcactctgccgtcctggaggagctgtgtctccagcactgagaggccttcaccaagccctgggcagcatctcacagaatgaggccagctctgcattctctataccagagtctgtcacattggaacttacctgctgcaaggttttcctcccgggctggcatctcccctgaagccccctgtatctgtttccatcgctgtcccatctcactccctccatgtgttcagcagcttactttcagcttcccttccttgattgtaagtgccttgatggcaaggggcccctcttcacaagttagcagttgctggtctatagaagcttcttcgtagacatttgctgaatacattgctgtgctctggacagtgaggccaactttacctttccttaggaagtactaagttaggaaaatgagtgtgatccacatgggagggaggccatcctgatctttaaggcatgagattgatagccgggcctgggagcaggggcactgatttacggttttgactgcccccgctaactggctttggacctggggtcttgccttcatctccagtgcaccttagcatcctgtcccgaacgccgagccagtagaactagaggccacctctcagctccctgtggttctgagaccccaagaagcaggcagaaagcggttagggcattggccactgctttgtctttttgtgcctcctctttgtgcacagttgaggaactttgtttttttcctgaaaggattgcgggagatgccaacaagaagaccctggagccacgcgttgtcttcatcaaaaagtcccagctggagcttggggtgcacttgtgtggtgggaacctgcatggggtgtttgtggccgaggtggaggatgacagtcctgccaagggtcctgacggcctcgtgccaggggacctcatcctggaggtgagttctgagctgctgagcaggccaggcctccatctacctgcacagtgggcttgctgccatctcaggtggcaccaaagacggaggagtacagcctctcatctggtgagccagtcagggctgacttttgttgttgttgttgaggcagagtcttgctctgtcgcccaggctggagtgcactggcacaatctcagctcactgcaaccttcacttcccaggttcaagcgattctcctgcctcagccttccgagtagctgggactacaggcatgtgccacgatacccggctaatttttatattttcagtagagaccagtttcaccatgttgcccaggctggtctcaaactcctgacctcaagtgatctgcccgcctcggccttccaaactgctgtgattataggcatgagctaccgtgtccagcctcaggattgattttttttttttttgagacagagttttgcccttgttgcccaggctggagtgcagtggtgcaatctcaactcaccacaacctccgcctcccaggttcaagcgattctcctgcctcagcctcctgagtagctgagattacaggcatgcgccaacacgcccagctaatttatttttgtattttttgtagagacggggtttcatcatgttggccaggctggtctcaaactcctgacctcaggtgatccacccgccttggcctcccaaagtacagggattacaggcgtgagccactgtgcctggccagggttgatttttaatccctgtaaacccagaatcctgccaagcccttctgaggaggtccctgtgaagccaggcaggccattgagggaacctgagggcagagccttggctcaggccctgggcatcagggggtgctcgccctcaggtgatgtagctgcaggactctgttctgatgagagaggatggtctttctctgtggtctcctgcctcatgggggagatggtttgtgagaatataaaggcacaagttgggctgggtttggtggctcacacctgtgaattttaggaggccaaggtgggagaattagttgagcccaagagttcaagaccggcctgggcaacatagtgagaccctgtctttacagaaaacaaaacaaaaaaattagccaggtgtggtggagtgtgcctgttgtcccagctattctggaggctgaggtgggaggatcacttgagcctaagaggtataggctactgtgagctgtgattgcaccactgcactcagtctgtgtgacagagggagaccctgtttcagaaaataaataaataaaagcacaggcaacatcagcaagaggaaggtccctattctgaaaagcccagacttgccagtcaccagaacagggtttttcctggataagctgtcaagggcagggcagccacttggcagaggacctggtgtccagggagcatgcacaggacctggagactggggagaccatgaagactcagtccttcctgcagaggggaggtagccagagtctcagttaaggagggatgttgaaattctgccgtatggtcagcactggcccctctcgggtgcccaagctgccccctggcttctgccttctgatgcatccacccccatccctggcagtatggcagcctggacgtgcggaacaagacagtggaggaagtctatgtggagatgctgaagcccagggatggcgtccgcctgaaggtgcagtaccgccctgaggagttcacgaaggccaagggcctgcctggtgacagcttctacatcaggtaccagtggctggggaatcggtgggagatttggaaccagaggagaggctttcactggagactcttttcctggtgaatggctctctgtttcttgccccccaaggctggggccatgatcatcattccttgacactcaatctgcacgcttatttatgttgagatgattgtgacttagaacaaccctttagggcttaaagaaccagctgggccccctctttagggcttaagacctagagaatttggaggcagtcaagccccgttttcctgtgtgctgtgctcctctttttctggtgtcccccaagccaggtttgcagatccctctgcagtgtgtgtggacttccaggcatcttcagtgcccttactactgtatgaaatgctgtgggcatttagggatggcagcaggctttctaggaggagctcagagctttcttcacatttcctaagatccaagatcgcagaaagcatgagaacactgatgcggtacaactccctgtctctagggtagaagatgacatatttccatcctagagagattccagtctgtaggaaccaggggccgggcctgggcttcgaggagggaggcaactgggaaaggccacctggaaagggaagttatggcctcagatcttggtgagttctttgatggggatgcgccctcagtgttaggggagcaaaggcagtctttgcccctttatgtaaaacacagggctccccactttgagaatcaccaccctcggcgattcctgatcaagtttggagacagcccaaagcagaatggcagccttaggggcctggccacagaaggcacctggttcgtccttggtggccagagccgcctgatcgtgttccttctgtgctgtggtccagggccctgtacgaccggctggcagatgtggagcaagagttgagctttaagaaggacgacatcctctacgtggatgacaccttaccccagggcacgttcgggtcctggatggcttggcagctggacgagaatgcccagaagatccagcgcgggcagattcccagcaaatatgtgtaagtgttctccgggcctggggtggggtggggcaggggtcgccgagggccaccagccatggagctgtcccatgggagggggctggggccagggctgctggaggagggattctgcttcttatcttagcttctgctctctacattttgccaaaagtgctggtctaaaaagctgctcctagtgtgagtcagtgctgtatagagcacagtgatgggtcagaaggcataacgtgttttagaaaaatggatttatggagatactcgtgccttgccgctccctcaaagtgtaccattcagtggttttcaacatattgataggtgtgtgcagccgccactacagttaattttagagcatttccgtcacctcaaacaaaccccagacccattagctgtcagccccttatcccactgtcctcccacccagccctcagccctaggcagccactactttacttttgatacccatgggtctccctgtctggacttctgtgtggttgggattgcatagtgtggcctttcatctggctcctgtcactgagcatgttttcgaggcagcctgcatccctgcatcatttcccttctatggcaggaagcgtaactcgtcatgtcaccaattgaaggctgtcctagcagttccttttgacaccgagctgaatatgctgtagtagaaaaaatcgcctgctctgagagcttgccctggtgctggtgtttgtgtcacccccgcagcatgtaccgagggttcccaggggcgtgggaggagatgtagccttgagacctgccaaggagtgtggggggagcccagtgtctggcccacctttgcttttctcaccaggaagggcaggaagggcagggcagcagggtctcgatggccctgcccagcattgtcccctgtgccacaggatggaccaagaattctccaggaggctcagcatgtctgaagtcaaagatgacaatagcgccacaaagacgctgtcagcggctgcacgccggtccttttttcggaggaaacacaagcacaaacgcagcgggtccaaggacgggaaagacctgctcgccttggatgccttttccagtgactccattccactcttt

SEQ ID NO: 1430 - DNA, 355 bp, Homo sapiens
gagcgactccattaagttccagcacaggctggagactagctccgagtcagaagccactctggtgggcagctccccatccactagtcccccgagcgccctgccccctgacgtggaccccggggagcccatgcacgcatcaccccctcgcaaggccagggtccgcattgcttccagctactaccctgaaggagatggggactcctcccacctgccggccaagaaatcctgtgatgaggacctcacctcccagaaggtggatgagctggggcagaagcgtcgccggccaaaatctgctcccagttttcggccgaagcttgctccagtagtgattcctgctcagttcctggaggtatag

SEQ ID NO: 1431 - DNA, 8858 bp, Homo sapiens
atcaattacatcctcttgcctcaatgctcaaatattaagaatatgtattttagcaatgattgtttcagtgtttaaaaacttactttcataaatcagtataaatgaatatccattatatattatgtttaagtaaaagtgaaaaaacttgcactgtactgagtcatgatttaccactggttatatatattatgtgtgtgttcaaagtacaaaatgcagcaatgatgttaacattgacagtgtaatgaactgccgtagatgagactgttatgcttaatttcttggaaaactgtaaagaaatttcacaggttaaaaaaaatagagtaagcaaaaaaaaagaattggagaactttacttttaaatcagcagctaaatgaagaaaacttttcctttctaaaaaaagattaagaatgtaaaagtacattttaatattaaaaaagcattttaaaaaatctataacaactttatgacaaaatctgcatttgaaaaaggcctgtaaaaacagtaggacagaattgccctcatcaccttttactttttcttgtcagaaaaaagtgtatgcatctctggaaccataaatgatgttaaaataggcatttataaaatgacaaggagaatttcatgataaatttgtttgttttcttacaatcattggcattgcagccattagtaagtcacaaggaaaacttctctagctaaaacgcaaaatgaaatatcaagttttgaaatgtattaggtctgttgcctgcgttttgctgatctcattttttcaaagcgcgactccatttcttctaagactttgggtgtgtatcgtaccactaatttaacctttccttgtgcggctaacagcagttctacagctttttcatgatgttctccttcaacactctaggggaaaaaaaaacaaccaaccatacactaatatctaagttttgaaagtaactgcaaaatgcaaaaatgtttacaatatatataatgaagaaaagttttaatgttatattattccaacattacaaaactaagaaataatcctgccttaccattttaatctatatgaaatcctctcttacatcatattctgtttatagtctaaaagctggcttttaagttccaaataattagcatattaatctatatgccttattatttcagtagatcaagcaattggcattttataagagtaaaatgagggtagacttctaatttaatgtattgcctttaataaagagcttatgtcataaaaatgacattaagcactgctaatttacactgcaaaatacacttatagtgcttaaaaaaaaggatcactgtattaatagtactgcctaggattccctcaaggcatttctaaaccacaagtttcttaggtttctcctattactcaaatacgcccccaggtggtcacaacagatcactacaaatagaaataaaattcatccttaccactccattaacagagaggagttgatctccacgtttgaggcccccatgtctatcagcaattccacctggaattattcgggatatatagattggagagttttgttctttgcctcccataatattgaatccaaggccctcttctgtttttggtagctcaacaactcgaggatgagaatgtccttcactggcagcaaatgcagcaacagtagcctgaaagaaagttttacatattaaaaatatgacttttatttacttcagttctttcatcttttgtttccccccgagatggagtctcgctctgtcgcacaggctggagtgcagtggcgtgatcttggctcactgcaagctccacctcctggcttcacgccattctcctgcctcagcctcctgagtagctgagactacaggcgcctgccaccacgcccggctaatttttttgtatttttttttagtagagatggggtttcaccacattagccaggatggtctcgatctcctgacctcgtgatccgcccgccttggcctcccaaagtgctgggattacaggcgtgagccactgcgcctggcctcttttgtctctttttaaaaactacttttgagcacgtatttttgacgtctgaatgctcacaaattcactggtgattctgagaaggtaagctaaacagaaggtattttagagacgacaaatgaataatttcgagttatgcaggaaatgttacgattttttgttatgattttttaggtcattcctagcccattcagtgcccactcttttgtgcagtcctgtatgcgcagggcttggcaagcagacttactgggcagactgatattgtacatagtaaggaggaaaaccccttccccagcatgctagcagccctgggctttagatctggatcgcccaactccttcaggagcctttgtgcaggacacaacctacctatataatcaacatggagttgcccttatatgtaatcattttggcttctgtactatttgtactatatactaaatatctaagatgtcaagaaataactcaatattgagaaaaagagaggtacatatagccaatctgaatgttttgttgctttagttaactagacacaactaaaaatccccacagaagatgaaacagagccgtatcttctttaaagctcaactttagactaatccaaactaattataaagttgagattttgtttcactttgctttaaagggtaattatctagtaccatttttttgtgatggatcacaaaaatggggaggaggaaagaaatcaagatttactgaacacccgttatctttgaagaaatcaagatttactgaatacccgttatcttcgaagctctgaaaaaggcctcatttttcagataatggaattaaggctcagaaattcagtaggctatcaaactcacacaactcagcaattaaaaccatgtttctctggtctcttctacactgataaactatatccacatgtctaagtatgtgtattcaacaaagaatccaccattttcgtttgtgagccagtaactatccatagcatactatctgctgatgattaatttaagtcaccgactgctgatattaccctgttcaaaccccctatcatgaatagtgaggtcaatacctaaattagttgaggaaaacaatggcacagaaatgcagataatgtaaagaagaaagcaaaaatcaactcggggaagtaccccagctctatcatatgctatttgtgtggtttgcggcaaatcacctcatgcttcctcatcaataagatgaggatagtaattcatatcttaaaattctgattagattttgtataatgaatattatatagtatcatatatataacatatacaacacaattatatattgcatgatacatattgtatgcaagtacatttctattgcattatctaaactgcatgataaaatagcttatgtaagctatttatcatgcagcatttatgtaaaggcaatagaaacaaatgtcttatttcttagtacttgagaaatttggtgtagcttgaaagatacatgttagtcttcaaagtaagtttattatgaatttaataactccatattttaaacttctaatttatgaagaattcttacttttggaaaacaaaaaaatttacctttgcagtagcgttcgctctcacttcaggactgctactgatgtccacagtctcatagacatgttcatatacctgtaaaagccaaagttatatctcagaatataccatgcttgagttctctgtgaagttaaaatttcaggcgaagttaaaatttcaggcaaatttatgcatctttataaaatggttttatcagaaattccaaaaatgagagggactggttttaatgttttctaaagtttttcttaagaaatgttgaacccaaatttagagtattatctgacctaattaactcaaatttttgtaaattttaatgatgtttactcacctctctcacagcattgcagaattcactttgaaggactctttgcaaagcctgaagtttctgtggtggtacttctccactcctttgtagtttttccaataattcaattgctctacaaatatctagagttaaacacacacacagataattttctccaagggttttctcaatgcctatgtaacagtggggcagttaggattcattcctcaagggcaaataatatacagacaatcgaggggaaaaaaagcattgaatttgcacatttggtgggaaggagactgtgtgtgtgtacacacatggagggtgagaatgtaaaatgtaagaacactaaattttacagtagataggaaaaactactgagattacagaagcataaaataagaccttggagaaacacaggcaaattgaacacaaaataccaaatgtcatcggaaaggactgtgactcaaatgtgaccgatacatgaacattgtactgcttcagaaaagctagcaatattgtcagaaactagtcaataaaaatttacctaattattattagtaaccaaagcactgaacagtacaaggcactataagctagtaaaatcactggtcattcctcgaaagaaacatgatacataggtagataaccactcgagagcagatgcagttagtggcagggacacatttaaaacaaccataaaaatgcaaaaaacaagcagtacaaatgaaataaactgattttttttcaacttaattaacactgttaattcaaacaagctccaacacttatgtttacaaaaaagaaaaataaaaacaattagctttatcaatctggtctcaataccacctgtgtgaccttgggcaagttacatgatgtccttatgtctcagtttctttcactgtacaatggaaataacagtaccttccatataagggttatgaggaagagttatgagttcagttaacaactgaaccacaaaatacataaaaaagggcttagcaagcaaaagtgttatgttacattggtaccaattaatcataagaaatattggctgggaatagtggcttatgcctgtaatcccagcactttgggaggccgaggcgggtggatcacctgaggtcaagagttcaagaccagcctggccaacatggtgaaaccccaactctactaaaaaaaatacaaaaattagccaggcatggtggcgggtgcctgtaatcccagctacttgggaggccgaggcaggagaagcgcttgatcccaggaggtggaggttgcagtgagctgagattgtgccactgcactccagcctgggtgacaagagtgaaactccatctacaaaaaaccaaacaaaacaaaaacaaacaaacaaacaaaaaaaaccctaagaggttgtatacatttatacaaatgtatgaagcacattagggaattctcactgagaagtgtgaggataagtgttttatgaattgagacattttagaagattcaggaagtcagctataacactgttaactatctctacttttatttttccaaaaactgttttggtatactgtttttgtacccctggtactacaatgcccagtattctattattgctttgcttccttttgacttaagtagaagttcctgatttcgttacactcaaggactggaaatttttctttatagagttagtatggccttcttcgtgtttgcagatagaaaactatgaataaatgtagtaaagaaagatatttatttatttatttgagatggagtctcactctgttgcccaggctggagtgcagtggcgcaatctccactcactgcaacctctgcctcccaggttcaagcaagtctcctgcctcagcctcctgagtagctgggattacaggagtccaccaccatgctcggctaatttttgtatttttagtagagacagggtttcaccctgttggtcaggctggcctcaaactcctgacttcatgatccacccacctcagcttcccaaggtgctgggattacaggcttgggccatcacacctggcagaaagattatttatttatttatttgagatggagtctccctctgttgctgaggctggggtgcagtggtacgatcttggctcactgcaacctctgcctccagggttcaagtgattctcgtgcctcagtctcccgagtagctgggactacaggtacctgccaccaggcccagctaatttttgtatttttagtagagacagggtttcaccatgttggccaggctagtctcgaactcctgacctcaagtgatctgcttgcctcggcctcccaaagtgctgggattacaggcgtgagccactgcgcctggccagaaagcagatttttaaatttgaggtaaagaaagcttaaacttaaaaagttaatcaaatgcaatggaagcaaatagaccttcaccattctgatttcccatcaccagaatgaccgatacatggggactgttggttcatcaattattttgatttataaagttataatatataagccatataaaaatttccagtgaagaaaaaaatggaaaaaagtaaaatgcttttgactaaatctaaaatgtacctactatgtgctcaaatttgtgtttcattaaatcatagtttgatgatttagaaggcactctaaatcatcatatgtgatcaggcactgtattgtatttgtactgtaggattttctactttaggatcgttgggagtgtttgttaatagagtctgttagaattctaaacaagaatcagaggtgatgtaatctgactttcttaccctgctaaatggcaaccactagtacagctgtcttggtaacagtgggggattcattaggaccttcttcagataccacagatatcaagatctgcagatgctcaagtctctgatataaaatgatatagtattggcataaaacctatgcatatcccccctctatactttaaataatctctagattacttacaatatctgacgctacgtaaacagttgttatatcacattgtttagggaataaggacaagaaaaaaatgtctgtacatgttctatacagacacgatttttttctgagtattttcaatctgcagttggttgaaatatggaacccatggatatggagggctgactgtaattcatcctactaaggggtggagtcttctactgaagaacagaaaagaaatctgtaacagcaaaaaacaaagccaagactatcaaaactaaatgccacagaagttccacattttgtgttgcatttaaaaatacaaagaccggccgggtgcagtggctcacgcctgtaatcctagcactttgggaagccgaggcgggcggacttcctaagctcaagagttcgagaccagcctgggcaacacggtgaaaccccgtctctactaaaatacaaaaaacagccgggtttggcgcgttcgcctgcagtcccagctactcgggaggctgaggcaggagaattgcttgaacccgggaggcagaggttgcagtgagccgagatcgcgccactgcactccagcctgggcgacagagcaagactacgtctccaaacagcaacaacaaaaacacaaaagaccaatacgttagaatcttaactagctttcaaagaaaaaacttactcctgttaacaccaaacagatttgctcccatctataaaacacagtgccactgtgctcaagaggaagatgtcagagacttaggcctaactcggcaagtcttcccagagtagctagtcctctaaaatgatgctttaataggcttaacggaaacaatctcatttacagtgaggcttccaaatggtgaacacggtaaagagcaaatcagcaacattaagtgcacatttgtttgtgggaaggcattaggaaagaggtttttctaagtacagtaattctaaaaatgtgttttcttagggaacaatagtaatatttagactaattgcaaatgttaatatgtgcaatataatttcagtctccatcctacatatacatttttttttaccaccagtactcaaaatgtttatttgtacttctcaattcctatcaatgatttctaatgctggtgtatgaaaagcatgcttgaaattgtttgaaataaaggacttagggacagagtggaatgctggaaatctgtaaaaggactggaaacgctggaatgctggaaatcatggtaggcgcatagccagttattttcgtaggcttctctatctctaattactcagcagaggtggttttattttccttgacagtctgctctaggaagcaatcagccaaccagtttgcaattgtagggtttgtaagaaatgaaaaacactgcacctgcaagtgttttagcatctaccactattcggcttacttacgtaacctccttcccaagaccaagtcagtaggattgtttttaaagcaacctctccatttctaggaggggcacaaaagctagcaaataccccaacccgaatacaagcgaggttgtggagaaagtaatgaaggagtttgtgtgcaaacagcggggaaaggaggttctgttgaattgtaccgtgtgtccgttctcgtgctgtacaggcaatgagtgtagtctgtgcgaaccgggtgtgtgacgtttgcttttcgggtgtacgggtctccgaatgctgcttctgctgtgctcaccaagggagcgcgtgtgcggcgtgtgtctgcgaacgggcaggttgtgtttagttgtgctgtgccttggaacagtccgtgtgaacagaggagggcttacggttaacagacaaaataccgtaagcgcccttcctagagccaggcacagagacaacggcggcctctgcgccccatcaagggacagcgtggcccggatctcagagcctgggtcactcctcctcccctccagcgacacagcactcccccaacccttccgcccacctccgccgagcctcggctgcactcacctctctccagccgcacgggttcccctagcgccgccatcttctccct

SEQ ID NO: 1432 - DNA, 1660 bp, Homo sapiens
aaaaagggtgattttgatttagttgttatggaataggacccaggtatcaattttttaaagctctgccaggctaatatgtagctaagattgagaatcactaagtcaacacattttgatatatcaagaaaataaatggaaatgggggtgataatttatatttgtaatttacaaatcaaacatctatcatacacttactatgtacctagttttattcacgaatcatccatttctaagataaaaattcccatcatttcctcactgcactaaaccaccactgtacatctttgccaatgaatgactgtatttttctatggtcaagatttaaaattctgggatacattatgaaaactgcattaatgaaaacaacctactgctattcatgctcaacagtagcaagctaaactactgtacttggctcctttgagctacccttattttaagaattataaataggtgtcaacccacacaaagaacagattgtggattaccgtagggaaaaaaatagcttactcaacttactaaaagtttcaacaccaaaaaagatttaacttggctgaaagttctgaaacagctgagacacagaaccaggaagctataatttataatgaaatgttgatacatacttaaaagctactgcagctgtagctatactaaaataagatttcttcagggtttacttaccctgaaatgcaagaatacaagcataacaataatattactgtttttatatgcaccaatacctctctttaatatataaagctctacaacaaatacctctaataattttacaattaaattaagtccatacttctatactactttggtctcaacatttttaaaacatcaattaattttgaaaatttacaatttaacaacatgatcctatcaataacaagcacattttgtagtggattaaagacacattcaaccatgcaatccagtgttcaataccttaatgataaataacaatgctgattgacttttattttgaaaaatcattgaaaactggaataatcatctgagactcacagtgatcacaaacatgcagaaaaaagcatacaattctattcttcctgaaggaatgttacaaaatgcccacttttttatatagggtcaatatgccaaattacttatatttttcaatccatcatcttctaacatttgtcacttaaatttttcttaaagtacaaatgttcctgtaagttgtaacagaaaatgaaccccaactctttcagtctttaagacctcagtcacagtcccacactaatagctgccttttagtaaaatagtgacatccagtggacaaatgaaatatttctcaaattcccatatttgaatcataaacaaaagttgcctctttaaatccaacaattttagtatgagttcctacttattttgatggaatctacagattctcatgaatacttcacatcataatttctatgtatcttaaatatatcctcttttcttcctatttaaaatcaattatttaaattgagctagtaagaatgtctactcttgaagctagtgaggttaaaggtattacttttccttctttgcttcagctacttcccaccaccaaataactggtttgtctctaggaatggaaggactaaaatataggggaaatactgtgcatttaaataaaaatgaatagtat

SEQ ID NO: 1433 - DNA, 3341 bp, Homo sapiens
gcggagcatccgcttccggttcccagactgaattgtcagtgagcggagtctgaggtcgctgtggactgcccactggtgaggtggtgcggcgtttatgcggctgagagtgcgggtctcaggcagaatgtggggcggggacgtgggaggtggctggtcaggtgaaggaagggtcgatctaaggaccctaccattactaatcacatctaggaaatgtggggcggtgccttgccccgagtccctgcggatagttaacactcccttgggcttcgaaagtagatctttttagactcgaccctgatttcctcttctccaggtttgagacggtaacatctgttttgcaggattgtgaaaaatgaggtcctctttctagagtacctgacaggttgcttggcatccagaagatgtttagctaagttaagagttttcttctgtcttccttctctcctccaaccttaacacctagatatgggctgggcctgtagactgactgccttggaatgggttggagctgctgtctgaaacttgctgggctgctctcccttttgaaccactttttgtctgttctgattcactcttccagggccttgcccgagatggacagccggattccttatgatgactacccggtggttttcttgcctgcctatgagaatcctccagcatggattcctcctcatgaggtgggaaccatctgtattcctgagtaggagatttttttccccgtgggcatgagatgatgcatgaaaggtaggatagcagggttagaaggcgaaacggagagtgaatcttagcacttgtagccagaggacccagaagctggattctgagcaacaggacccattgggaacttctttatggaagcctcctgctagggtctgttcacaccggttaattctggaaatttggagccttcatttccatactgttaagaggttcagcgcggtggctcatgcctgtaatcccagcactttgggaggccgaaacaggcggatcacctgaggttgggagttcgagaccagcctgaccaacatggagaaaccccgtctctactaaaaatacaaaattagccgggcgtggtggcacatgcctgtaatcccagctactagggaggctgaggcgggagaattgcttgaacctgggaggcagaggttgcggtgagctgagattgagccattgcactccagcctgggcaacaagagcaaaactccatctcaaaaaaaaaaaaaaaggtgaagaaatggggagctactgggctgccccagtgctatccatctactcatttagtctgtgttatctgttctacttaaattaagtctatgacctttccttttcctgacttcagggtaattcattagtgtttcagatgaaggtaggtgtgaagtaagactggtaaaatttctggggttgctgtgtcttgcagagggtacaccacccggactacaacaatgagttgacccagtttctgccccgaaccatcacactgaagaagcctcctggagctcaggtgaacttatgaaaccttatttcaggctagattcatccataccacaaattggcagtgttggggggatggattggaaagcaggtgcagatgtgaggaaactttccttcttgtggacagaaaagctgagataacacttctgcaacttctgactttcctctcagggacacacaagctgagctattgtacgatgatgctactagttgttcttgtgtttgtggtctccattgagcccccattctgtgctcttgtcttacagttgggatttaacatccgaggaggaaaggcctcccagctaggcatcttcatctccaaggtatttatgcccagtaggcaatatggatcgttacttccctttgttaaattaacagattgcagaaccctaatgtcccaagggctgagaggatgactctggattcatagaaggggtataatggagacaccccctttcccacttaaaacttttcatttggcaggccatctgtctgcatacattgtcacagaaaaacaatagcaccatacatttgaatagcaccgaatttcactgacagtcttctgaaattatcgcatcccaatcacatgtattctctctttaccaacaggtgattcctgactctgatgcacatagagcaggactgcaggaaggggaccaagttctagctgtgaatgatgtggatttccaagatattgagcacagcaaggtgagcacagtacttgggctgtggtgctgcaagaagccatctcaaataggacagattggacaggagtagcctaatctgtaacttaataagaaagcattttgctgggcactgtggtacacgcctgtaatcccagctacttaggaggctgaggcgggaggatcacttgagcccaggaatttaagaccagcccaggcaacgcagcaagaccctgtctcaaaacaaacaaacaaacaaacaaaaagagagagagaaagtaagcacctctcctgggaaagtacaggagggaagcagctattagtgacacacaggttggagtggcaaatccctttccccctattatgattctgtcttgggtcatatctcttcatttgtacaagctgctgtgttccttccaggctgttgagatcctgaagacagctcgtgaaatcagcatgcgtgtgcgcttctttccctacagtaagtgccactttcttttttcactttcctgacagggccctaagtaagaactctttaaatactgatgactagaggccctacaagttggggatagggaatcaggagctcaagcgtgaagataacctgctctgttcctccttttcttcttctttccttcagattatcatcgccaaaaagagaggactgtgcactagaaagttgcagcccacagcccttcatgtggactctgtcatgacatgctaactagacttcaggggagccacttctgttttcagcccctccctggaatagtgagttgggaggatggggagacagctaaccaactgcattacccaaaccatattgcacttttagttccctagttttctaggtgagcttcattccctgaaaggaggatgatgatatctaggcataacctagcctgtgaggaacctagttaggaaagacaactgacatttattgaatatcatgcactagtcccttacatatgtcatattttaattatagaaatcagtagcaaaaagaatcttggggattttccatctgacttccctggccatcttatcccatccttgcactaccagaagattcatacacttttgagactccagtgagacgctgttttcaccccttcctcctcctagcctctctcccaaaaagtaaaacacaatgctgaagaaata

SEQ ID NO: 1434 - DNA, 3342 bp, Homo sapiens
gcggagcatccgcttccggttcccagactgaattgtcagtgagcggagtctgaggtcgctgtggactgcccactggtgaggtggtgcggcgtttatgcggctgagagtgcgggtctcaggcagaatgtggggcggggacgtgggaggtggctggtcaggtgaaggaagggtcgatctaaggaccctaccattactaatcacatctaggaaatgtggggcggtgccttgccccgagtccctgcggatagttaacactcccttgggcttcgaaagtagatctttttagactcgaccctgatttcctcttctccaggtttgagacggtaacatctgttttgcaggattgtgaaaaatgaggtcctctttctagagtacctgacaggttgcttggcatccagaagatgtttagctaagttaagagttttcttctgtcttccttctctcctccaaccttaacacctagatatgggctgggcctgtagactgactgccttggaatgggttggagctgctgtctgaaacttgctgggctgctctcccttttgaaccactttttgtctgttctgattcactcttccagggccttgcccgagatggacagccggattccttatgatgactacccggtggttttcttgcctgcctatgagaatcctccagcatggattcctcctcatgaggtgggaaccatctgtattcctgagtaggagatttttttccccgtgggcatgagatgatgcatgaaaggtaggatagcagggttagaaggcgaaacggagagtgaatcttagcacttgtagccagaggacccagaagctggattctgagcaacaggacccattgggaacttctttatggaagcctcctgctagggtctgttcacaccggttaattctggaaatttggagccttcatttccatactgttaagaggttcagcgcggtggctcatgcctgtaatcccagcactttgggaggccgaaacaggcggatcacctgaggttgggagttcgagaccagcctgaccaacatggagaaaccgcgtctctactaaaaatacaaaattagccgggcgtggtggcacatgcctgtaatcccagctactagggaggctgaggcgggagaattgcttgaacctgggaggcagaggttgcggtgagctgagattgagccattgcactccagcctgggcaacaagagcaaaactccatctcaaaaaaaaaaaaaaaaggtgaagaaatggggagctactgggctgccccagtgctatccatctactcatttagtctgtgttatctgttctacttaaattaagtctatgacctttccttttcctgacttcagggtaattcattagtgtttcagatgaaggtaggtgtgaagtaagactggtaaaatttctggggttgctgtgtcttgcagagggtacaccacccggactacaacaatgagttgacccagtttctgccccgaaccatcacactgaagaagcctcctggagctcaggtgaacttatgaaaccttatttcaggctagattcatccataccacaaattggcagtgttggggggatggattggaaagcaggtgcagatgtgaggaaactttccttcttgtggacagaaaagctgagataacacttctgcaacttctgactttcctctcagggacacacaagctgagctattgtacgatgatgctactagttgttcttgtgtttgtggtctccattgagcccccattctgtgctcttgtcttacagttgggatttaacatccgaggaggaaaggcctcccagctaggcatcttcatctccaaggtatttatgcccagtaggcaatatggatcgttacttccctttgttaaattaacagattgcagaaccctaatgtcccaagggctgagaggatgactctggattcatagaaggggtataatggagacaccccctttcccacttaaaacttttcatttggcaggccatctgtctgcatacattgtcacagaaaaacaatagcaccatacatttgaatagcaccgaatttcactgacagtcttctgaaattatcgcatcccaatcacatgtattctctctttaccaacaggtgattcctgactctgatgcacatagagcaggactgcaggaaggggaccaagttctagctgtgaatgatgtggatttccaagatattgagcacagcaaggtgagcacagtacttgggctgtggtgctgcaagaagccatctcaaataggacagattggacaggagtagcctaatctgtaacttaataagaaagcattttgctgggcactgtggtacacgcctgtaatcccagctacttaggaggctgaggcgggaggatcacttgagcccaggaatttaagaccagcccaggcaacgcagcaagaccctgtctcaaaacaaacaaacaaacaaacaaaaagagagagagaaagtaagcacctctcctgggaaagtacaggagggaagcagctattagtgacacacaggttggagtggcaaatccctttccccctattatgattctgtcttgggtcatatctcttcatttgtacaagctgctgtgttccttccaggctgttgagatcctgaagacagctcgtgaaatcagcatgcgtgtgcgcttctttccctacagtaagtgccactttcttttttcactttcctgacagggccctaagtaagaactctttaaatactgatgactagaggccctacaagttggggatagggaatcaggagctcaagcgtgaagataacctgctctgttcctccttttcttcttctttccttcagattatcatcgccaaaaagagaggactgtgcactagaaagttgcagcccacagcccttcatgtggactctgtcatgacatgctaactagacttcaggggagccacttctgttttcagcccctccctggaatagtgagttgggaggatggggagacagctaaccaactgcattacccaaaccatattgcacttttagttccctagttttctaggtgagcttcattccctgaaaggaggatgatgatatctaggcataacctagcctgtgaggaacctagttaggaaagacaactgacatttattgaatatcatgcactagtcccttacatatgtcatattttaattatagaaatcagtagcaaaaagaatcttggggattttccatctgacttccctggccatcttatcccatccttgcactaccagaagattcatacacttttgagactccagtgagacgctgttttcaccccttcctcctcctagcctctctcccaaaaagtaaaacacaatgctgaagaaata

SEQ ID NO: 1435 - DNA, 960 bp, Homo sapiens
gagtgaagcctgaggtcgtcagggacagcccactgggccttgcccgagatagacagccagattccttatgatgactacccggtggttttcctgcctgcctatgagaatcctccaggatggattcctcctcatgagagggtaccccacccagactacaacaatgagttgacccagtttccgccccaaaccatcacactgaagaagcctcctgaagctcagttgggatttaacatctgaggaggaaaggcctcccagctaggcatcttcatctccaaggtgattcctgactctgatgcacatagagcaggacttcaggaaggggaccaagttctagctgtgaatgatgtggatttccaagatattgagcacagcaaggctgctgagatcctgaagacagctcgtgaaatcagcatgcatgtccgcttctttccctacaattttcatcgccaaaaagagaggactgtgcactagagagttacagcccacagcccttcatgtggactctcccacaacatgctaactagacttcaggggagccacttctactttcagcccctccctggaatagtggagttgggaggatggggagacagctaaccaacttcattacccaaactgtattgcacttttagttccctagttttctaggcgagcttcatttggagaaggatgatgatatctaggcataacctagcccatgaggaacctagttaggaaagacaactgacatttattgaattccatgtactagtcctttccacctgtcatattttaattatagaaatcagtcgccaaaagaatcttggggattttctatctgactggcctggccatctcatcccatccttgtattgccagaggttgcatacactttggagactccaatgagaacctgttttcaccccttcctcctcctagcctctccccaaaaaagtaaaacacaatgctgaaggaaaaaaa

SEQ ID NO: 1436 - DNA, 6242 bp, Homo sapiens
attgcttacctctaagtaagacactttcagagtaaattcaaagtcactctttttatcaatttctttgaagagcagttgtattaccctaggaataaccccaactgttggttcattctcttgctctgcagtatatgcacctcccattgaataggtttttccagagccagtctgcccataggccaggaccgttgcattatatcctgacaaaatagacgtcacatgcatagtggtgtttaaacattttcatctaatcaatatactccatttccttcagcaattatttgtaataaaactgagattgctctcttaatacagtctcttaagaatggcagacacaaagaaaagttctgtgggtaccatgaccttgcactactcaaaataagcaaaaaacaaacaaaaacaaaacaaaacccaaccctaaaatgtgtccccgtagtgatagcccttagaagctaagaaatcaaacacttaaaagatatgactgactaaatgaaggtggccaagccactgtcaaaagccattggagcttgaaaattctgtcttcctaccttaagcaattttaaattacagaaattaaattaaagaaaaagaaaggattctggcatgtattttcttgattaacagtatttatctgaaaaggaaacaacattgctttttacagtcaatgaaagcatctacttcatatctgaactctcagaatgcatttgaaccatattatcaggctgcttacagaaatatcatcatttaagcataattcaatgtgatatatgcctttgcttttattgagaattgataaagaatcatccattaatgagccaggttccgtgactcatacctgtaatcccagcactttgggaagccgaggcaggcagattgctttagctcaggagtttaacattagactgggcaacatggtgaaaccctgtctttactaaaaatacaaaaattaacagggcatggtggcaggtgcctataatcccagctactttggaggctgaggcaggagaatcacctgagcctgggaggcagaggttacagtgagccttgatcaagccactgcactccagcctaggtgacagagcagaccctgtctcaaaaaaaaaaaaaaaaaaaaaagcatcatttattcaaagatgttcacaatatagttaactgaaaaaagcagcttaaaaataattgttaaatatgagtgtatggataggaaaagatcaaaagtatataaattattaattattttgatgtttatctctgagaaataggatggtaaatttttttttttttttgagatggagtctcgctctgccgcccaggctgcagcacagtgtgtgctatcacggcttcgcctcccaggcccaagcgatcctcccacctgagcctccagggtagctaggactacaggcacgcgccactatgcccagctaatttttttgtattttttggtagagacgagtttcgccatattggccaggctggtttcgaactcctgacatcaaatgatctgcccacctcagcctcccaaagtgctgagattacaggcttgagcgaccatgcccagcgggcattttcgttttatcccgtaaattcaaagtttggattgaagctagaggaagataaacaactgtagcaagattttataaagaaacaattagacaatagacaggttattcttactttaacttcaattgttacagtcgtgtgccatataatagcatttcaatcatgtggaatgtatacacgatggtgaaaaattcctgttgcttattgacttagccattataatattgcagtgcaacatgttacatgtttgtgttgatgctggggtaaagaaacctacttcactgctagtcatataaaagtacagcacatccaactatgtacagtatgtaacgcttcataataataaatgattgttactagtttatgtgtttagtatactataccatactttttatcatttttaagagtatactccttctacttatgataaataaagttaactgtaaaacagcctcaggcaggtccttcaggaggtattccagaagaaagtattgttgtcataggagatgacagctctatggatgttattgtccctgaagactttccagtaggacaagacgtggaggtggaagacagtgatattgaagatcctggccctgggtgggcctaggctaatgtgtatgtttgtgtcttagtttttaacaaaaagtttaaaaagtaaaaaaatatatttttttaaaaagaaaaaagcttacagaataaagatgcagagtgaaaatgtttattccgctgtgcaatgtatttgtgttttaagctaagtattattacaaaaaagtcaaaaagatttaaaaaattaaagtttataaagtaaaaaacgtataataagcgaaggttaatttatgattgaagaaagacacaaagtttaataaatttagtgtaagctaagtatccagtgtttataaagtctacagtagtatacaataatgttttaggcccttacattcactcaccactcatcactgactcactcagagcaacttccagtcctgcaagctccattcacggtaattgccctatacgggtgtatcagtttttacctttcatactgtatttttacctcaccttttctatacttagatcacaaatattttccatgatgttacaaccgcctacagtattcagtacagtaacatgctttgcaggtttgtagcctaagagcagtaggctcaggtgtataggaggctatactatctaggtttgtatacatgcactccaccatgttcatacaatgacaaaaccgcctaataatgcacttctcagaaggtatccctgtcgttaactgatgcataattataacttgctacttaattgtacagtagtagcttctaaaactataagcatggcacctaaaaggaactacaaatgcaaatttacttcaaggtgaaaaaaataatgaccttagggaagtctgttccttattagtgtggcagacatgttgtcaaggaacacaaagcaagctttctctgttaaatgatcatcatatttatgtcaaagctgttatctgctatttaccaagataattttgcagtctgaaggaaaaaaccctttaaactttgaaacaacgttttaatctaaatgaaaactttgaagttttgaaaaaacttgttggtctaaatgaaggatcataagaagatgctaaattgagattttcactgtaatagactgctggtatcagctggcatgactatggggcaagagaataacattccataattttctgcaataccacagatatgtgcagatagcaataacttgggaaatgaggttttagtagtttttacaaaatacttagggctctgtggtaccaggagttcagagtacaagagggtgctgttgagctgactataaaaaatattgactttgtttttgcaaccaagggtaatgttaagcaaacacatgtatattggaatcactttctactttatgttgcctttaaagaacataatttaattctatcagtttcccaagttaagaatataaaagtagaactgtggtgctcttactaagctgtggaggtatagcctgaggaatctgaccagatagtgcagggtctgaaaagcatattgtttcaggaatggctaaaggaaaggcggggataattgaagagaattaggtagaaacacttaacggttttccaaatactgtatgtaaaaaggaaaaagattatagtggagaagcccagcagattaacaccttaatcaaatgatcaaaatgaacatcagtagtaatagaataaatcaaaatcatgtgctgcccaataggcttcagtgagaagaaaacagcaccacttctgtgatattcctgctaaaagatacacaacctgaatctaatcataagtaaatgccagacaaaacaatattgagaaaaggtttacaaaataactggcctgtaatcttcaaagtgtcaaactcataaaagtcaaaaaaagactaaagaactgttttagaatggagactaaagagacagcaaaactaaataaaacgtgattttgaactagatctttttgccataaaatatttactgggacaattggtgaaacttgaatggggtttcaggaatagatggtagtaatgtagcagtgcaaattttattgttttgatggttgtattgtggtaacttagaagaaagtccttttttgtaggaaatatacactaaagtatggggggttatcaggccaatgattcatctcaaatggttcagggaaaaaatgttttttatgctgttcttgcaacattctatacgtttgaaattattgcattaatatcttaaaattttgaaacaaaaatttcagtgttccttgagccatatcattaaacaaaaaaacgtgaaaaaatatgtgaatagctgttgcctagaagaaggcttctaaaggaatgaactaacatcactgggtagaaattaccaggaagcaaatttcatctcattataaagatctttataacataattagacttgtccaaaacccaaatctcaactggactacctgtgagtcagtgagttccctgtcaaaaaaattttagacactggcagttcacctaacagatattgttagaacgcatttttctttggatgaaaaacaaactagatgatatacaaatgtctctttcaactttaaggcactagcatgccatgattctacttcttttaaacgaacctctgttttgaatcttgaataaccactgtattagaataataattagacatctctcaggcactgctcccttctttagaaccctgctatggtcctcaacagcattaaagacttagcttccccagtaaagattattaactggtgatagtattcagaggctttaggcactccccttctccacctaaaagaagtatactcattattcaagacccatctcaaagttttcccactctgtgaaattcaccccaaattccccaagcagagttagagccatccttttgtttttcataccactttgtatgagagcagagctactacttccataggactgactctgttgtatatttttaacttgaaaaatttttcttctaaaagataggtacaaaaaatttaaaaatttttatatattcaaaattatttatgtagtcatctatctccattcctatcccctggactttgaactccttcagggcctcgaagctatattatttatcacctgaatccctcaacaagctttgcagtgcctgagcctcaagtaggttggcacacttatcaccatcagcaaccaccacagagtttataatctaatgaagttccaggataaacaaacatatacaagtcaaagatgaacagaaccacataaagcaaatacagaataaaactagcttcaagggtacagagacgttgacaaatgttattaggctaagggcttcttgaaggcaggaatcatgattcatcgattcctgtatttgcagtgcccaagcacagtgcttggcacatagtatatgctcaaggaatatatatgttacgttcgaggaatcaaatcgccttacctttaaatacaccttttatgagtggcgctactgctgtattgaagacttcttcctgttcagtagagggatcaaatacaaaatcgtaggtgaaggatttatctgtaccaaccaccacctagagaaggcacgggacaaggcgtaaggttaaaaatgaaaggcaagaccacacccctcgttaccatttggccccagctgttcagacacaggctctggactctgctacgcacctgaggctctccgggcacgaaggaaaggcacatctggcagccctcgctaatctctttggggaccagagggcgacaacgcagcgccactcttacaggaattcccttcacctcttccttcatgatcctatctcagcaccgtctctgcgagggggaaaaagaaggctcgctgatgaatgttagtaggtcagcaggggtgggagggcgtcctccccggttccgaccctcctcagcgggaacactgacttgggagattcacgctccatgacttggccagggctggaccgcccgtcagccctgcactctaaagagagtgcacgggcttctgaaaggcaaagaaaaaactccaacggggacggcgacaaagaaccaaagccctagggtactgggtaaaaacaggttctgagctaaggtgtgcccccgtaactcaccaaactaaatgtcccttccccgttctccctgggcctcccgccgccc

SEQ ID NO: 1437 - DNA, 1496 bp, Homo sapiens
ttaggttaaagaaccatttattgagggtgtaggtaaacaacaacaaacagtggagaatgaattgtattggcctttgaagtatgtcagctgctgtagaactgtattctctacagatgtcttttagctgtcggagaaggtaaggtagaattcccaggtgctgcaagaagcttccacccagtagctatgagatgcggtcaggaaaaaatgatagcactttcaggggttctgtttttaccccaagcctaggaattggaagagagtaagtggccatgtatcataaaacgaggtggggaggagaactggtatggcaagcccaaatgtaagaaatccatcaaatgaggcagagaaagcctaagctgtcaacaatagcttctgttgcctgactcctcgaaggattccagttcgatttcaaccgctgaagtgtgtgtcaaggaagctaatacagtgaggtgactggagtcaaatcttaacacccaaggtcagcttttaggagatgtagaagaggaattctgatcttacaatccctctcacctaaaggcaaacgaaggaactactttgggctaaagttagtcccattttccccttaggtaccactcaggcatcaactcagcaaggaaacttaccttctctacttgtatactccctaccccagcaaagctaggaaaaaggatactcccctcttttggtggaggtgaagtccttgtggaaagaagggcagaagccacacgccggaacagctgtgtgtgtgtgtgaatggggaccaaaaaaaaaaaaaggggaaaaaaaaaaggtcaggttcagaggctaggataattcagggcctttgagatacatgatggggagatgaaccttgacccctatcccacaaaagataagccaagcttatccaaaagagtaaacagtagtagtagctacagacagagcacaattaaagtatcatagaaagaaacaagtattacctttttcacgttgtaaccggttttggcactggtctcaataaacatcacattgaggtttctggatttttcttcaccctgttctgcagtgacttgtctggacgaatcagaaatgatgaaaagggccagagttattggatatggatagactcttctgaggtgtaatgatgcttacctagggccaggaaccctagaagccttaaacccatgacccttctgactacagggtggggactctctcctatacccccaacatatccttgtgccctgatgggacgcccccctgtccttcccatcctgcagtgctggtagggggcagaggggactaaggtaactcctccccaagtaaatagaggacagttgaccctccccatagagactgaattttaggtatgccagaagaagttgtagttatactttaccttttgttatccaaatcaatcttgttacccaacaacatgatgacaacatcgtcacctctttctgctcgcacgtgttctacccacttatctgtctccttaaaagaattgatgtctgcaa

SEQ ID NO: 1438 - DNA, 1496 bp, Homo sapiens
ttaggttaaagaaccatttattgagggtgtaggtaaacaacaacaaacagtggagaatgaattgtattggcctttgaagtatgtcagctgctgtagaactgtattctctacagatgtcttttagctgtcggagaaggtaaggtagaattcccaggtgctgcaagaagcttccacccagtagctgtgagatgcggtcaggaaaaaatgatagcactttcaggggttctgtttttaccccaagcctaggaattggaagagagtaagtggccatgtatcataaaacgaggtggggaggagaactggtatggcaagcccaaatgtaagaaatccatcaaatgaggcagagaaagcctaagctgtcaacaatagcttctgttgcctgactcctcgaaggattccagttcgatttcaaccgctgaagtgtgtgtcaaggaagctaatacagtgaggtgactggagtcaaatcttaacacccaaggtcagcttctaggagatgtagaagaggaattctgatcttacaatccctctcacctaaaggcaaacgaaggaactactttgggctaaagttagtcccattttccccttaggtaccactcaggcatcaactcagcaaggaaacttaccttctctacttgtatactccctaccccagcaaagctaggaaaaaggatactcccctcttttggtggaggtgaagtccttgtggaaagaagggcagaagccacacgccggaacagctgtgtgtgtgtgtgaatggggaccaaaaaaaaaaaaaggggaaaaaaaaaaggtcaggttcagaggctaggataattcagggcctttgagatacatgatggggagatgaaccttgacccctatcccacaaaagataagccaagcttatccaaaagagtaaacagtagtagtagctacagacagagcacaattaaagtatcatagaaagaaacaagtattacctttttcacgttgtaaccggttttggcactggtctcaataaacatcacattgaggtttctggatttttcttcaccctgttctgcagtgacttgtctggacgaatcagaaatgatgaaaagggccagagttattggatatggatagactcttctgaggtgtaatgatgcttacctagggccaggaaccctagaagccttaaacccatgacccttctgactacagggtggggactctctcctatacccccaacatatccttgtgccctgatgggacgcccccctgtccttcccatcctgcagtgctggtagggggcagaggggactaaggtaactcctccccaagtaaatagaggacagttgaccctccccatagagactgaattttaggtatgccagaagaagttgtagttatactttaccttttgttatccaaatcaatcttgttacccaacaacatgatgacaacatcgtcacctctttctgctcgcacgtgttctacccacttatctgtctccttaaaagaattgatgtctgcaa

SEQ ID NO: 1439 - DNA, 366 bp, Homo sapiens
gaatatataaagaactcctacaactcaacaacaaaaatcaaataacccaatttaaaaatgggcagaaggcttgaacagacatatatgcagagataatatacaaatggccaacgagaatatgaaaatacaatcaacttcatcaatcatcagagaaacatatatcaaaatcataatgagatactaccttgcatccattaagatggttcctatttaaattgtttttttaattagctctgggtgtggtggtgtacaccattagtcccagctactcgggaggctgaggcaggaggattgcttgagcccgggaggtggacgttgcagtgagctgagatggcaccactgcaccccaacctgagtggcagaggg

SEQ ID NO: 1440 - DNA, 11336 bp, Homo sapiens
  SITE (4205): n equals a,t,g, or c
cagttttaaaatgctgtgtttatttctatcgtggaagagataaaaccctacagaagaaggaaagaaaagaggcctaccaagaggttgacagactcgatgacgtccaagaacacctcattcttccgatacttgatgccttcggaccgccaggacaccgcgttggtgacggtggctggtggccgcggggcccctgtttccagcttgtggccttcctgagtgatgtacctgtggggccacacgctcagagtgaaggaggtggtacccgcaccaacgccacagcttctggccttgacatttcggcagggttgggtggggggtacagggcaggttctgaccgacttgaaaatagcccttggatttcagcagctccagaaaaggcagcctctggttcacctggggctgcttcatacagaaaaatcttcacaatttccaaaagccaatacactcaagttatagaggctgaagtgctcattttgggggaccaagaagaccatgttgggaaggaaaacaagaagtgggtgtgagctgcttcccgtccctgctgagcacgtggatggaactgacgcctcggagtgtaacctggtgaccccatcctgctgaaggagcaggaggtgcagcggttaggaacacaggcttctctgggagtctgcttgcttgtcccctgtaaaatggggagacggtatacggggaggctgtgaatcgagtgaatgtgaagtgctggggcccggcccccaggaagcacttaattcacattgcttcttatctgaagggcaggattccaaagaggggagatttcgatcacagtctcattttatgacagtaaaaacaagggaggtgactccttagtagcaaggtactgaaggcatctgtgtggatggagagtaaagatgaggagcaggaaaagcacggttatgtgggggcgtagaggaggaaacgaattaaaaccactaagagcaacttagtaaaaacccgaatactgctggaggtgggaggcaggtgggggacaacatgaacacaaatttgccccttctgtttccacacctgatgacgtcgatgtcatgacaccgcccaggcctggccccaggccccacccctgcccactcactcctgcaggatcttgctgtcggtggtctgggggtagccgaagtccatgagctcgtccagcagctcgtagatgataacaaagttgtcccggatgctctcctcctccagctccttgaagtactcggaaaacacctgtggcggttggggagggagggaggaatgggaggcagatcattgagcggacggatgaggaatgaatgaacgcttgcacacattcatttgcccgctaagtcctaccaacagcctacttcccaggctcggtggtgtgctacagggccctggacccaggttatggggcaggacagcagtggctggctgtggggtggggccaggctggagccactgcagatgtcccgaggccttcagaagctctgcgttcccattctcttccctgcccagacacccgcagacaggcagcccctcctgagcgactgtaactgtcatccctttctgagtctggagtgactcaggcaaggacctgatgagctgccatcttccccatttcagtggaaagcttgatgcatcttccccatttcaatggaaagctcagaaggttaaggaagggacgccaaagaagaggggctgttagaagcacttttgcaggcacaaatgctgaaggaaggagcgtcactaaaacagaaaggcacagcccaacccttgggtgaggaccttccccttcccgcatcccccattctctgatctgctgacccctgcgcgcttcaggactgtgatcacccggcctctgcttggaaaccacaggcagcacagccaggcccagccctgcctgtgacagcatcaccggtccagtgaaggcagcccttggcctgcacgtggggccttcccaggtgaccctcggctccttccccaagccctcaccgcccaggcttgcccctgttccccaacattctgcacaggcagcatcagtgagggatgaaagctttcccaggcccagcacaggcctcctgggtcctgttccccactttcgtgagccccacagcccacctcggccaggcccatcctctccgggaagccagcagcagcctcctcactggcctcaagtcctccttctgctcagcagccagagaggctgctttagatcaaaccacgtcttgtcagtctcctgcttaaagccctccactacctttcatcagaagtggaatgaaatccacactcctgtataatccgccctcttcccagctgacctcagcctcatactctgccacacgcacgctggcctccctagctgcaccacacatacacctgtcctggcgccttcaccctggctgctatctgtgtctcactggcagcctgggcctggcgtgtcagctctctccaaggtgggcgtcaggcatctgtgccttgagagccccctgggagattctgaggtgggctcagctctgcagctctgctggttattccagccccatccagctggtcaccccacatccttccaaagctcgctgacccctgcttgtcccttccagggtcagggcacccctgctctgagccctaccttttcctgttcactttcctttcttccccacggtaggggagcaacgtgagctatagaattccacaggcgtggggagttgggactcccctttcccacttcctgggcttccagccccagtgctccctggggatgccacagctctctgtagggtggccaggtatggggaggtccacaagcagagccaagacaacctccacccaagcccacggcccctccgagcgagactcacctgcaccaccttatagaggaaagaaaagaccagcgacacgcacgcgttcttcttggatgtggcaaccactgcatggcggccacagttaaggagcattcagaggctggggctgctgcctggaagatcctggttcatggagggaccccctaaccctcacaaccctcagagccttccctatccccactcccagccgtttacttggcccatggtgggctacaaagctcctggtccaagctagacctgggacacaggagtcaccagccagatgcgctcccaggccccagggagcactcactgagatggagaatcacagggatggcaggtggcacagggcacctgtcccggcggctgggtgaagggctgccttgagcagggagggagtgaggctcattccaggagcagaaagcaggacacactggccctgctcctccaaagctgacctcatcatgaccctgctgaggtccagggtcccccggccagactctgtggcaagcagccagggccaattctggcttcagcccttcctggctttggaaacacaagccttggcccatgaaataaacctttctagagaaaccttgatatttctctcctgtgtaatggaggcctgtgaatgaactcaccaaggcaatgtaggtgagatgtctggcacagatgttcccttctgccacaggagccagcccctgcctcccagggtcagtgtgtgctgggcgcttcctattcctttttccctaatgggtccccgggccgccagagaaggctggttcttcctctgtaggcccatgcactgcaccctggacatccctgttcatggcacatctgtgctgcctggctcgtctgcccaggagtgagctctaggagggagggtgggggctgtatcctctcccttcccgcctcaccccagcacagcacaggggcccaggaaagggacgctggcccagtcaaacgagtgctggcctccctcctgctgcctggcaatgtgccctccccagatgctttataagcaggggcagtgggggcctctcaccttctcatgggtgcctctcagccacggccttgctgagcactgtcccggctgggggtgaaacgatgtccactaagccagaggggtgagccctccctgtctcttccctagatgcccaggtgtgaaatgtgggggcccaaccagaaactgatctgatggctcctgctgagctcagaccacagccacctctccctctcccaatacctgggcggcttcagaggactgtcagttccctgggttaaaagccacctaggccgggcacggtggctcacgactgtaatcccagcattttgggaggctgaggcgggcggatcacgaggtcaggagatcgaganccatccttggctaacatggtgaaaccctgtctctactaaaaaaatacaaaaaaattagctgggcgtggtggcgggcgcctgtagtcccagctactcgggaggctgaggcaggagaatagcgcgaacccgggaggcggagcttgcagtgagcccagatggcgccactgcactccagcctgggcgacagagcgagactctgtctcaaaaaaaaaaaaaaagccacctaagatcatcttcagagctattctcagggccttccagagccaggtgaaatctacacagaggcacaccacagggagccctgggccagcacggcccacatgggaatgtgcacaccggccaccaggaacaaatcttcctacaatgcagattctgacggggcagggctgggtggagcctgggattctgcatttccaaagggctcccagcggatattctggcccgttggccacactgtactggcaaggccccaagtgtctccaagaacacaggaaagggcacagagcccatgcctgctgggagcaatatgcacaagtcagttcaactgacccgaatggtcctgcagtgaggggtcgttgttcccactgaactgtgggaaggtgagggatcccccatggctgctggagctggggctcaaacgggctgtgagtggcaaagcaggcccttccgcagtagtgtgggtactgagatgggcttgcgggtctgcccaaagctgtggggtggccagttagacctcctggatagaaactggcttggccaagtctccccatgggcccaaggacaggaagggtggggggctctgagatctgggcggggctgtaccccaccacccctccgtggtccaggccacttcccctcccacctgcacgatggccccagcctactccccacctacccatgtcctctcctgtccccacagtcttgccccactcagcagccagaaacctccagaagacacacatctaaaagcctccagagacttcctgtcacatttcagatgatgttctttgagaccccagaccccgctgaccactccagcctcgctgccctacacgccccctctccagccaccccgagtgcagctgttggaatgaggctcttccctgcagagccttcacccacgcctagtgcctgcccacccctccagctggcagaagccaggcctccctgcaggcttcctccagggtgtcatttcccttcctgggcccctgggctgaagaggttcaagtcacacctgctcctctccccacacccatcacacatgtcatcgtgcattgtctgcctgtctccgcaggcagcagggagctccaggagggcatggctgtgtccaatgcttgcgctgtgcacaaaccagccctgcttgcaggcgtgtggatatgcacacacaccaacacccacacaggagtcccctgggagcacccccagcaaagggatacgatacaggttgttgtgtttgatccacatgaaacggacccccccgtgggccaggatgggcgacagcatcccctcctcctccttctccatcaggatgggcatgaagtgctccacctctgacatgtccacgtcgccacggtagttccggcagatgagcacctggggtggggaaggaagagaaaagatgcttgcattttcagttctacaatctgggggcttggggcagggggtgagatgcaccaccctgcttcgctctggggactccggtcatggccactatccgcaaaagagcaggacttgaggccgttctgatctccatcccccagggaattcctggagaagagcatctcccagtgtgaatgcccacaggggccactgcagttcttcgcagggtgagggtagaggcgaactctgcagcaaaggtccaggactgaatcacccagagacatcaggttaagcaatgcctcacaagctctcaatgcagaccttctcagagcctttgccgggccaacgcaccttgctctcccgcctgtgtcagggcgcccactcccgctgaaggttcgtatttactgaagtccacaggtggcctgaagggagaagccctcttcctggtctctctctttcatagcctgtgggtcaggatatacagcatccagaacccctgtccactgctgataggaatggaaaatgggacaactactttggtgtagtctggcagtttctcaaaaagtgaaacccagagttaccatacgatccagtcattcctctctctggtatttacccaagagaaatgaaaccacatgtctgcacaaacactagcacgagaatcttaacagcagctttaattgaaacagacccagactagaaacaatgccaatgtccttcagcaggtgaactagaaacaaactgtatccgtgcacaccatgagaagcatgcctcagcaacggaagggatcggactcccgatacacaggcgcatcagaatcactgtgctggctgagagaaaccagacaaacgagagctcatcctgcatgactgcacgtgtataaaatcctagaaaatggtgatgaaaaacacatcggtgggtgcctagggatggggctagacagcaaaggggtgtgaagaagctttcgggggcgatggaatgtgtggttatggcttcccacatgactgagctcatcaaattgtacactttagataagtgcaggttattaatgtaaattatacctcattaaagaataaaaaggaggtcggaagttttgctagcctgggcatggctgcggttggagatgctgcctggagcagctgcagctcttggggcctgcaggacagccagctgcaggactcagcaacatgctgagaaggccattgcggcgctgaccatcctgggaaccacctgcctcagaacttggcatttcatcacacgctgcctttattctctcaaggcgagactgggggtggtgcggggtggcaccttcctttcctagtgtctgcttcgtggcctgtggaactgattggagggaggcaggtgatgacgtgttgagggaacagcccctccccctgctgtcactcttgaccccccaggtccttcctcacaaagggtgacagggctcttcctacacagaagccagacggggtctctcccccactgctgaactgccacttaccccagcctccccggcactgagaacaaagcccaagcccgtccccatggctcccaaggaccagcgtggtctggctcctcacagcccctctgacgcctctctgcctgcgctgccctggttcactctgctccagcctggccccttagctggtctctgagtgatccacatctgttcccacctcgggcctttgccctgacctggctcttctcatttctcaagcctcagctcaaataacacctcctctaggaagtcctcccagctgggcgcggtggctcacgcctgtaatcccagcactttgggaggctgaggcaggcggatcatctgaagtcaggagtttgagaccagcctgaccaatatggtgaaaccctgtctctactaaaaatacaaaattagccaggcgtggtggtgcatgcctgtagtcccagctacttgggaggctgaggcaggagaatcacttgaacctgggaggcagaggttgcagtgagccgagattgtgccattgcactccagcttggctgacagaacgtaactccatctcaaaaaaaaaaaaaaaaaaaaaaaaaaaagaaatcctccctgcttgctctggctgagatcatgtcccatccctctgaaccctgacccctgctttatccctatcacctggtgcattaaacatttatttctatcctcctttactgtctgacatcccctgagaacagcaactactcctgtctcattcacagctgttttccagcacccagaaaggggcctggaccatagtaggtgctcagtaaacatttgtggagtgaaaacaggggtgaggagacaaaggaggcgaggataacgtccaggtctcttgtgcagatggctgaatgggtgatggcatcactgaaatggaaagagagcaggtacagggagtgcatttagaagaatgctgaatttatggtggcggcgggacctctctggtgtctcagaggccactagatctccagagaaatgctgtgaacaaaattgagagtcactggcccatggacatgagtcaaagcccacctgggaagagtgacagcatggggaggcacgcgtaggcctgagccgctccacagccctggggagggcagaaaaggaggaaagtaggcagtgcaagaaacaggaggaaaccccccagagcgcagcctcctggaagcggaagggagcactgaagaggaggtggttagtggtgtcagaagctgctgagaagccagttagataaagcggagaagcttcctactaggacagcttcctcccagcccagtgtggccacgctggtgtcctcggtgaccagacacgtggccatgaatttctcagtgtgctttattgttgattaaatgcagtcggctcacgaggctgactttggaaacaggaggtccgtgggtcgtggaataagaaagggcatcatggttgcagaggaagggaaggaagcccacggctgccttggggagctttctgaaaggcaggtctgatcatgcctctctgggctacggtctcctcacggtggctcctggttggaactgaagtggtccccttggtccctctctcccatctcagcattagccaggacttctggcttggcagccccagcaggctgccccttgcaacacctcttttccacatgatcgtgccttccaaacctacttccagcgtcgccctcttcagggagcctttcataaccacctcccccttccactggctaaagatgaggttgagcaactgcaggacttgggaccttgttcctgcccctgtggctgcctggatccaactgtgtggtaatgtctctgcttctaggtgactcccctgctagaccgagaggcctgggagagctaacatggaccatgggtggtgctgagcctgtctcatgcatctgctcagcaaatctgcacaataactccataaaagcctcttttgaccagtgaggaaagtgaggctcagacaggagaaggtgcctgtcccaggtcacacagctgagcagcagggatgggttttgagctcacccctaacaccacagccatggcgccaatggacaccctatgcccggcatagggcagggtgcatgctaggtgctcatgaaatgtttgctgaaggaataagcaagccaagacaggcagcccactggcacctctggggaggcagtggccaggtggaagcaagactcattccaccaggactcattccaccgcaccacccagcccctggcgtgctctaagacgggtgtcttccctccttccaagaaggcgggggagggaagcccagcactgggtctcaccagttgttgactttgggtggcttccagagcaggcacccactcaagggacttcaggaaagtgctgggggtggggtggggcgggaaggggcagccatttcacctcttcactctcagctgctttagggctcacccctgcccgcctcacctaggacctgacacccatgtttgtttctctcactgatcaatgttgggcttcacattgttggaccggttcttgttgcttccacatgcaacaggccaggcagccacctgccttgcacctgggatggacttaggagaaggcagaggaccatttctaaaaggtggggacaatcccttcttaaagttttctcagatcctctggggaagatgcctgggttctagtttatgtccagctccctggtgtctctggtccatttgtcacccctcctcagggaaaccctctctcatcctcgggctgaggctgactgtctgtataacacactcgcccctcaacaccactgcaattgacatttatttgtgtttttggagatgggtatccatctcccctaccagcctgtgaacaccgtaagaacacagattgttgagccctggcacatgactcacacctgtaatcccagcactttgggaggctaagacaggtggatcactcgaggtcaagagttcgagaccagcctggtcaacatggtgaaaccctgcctctactaaaaatacaaaatttagctcggcgtagtggcaggtgcctgtaatcccagctacttgggaggctgaggcaggaaaattgcttgaacccgggaggcggaggttgcagtgagtggagattgcaccactacactccagactggacgactgagcatgacactatctcaaaaacaaaacaaaaaaaaagggactgttttttgctaaacacaaatcgaccccaggcttagtaccctgcccggcattagtaggtgctccccagatatcagctgaataaacgaatgattctggatcggactcctagacttgctacttctctgtgaccattgtgaccttggtcaggttgcttcacctctccatgcctcagtttctccctctataaaacggcactcgtgatcaccactcacctcacctaatccttgtaactcactatcacaatgaacgtggagaaattcctactgagagaaagtgcacgataaacagaagctgtaacgccctgagaaggcgggactggctcgagagcacccagtccccgccacgcctcgccacccccggccaagggtcgcgcagcccctggacgccctgcctggctccgaggccggctgcggccccgcttctgggtcctccaccgaggcccgagcccccggccccggcgccggggagcagagggcggtgcagtcagttacctggcaacgcggtggctgcagcccaccgcgttacgtagcaacagggcggggattacccacttaagacccccgcccggttacccagaaacaggatggggctctcaggtgaggtctaccggcctctctgcctcacaccaggatggggctcataagccggttacctagcaacagggtgggtccccgcgggcggaggcccctgccggttgcctggcaacagggagggtggggagccctcagtaccttgcccttcaggtccagcacgtagacggcgctggcggacatgatggctgcaggaggcctcggcagcggccgagggcggtggcggcggcagcgacggtggggactgctgggcgttgagcaaggccgggcgccgcccgcgacagctcacc

SEQ ID NO: 1441 - DNA, 299 bp, Homo sapiens
tgtgcatggtgactgataagagcccttcactttctaacctcataccctgcttctaatttttaaaaataatgtgcatgtatggattctcagtcagcataaatgctaataaagaaaacaagctttagccgagcgtggtggcgggtgcctataatcccggctacacgggaggctgaggcaggagaatcgcctgaacctgggaggcggaggttgcagtgagccgagatcgtgtcaccacactctagcctgggcgacagaatgagattccgtctcaaaaaaaaaagataagacaaactcacatt

SEQ ID NO: 1442 - DNA, 110 bp, Homo sapiens
ttttttttttttttttttgagatggagtctcactctgtcacccaggctggagtgcaatggcatgatctcggctcactgcaacctctgcctcctgggttcaagtgattctc

SEQ ID NO: 1443 - DNA, 4766 bp, Homo sapiens
aggcgggcggctggcagctgtggcgccgacatggctgcgctggtggagccgctggggctggagcggggtaagcgtgcgccagggggccctgcccacccgggccgcggcctacatacccagcccccggtccccgcccttcccgggtcaggccagtgcgggtgggccagcggacccggagggggtgggcggggcgggcgccggggccgggcggtcgctaggtgtgggaggctccctgggcgcgggccgggacgctgggcgcccgccttacaacccggcctgtggaggggtcccggggccgcagggccgctggtggcagtctctcctgcgccaccctggactctgcggggtgtccgactaggcttcggccgtcctccccggactgtgcgctcggcctcactccgccgctctccttgcttctctgcgtctcggggtctctgacactcggggtttctgcgccccgcccccgccccgcagacgtgtcccgggcggttgagctcctcgagcggctccagcgcagcggggagctgccgccgcagaagctgcaggccctccagcgagttctgcagagccgcttctgctccgctatccgagaggtgaggggcgcgcggcgcaggggcgcgagctggtggccgtcgtcctcctcctcctcctcctgcttgtcccgagcccggagactacgcctcccggcagctcccgaggcggcccgccttggggtgccaacgcttcagctcaggggttcttcgggagttgtagttttctcggccttctgttgcgggggcggggcggatccttgcgtggtagcgggagagggtctagaggcctgaactcctgcgtctagggctggaggagctggcgactccctgatgccgctgcctcctcacccaggtgtatgagcagctttatgacacgctggacatcaccggcagcgccgagatccgagcccatgccacagccaaggtgggccccgcaccccattgctcctggtgtctatttaactgcctagtcgaactcaatatctccttcatgccagtcatttctgtttcctccctcatgatttttgctaaatctatgtgccaccttactattagtaaataatcgcacatttttaacttaaatgtcatactaaggcatctttagcaactgcaaatggaaacagtatggcatggttggtagaagataaccttcaacatctgtacagtgcaaaccaggaaactcatggcgctctgacctctcactgcacaatagttagatgctgctacctcttgctgctgtccggaggctcagatctccctccaggcctggctttcctctgtttaaaagtaagattgaggccaggcacggtggctcacgcctgtaatcccaacactttgggaggccgaggcaggtggatcagttgaggtcaggagttcgagaccagcctggccaacatggtgaaaccccgtctccacagaaatacaaaaaaaaaaaaaaagaaagaaaaagccgagcgtggtggcgagtgcctgtaatcccagctggattacaactccggaggctgagacaggagaatcgcttgaacccaggaggccgaggttgcagtgagccgagatcatgccattgcactccagcctgggcaacagagtgagacttcatctcaaaaaaaaaaaaaaagtaagattggcaagtatggggtattcaagacacacaccaaatggacactttctcttgcaagtgaacagaaagagacgcacagtcattacagggggatcgtgcattgtgccatgacaagtgtcccatgcttggggatagtaacccaggctaaatcgctgtcctcggtccacatcccccaccccagctttcatgcctacctggaaggggccctcatcttcagtcgctttctctctcccaggccacagtggctgccttcacagccagcgagggccacgcacatcccagggtagtggagctacccaagacggatgagggcctaggcttcaacatcatgggtggcaaagagcaaaactcgcccatctacatctcccgggtcatcccagggggtgtggctgaccgccatggaggcctcaagcgtggggatcaactgttgtcggtgaacggtgtggtgagtggagggctgaggcaggactgggggacacagtctgtctaacgtagcatagcccctgcttttgacattcactcaacacacactgagtgttgtctgtatggctagccctgtgctgggcaatgttacagactctgagagatgttggcctcagctccctacactcaaccttctctctctggggagggcagtaggccccggctgaaatagtcctaatccagagacataataatgaggaagtgcaaagtattgtgacagcccagatgtggcaccaggccagcatagatacaggaaggttttgcagagtaaggaacatttgggttgggtgttaaaggatgagtaggagttctccaggcaaacaaggtacagggtgttcctgctgagggtactgtagataaggatactgacttggcatacctctgagctgaaaagaaagggcttagttctgatggaggtctggggcatgcaggtaattaaaatcactgtggttaggctgggtgcggtggctcacacctgtaatcccagcactttgggaggctgaggcacgtggatcacttgaggtcaggagttcaagaccagcctggccaacatggtgaaatcccatctctactaaaaatacaaaaattagccaggtgtggtggcaggcacctgtaatcccagctacttgggagggtgaggcaggagaatcgcttgaacctgggaggcagaggttgcagtgagctgagatagcaccactgcactccagcgtgggtgacagagtgagactccctctcaaaaaaaaaaaaaaaaaacaaaactcactgtggttagagttgagggaagcataactggagagatggctggggtcagccatacaggacctgagtgccagcctgagaagctgggactttgtcccatgggtgctggggagctatgggaggggtgagccagggataaactcagcttgcaggtgcagaaggaccactctgggactctatgggagatgaactgaggggagagattagaagccaggccagggaggaggctggggtaagagtccagagaaaagaggacaaggcctgagctggcccagggctgtggggacaaaaaagagggagtcaaggcgggcggacattagtgggctgtgggcagggaggccacaaagatgggtctggacgtttggccagggactgagggaacacggggctgtccctgacatgggaatcctgggaggttttggaggaggacactgaaccaggagttaatgactcccacgaggaggacatgaggcattgacatctcagggctggcaccaggctcactagcagtgggtcccatctcccagtgggggctggacgagggcagcgggccccaggctcagctgtctgtgttgggccctgcagagcgttgagggtgagcagcatgagaaggcggtggagctgctgaaggcggcccagggctcggtgaagctggttgtccgttacacaccgcgagtgctggaggagatggaggcccggttcgagaagatgcgctctgcccgccggcgccaacagcatcagagctactcgtgagcccctgggtcaccacacccctggggcctccacgggctccctttaaccccaggctcccaaaccaggccagtgcttcctggatcttccagccctggcccctcctctgggatcctgacccttgacccttggcccaggctctcaccccaggctagtttggccaaatcccctggggagcccttagcttccttccatcccaagatacggaacctactgtggctgggatccctcagcccacttacctgggcccttgcctctgcaaccccagtcctgcccctcttgtctacccggagcctccctgatcccgggtcccttgtccaccccccttgcaggtccttggagtctcgaggttgaaaccacagatctggacgttcacgtgcactctcttcctgtacagtatttattgttcctggcactttatttaaagatatttgaccctcactgagtgtctgtgtgtctgtcctgcatccctgggttggtgtcttgagatgtggagggaatgcgaggagctgaggtcaggccaagccgttgagaagccttttccagagtctgagaacagaggttaagacctctccctaggtctgaaggcggagacaggccggcttccaagagactagtccgagggcggagggcggaggcagggacccagtctgggtctgagtgctggggcagaactgaggacaacgctgcctacccttaagagcgtctgagggcgaaggccaagtcccttcctccagagtcctgaaacgcagccggagccagtgggcggcctctgtgtgggcggggcggagcgaaccattagcctcgtccgccgggggaaccctgcaggccgcactactgtctgcgtgggagtcgcgggtgggggtgccgcgtgcagttcccgaggcgggcgcaggggtgcagaatgaggtgccctcgcccaccgggcgctcactccaccttccaaacacagcgcgtctttccggaagcagcccccgccttgaaatccaacctttagcctcatcccgctgcccgcccagccctcgtgtcccgtgcggcgcgagggctagtgcgcgccactgccgggagccggggtcgcgactcgcgttccacgccgcgcgctactcgctccaggtgacatc

SEQ ID NO: 1444 - DNA, 95 bp, Homo sapiens
tgtaatcccagcactttgggaggctgaggcaggtggatcacttgaggtcaggagttcgagaccagcctggccatcatggtgaaaccccatctcta

SEQ ID NO: 1445 - DNA, 8861 bp, Homo sapiens
cacaggtaatcaaaaatgttttaatgattactgtttagacatttaacaatgtaggtatatccaggtgagctaagcacactttgacagcacactattgaatgttatagtttctgtattgaaatatgtaaagacatctgcaaattagtacctagcaatgaagacatacatttataaatatacacattctaggtttgataaggtaaatgtaaacagatgccatgactccttttcaaacagaaaacccacaagactaatagagaaccaataggctccctatagtacgaatgtgcaaaattaaagcatggtaaactgatatttacataaatatcaaaccaacaattagtttatacattgtcaatgaccttctaagatatgtcatgagtggttccaagaatatctttcccccaatggagaaggtattcagaggctaaattccgacactttaaaatgacacacatcataggctttacctgtttgaccactgcctcaaatgtgtgagatgtgattttatgataagcagtctattatttttaaacaagaggttctaaacacatctttagattctaagcagaaagaaattacaagtactattagatttacattaaacaagttacctctatcaaatttctcgattctcttatgctgtagctatatttgattttaccttaaaaagttctaaggtcctttccccccctttgttaattttggtaaactaggcacattttacaaggaaatctgtgtcaaaacagataacagtgcataaatcaatccaaatttagaccctggcaaccagttccccattgctcatctacgggactctgtcaaacggtaaataggcaatcatctctcttgaaaagtatacatcctctctcgcactggtggaaagcaaaattgactttttgtttgctgtataaaaacacttagcacttcagaaattaaaaatggcctactcaccctacacccttcctaaaatctcgaggacaaagaatatatatttaagtttcatcacgactgctgtagagcccccccctttttacattaatagtggcactcaaaataaaaaaataagatctgttaaaaagttaaactgactgttccactagatttgagcctgcttgattcaaagccaatagtacaaaactgaaggtgccgtgtctgatttcacatcaacaagtcactggaaattatgtcacattagtttcataaatcatggtctttgattttttctaaacagagctattacaaattaatacaaacttgaaacataccctaatttaaactaataagctttgggccctgctttttaaattttaaggcatgtgtgtttctctaccataacaacattgtacaaatttacatttacaatcacatgcatgatctacagttaaaaaaaaaagtttggattacagtgtttttaaattgtgaatcacaattcagcacctatcatgttataactaataaggcaacagcagtgttgtatactataataatactccctttccacagtctagcgcaggggtcagagagcccagaaatgttagaaatcttatccctacttatataatctgtatacgttttctaggggttttgaattgatgaaagaagtcctacatgaatcacactattgtaggccagactagttacagcagctgttaacgagcattggggcacaactcatattgtgcttacaatcagatgacgtggtttggagggtttcaattctttgacttcaatccttccgcagcttccttggcttcacattgttttccaggggtgaaaagctgttggtgtgtccattcacagcagccatggacccattctggtggtccttcaggtggtctttccttcgggaggcccctttcttgttgtaggtctaaaatgtgtaagggcagatgagaaccaaatgaccacagttttctttatagggaactttactgagaattgcatccctaacactaggcctagtttcaagatcaaatcttatcaaggagaaactcctgaggtcaagtcctcattgactaaatcttttgtcactggtttcaatcattcttcctttttttttttgaggcttagcctgaggtaagttaactgaatcacaggctgcaacagaaatactatttaaaatgtcacatagaaaattcaatttacactttgctttgccttttagtatctggatggcagatgacaggggttatgtggccaaattggtctttcccacctggcagcagctctcttgacacccacatcccttgttcgtcttcaaaagttcctcactgcctcggcgactatctcagccttcatgaacaaagtgctatgctgctataagtagttagaataaatgtgatttcagcttcatcgggtcctatcctttcaccttccttgtagctggtgtatgtcccacagtgcagccataaactatgaagcccagaagtatatgacttccactgaaactcaacatgccacacacaggtgcttgtgggcacagaagaagaaaggacaaatgtctgagcctcgggacttgcagcctctgcccttgctcctgacctccgtgttttgcccagatcagcaggccttatggctaccaggcactggcaacaaaggcaggacacatgtcatctggggggtgacgcatggcaggagaatcagcagtggctgcaacgtggtcaggctccactggaaattatctgccctaaatggatctttctgtgagcaaagacctacatcaccacatcatatgcttaggaatgaaccgaatcctcacacctgaagactgaatgtataagaaagctgggacaaaaaagcagatctccatatctgaggactgtgataaaaatctcttctgaaatttcatttggccatgacgttcagggtagtgaactgagagatttctgattgaaatcacctctcacgtctctgctgcaggtcagagggaagcaacatagggtcctgctgcacagttttccatttcccaggggaatcccaagacttcctcacccaggctctagaacaggattctagtgtcttccagtgagctgtgagccccccagaggcaggggctgctcttgtcatagtgactccattagaggccagagcctgtcacccagcaagggctccacatgcccattaagtaaatagatgagggcctttgttggtaaaggccccagattccaagtcccagagaagggtgagatttacctgaatgtagaagtttgtgaagagagcaatcagggaaatcatgtatccaatctggaaatacaaccaaccaagagggaatgtgcacggccagatgaccccgcagctggtctggatgattgtcagcacaaactgaagctaggggaacagaggggatgcagctgaacagggacagtgcatggacgaggccccacaccaggcagactttttaaccagcatcacctaaatttctgaattaacacttactacccttgctgcaggtacagcagtcacttcatgaacacaacacatacactatacttatcctaaactctaggtgtgtttgtcttatatatattcttcctctgccctccaagctatttaaactaccttctccaaatttcaaggatacactatagagacatccaagactttttgtttttattttttgagaaggaagagcaagtgtgtatgttgaaagggcactgataacatcactgcaggatgtgccacctggctggacatccttccaactccttatccatggacgcttctggtttggtgaaggctgatgagtagatttaaacctttactggcaaacaacactaagtgcattgattaattttgatgaataaaccttgaaacgcatgtgaactggttagagaaatggtggaaagatgttttaaaaagggctaggctcaggccgggcgtggtggctcacgcctgtaattccagcactttgggaggccgaggctggcggatcacaaggtcaagagatcaacaccatcctggccaaaatggtgaaaccctgtctctactaaaaatacaaaaattagctgggtatggtggcacacgccggtagtcccagctacttgggaggctgagataggagaattgcttgaacccaggaggcagaggttgcagcgaaccgagatcgcgccactgcactccagcctggtgacagagcgagactccagctcaacccctgcccctccccccaaaaaaagggctaggctctgcacactgtatttctagcagctccaatgtttctatgtagagttttttgtttttaatttttgagacagggtctatgttgcccagggtggcctcaaactctcaggttcaagagatccttctacctcagcctcccgagtgaccgggactccaagccatgacccactgtgcctggctgtttgccttctcttttttaaggttagtactgcagactgaggaataactaggagtggtgcttaaaataaatcctgacaacctgggtaggtttaatcttccacctcaaagtacagagcctaacgggagaccaactttgccagtctgttcttttaaattctgcttccgccagacccaaaactgtggtataaatcaatttctgcatcatttctcctcaagtataacaaggaggttaatcaacaattttcctttttcacaggtgggtgagaaaaaattaacaaggaccatatagcagctggcagagaggtgaaaatgaaacatcaaacacttcagtctctaagattttctcagacttttttttcagattgttatttttaaatattgaaaaatcataattgacttgaagggatctgaatcagcttggtgtgtttagaaaaatgtgttaataatgcaaggacagggcaaagggtttaatgtccacacccctcagtcagctagctttggcctattgactcagtgtcatctataaaatagggacaataatatgtgtttttctttttggtagagacagggcctcactatgttccccaggctggtcttaaactcctggcctcaagtgatcctcctgcctcgacctcccaaaatgctgtgattacaggcgtgagccactgtgcctggcttggggacaataatatgaaatcaggctactggaacaatctatgtaaaatcatgtacttagtatgagtacccaacatgtgctaaacacttaggaaatgtcagtgtttaatatgagcagtagtagtattaattagttcatagacgaattcatgagaggagagaaagaggttacctataatatactgatgaatgcagaaggcttaatcaaggatggtgagaagtatcaggtgaagtggcctggccctggcagtaaaccaggggaggagctgttaactgaagcaaacagctgccatcctcaccaacaggtgctccactgcatgggggctgaggggtcatccatacctgccaaacaaatatccttgctgcctagtaatgggctacacataccctggactccatactactctccagctccttctaaaacccctggaaacatacaattttcattttggattttggactataattagaaaacacacacacatatacacacatacatgcatatgtgcttatgtgcaaaaactcagaagagctgaacttgaagttggcaaattagattctagacctctttgtacaattcaactagctgtatgcccatggtcacagttcactatcagttcaaaacaagaaaattccctaatctacccacttcaaggaatttaattacatcaaatgaaaaagggtggagaaggggcatcttagatgctattacataacactaaagccaggaagaggtctgtatccaccaggaagtaagtcctggggaaagaggccaagtcactcaccagctgcccctgagtgatgtacttcttccaccagaggtatggacgcatggaagggactgacgacaaaccatagtaagagtacatgaggacgtggatgaagctattaagtgtggcaccaaaataagctgcaggaacagagggatttgggaaggagaatgtattagtgttttaaacagaacaggtggtaaaaaaaaaaaaaatacaagattctttttgaatcagaaagagagatgacttccaacggagctgacaaacactgcaacagcaagcaatgcatggatgtgtaatgagaattcaatttccacttgggcaggcagccaccaggaggctccgagcccaggggtcagctgtagctgctagaggggcatctgacactgaagccacgacgccatcccagcacctacaggctttgctgcagatgcccacccactctcagagacagctgtttttctttacatgcacaactgcccaaatatgctctctgaaggctgtggaagacagctgatgggcaatatgctcaaaaatggttgtttctatacatttgctggggtgtggagaggtctctgaagccatcttctaattatttcccaggactgcagtgctgaggtcatacatttttattaataatagagtcaagagtctagctccttagagataaaagagccatcttatcacatcattttcaatgttcagtaggaccactagttctttttccagactctgtcctcctccccaacagtcagcaaccaaaccaagccatctggcttttccctgtgcagttgcaggtgcacagcctggtgttagggaagtttctactcctggctatgataggaactggcttttgactttggacacatcacatccattccctggttcagtttctcatggcccaagtggagctgattaaatctgtcctcctgaaagttctctgaaaatttaaagcactcttcaaatgtagggaggggctgtttctattagaaagttaggtcagttaatccaccatcatgagctctgacagtgggaggaagagcagaaagccccaactctacccacctttctgtggtcttagtttcctcccaaacccaaaggatctgtatttggaaagctttttttttttcctagctctggaattccatgacactgtgaatcttagcaggctcaggtaatcaagggcagtgctatcccagagaaaaaaatatccataaatagacccataggttctcagttaaattcttcagtgtttggatgacgggacttttgactgagacatttgctaaaactcccaggctgaatctgaaggtggcaatctctgaaaattataagaaactttggactacaagctttccaaaaaccaagtacaaccttagaaaatttatatcaagttttggtgctcgttatagaagacaccttgatcaccatgcttcagggaatatgagggttgttagaacatgtggagacttcctaatgcatgacagctaaagctgtatttcaaaatgagccttgctccctggtactcatgcaacagtgtgatcctattttcctcacctgcccgtctcaaaccttccacaccatacagaaggaccagaaagaacctggaaagttgccctctaagtcagagaatattgtacctattccttaatatgtccccagtggtatctccctcatctcacccaatcagcacagaaagttcacttaactaaaaaagggttttgtgtgcataggtacataaactatcattaaaagcaacttgaacacaaagctgaaagcctgacctagacatttacagaaacagcaccttttctgaaagccttagtttcaactctcctccctgctcacacctgttccccaagtccccgtctctaatacttacagtggccgcaggggacccagttcatcacaaaccaccagatgttcagcatcgaggcatggtggtagacgtgcaggaccgtgatctggtggttgttcttgcgcaggatgaagaagaaagtgtccataaattctatgagtttggagaagtagtaccaccagaggacacggataatctaagaggaaagggtcaaagatttaaggcttatcctcacggcttctctggaatatcacctctgacatgtttcactaatatccaaaaatctgatgtcaactcggagaagcccgagtgccccaagagctcttaatgtccatcagtggctgggagctatggtcactctccaagtacctttaaccaaagaacatgattgggttgggacagctggaggggtttgaaatgactacagggaatatttttgaaagggtccctgacactctttgagactaacaaaaacatgaggctcaaggttcaaaaccttgaagtctgcctattccctctggaagcagcctgcacagccattagcaaaggaaaaccatctgaaaaacgctattgatttcagggactaacatggagcagccgacctgataagtgacacagaagaaaaggaatcagaacctgcagtgtcaggtctctgcccaattaaacatgtcaaacaagtgctctaaggagatgactgcccatgctgagctgcgactgttggcctgtgatttaaaacaaacctcatgagtggaagtcagattttatttttaacaccactactcggaaaaaagtacttggatgaatgattttaaaaatttaagacattgctcttatgatcctgattgtgtaaatataacatactgactgcatgtgatttttcctgccaattgttaaccggagttatttttacagagggggatgctttaggttttattttatacctttcacattcaaattttaatttgatgtgtatatattgccttttttattcttttaaaaatatcaacagggattgcctgggcagtgaggttatgggccattttgtattttatacaatttatttttaaaaactcaacacttataataataaagtttctgaaaaagagacagtaccttcatatctgattctcctgcggtgcgtgtgccctgacagaagaagttgtatttgccttcccatactcctgttactaact

SEQ ID NO: 1446 - DNA, 498 bp, Homo sapiens
tttttttttaaagagatggggtctcactctgttgcccaggctggagtgcagtcacatgaccctagctcaccgtaacttcgaactcatgggttcaggcgatctttggcctcatcctcctgagtagctgggactgctggtatgtaccaccatgcccagttaatttttaaaaattttatgtagagatgaggtcttgctatgttttccaagcctgtaaataaagttttattagaacacagccatgcccattcatttacatattgtctatggctgtttttgtgctccacgatggcacagtcaagtggctgcaacagggactgtatgtcctgcaaagcctgaaatattttccaactggttctttccagaaaaaaattttgcagaagacctatggtctagacctaggaaagtaattctaacattctcagggtaaggggagagattggggccaatggggaggaaggacaaaggagcatatttagagctggaacctttagtgggatt

SEQ ID NO: 1447 - DNA, 495 bp, Homo sapiens
ttgcttttgtctgttttaaaataggatggctggtgtgtgtgcacttgtggaggtgtggatgactgcattcatgaatgtctatcttggcaggggtggggaaaatcaaggtagctctctggagaagaggaggacaaatcctctcttgtaattctgcaggcgcctcaatcccaaagatgagaacgggttgaaggggtcttgttaactcagcagaagggactcttggacacaggcttcctttttaagaagggatccaggtgggattgccttgactctttaaactagttaacctaacgttccatttgccctctccccacccataaatggggcaggggaatccatgtataaaacacctgttgtctttggagtttagttaaagaactcaaacctcagtattgggtggtgaacttttttcactcctgaagcataaaccaggtatacacacaagaagctgctcactcggtgccactccacttgacctaggcccaccattcctct

SEQ ID NO: 1448 - DNA, 7389 bp, Homo sapiens
tttctaataaaataatatttatttgattgcaagtatacataaagtcatatgtacaatacatggtagacatgacagttccctagccataaggcagaagtagctgtattttctgattctgctcggaccactgggaaatcttaggggtgttgtgtactgaaagtacccaaggtctagagaattcactcgccgtcagtccagtccaggaaatcaaaggctctaaaccacagtctcaatcccactccattgtccatcaagcttgcttggtgctggcaggagactctttgaatttcctatcagcctgaacacacacacacagagctgtgagttctgtccagcaacatctctatcccagggactggactggagggggctccagggctcatttcaccattccttaggctgggagctcctcccagtggtttctgttctactgagtcctttccactgaaaaatcctagaggtaattctgagctggttccacgtgaatccctgagagtttttcacaggcatgtggtagcgcattttggcccagaacctagaattgggaggaactgattttaagcctctccaagtaactgtgggcaaaaccctgagagcttttttcacgagatgaggtagagactctggctcttggaagtaacagaacttaattaaaatgagtttcagtgtttgatcatccaaggcaagattcactgctgcttgtagttcaaagatactgggtccattgacatagttggggctcaagataaatattcctcttctgcttctcttaataatgctcacaatgtcttctgcatacactggaaataaaacatttgattatttgcaatggatattgttaaaccttgagtcagagaggtccttgcaatggattctcttacataaggaggaagggagacatgtttactctaccacttacactgtatcagctctattgccagttggagatacgctccagtgtctagtgaccctcacctttacattccctgctttgtgtccagtctccccaaattggcaattcctctaggaataaagctgactggaactaggtaagctgggataatgggagccatggaacatcccaggctccttggtgggggtatctgaggaggaggaggccagcaggacaggctgagatctggacttctcagggtgtccagggcgtggcccaggcctgagaagcctgcttgacccagtgctgagtgagctttgtggaaggcagagtcccagaaatcagaggggccactaaattggggtgagcgagtagttcacttcgcagccttcagctgcgaagccaggagaggtatctttgtcctagaaggactgcctagggccccatgtgattgtcttcttctgcagatggatttgtttgataatggaacacatctctggaacatatagtttctgtgttgttgcccaagatgttctaacctcatgtaatctcccagatctatattccaaaacaaagaatgacaaaaaagacttggggattgcattgaactgccctttttgcactgcagtttttcttgacatgttggacttacctcctcctggagccacatctctttcaagcaaacacaggctatatccatatttgttttctaaaacatcaggaaataggctcagggccaagtgttcttcactcagagatgaagtggcctcacttggaaaagagctccattttgcataggatacgaaagcatcaaaatcctttttatctgaagaataggaaaatttataaaaacataagtcatttactcttttttttactgttatggtacacatacatatgcttgaatcatatggtaaatgaataagaaataatatttgggatcctgactaaattgattttaaaaattcatttcaaaatcataccactgagcggtattgatttttcaccccaaatcgaattctaatttatgaagcagtcttgcatttttactgattttaggtcaaatggctgaggcattctttgattaagtcacatgaactcaggagtttctctgagccttctttgcacctgcagtgtttctgtctcattagtcacacatcaagcaggagtctgccccatccaacatgatgatatccagtaagcaaagtactgctaacacccagcacatcgtatccaaggagaaaaagtacttgctcggagagttgatggcccatatgctgatatgtgaatccccatatgtaaaataaagacaatcataactcctgggcaggctgttttaagggtttcatgagataatgtatatgaacttcttggtgcctggctcataggaggtgcaagataaatgtccattcccctctattctagatggaaaactatatgtatataacttgttataggatattttcatatgcatacttcataaatgcatatgattactgagactaaggaactcactggaagaagtagaaaatcccaacacttaactcacaggcttcggaatgggatacatcagatttgtattccagcaatttccacaatccctgtcaaagtattgttacaaaacggtaaacagtagccctgattgctgatgctatttagtagtacaccatgttcaaggtgaacctaaaatgatgcctcggtggatggaagtaccaggtaccaaaagggaagctcccagagtcaacagaggaggatataaaagagctgaggttgggaaactaacctatgaagcacctcattgctcatgtaggaaggatgagacttgtggggcatggctggcaggtaggtgctgtgctgtttaaatgtgtaacacaccacagttgcctctattccttccacatcatgtgaaatcccagcaaactaaaatttttctataacctggaaactacatttatttagtcataaaattagagagtggagtattagatgatctctgaggtcctccagaattctaacattctacatctctaaaattttggttacttagcattaacttcaaagcagtcattttgctaaaaaatgttaggttggccaacagagggcactgcatccccgtgcttgaaaactggattctgcctccagatctgatcactaaaaacattgtctttgcaaaatagaaaaagaaaggacacaagtaaatgtttccccattgactgactcttctaagccagctccagaatcttaaggtaaatagcattttatgaccttgattacataatttgcttcattcaaaaaagttattaaaataaatcttaaaaacatttctcttaaggatttctagtatgtattctctatagtaagtttaaagaaagatgtgactgatgcatttctttcttccttttttttgaaaaggagtcttgctctgtcacccaggctggagtgcagtggcatgatctcggctcactgcaacctccacctcccaggttcaagtgattctcctgcctcagcctcctgagtagctgggattacaggtgcctgccaccaagcctggctacattttgtatttttagtaaggatggggttgcaccgtgttggccaggctgatctcaaatccagacttcaagtgatccgcccacctggacctcccaaagtgctgggattacacatgtgagccactgctcccggtcacttttttttttttttttttttttttgagatagggtatcgctctgccatccaggctggagtgcagtgatgtaatcatggctcactgcagccttgacctccggggctcaggtgattctcccacctcagcctcctaagtagctggaactacaggtgggtaccaccacgcccagctaacattaaaaaatttcttgtagaggcaggtttcaccatgttgcccaggctggtcttgaactcctgagctcaagcattcctcccactttggcctcccaaagtgctgggattacaggtgtgagccaccacacccagcctcccatgccggtctttattcaccctttcttcccccagggatctgacaactcctcactgaattcctagtttgggaacgcactggaatttggaggggcctctcagtaaggtaaataattatccgtgaaatcctgcaaaaggggattctgctttttccaagcaacagagtcatttactaaaactgcaaaccttctaaccttggagatttccaggactagaaaaaaacagaagcaagacttctattccacagaagcaaacatcaatgaacatgattatcttgcctcaaatattgacaggcacttcattaatagtaatagcacttgcattttacaggacttctcacttttgggggcattcccaccgtcttaaaagcctcattttacagatgaggctaactgaggtaacagctaatgaaacctcttaagccagacaacctgtgcccaaatcccaagctctaatgccttccagtagttcaattgtaggcacatgacttcctgtctctctacctggctggtaggattgctgtgaccattaaagtagctaacacacatggcaggcatacactctagtcctcaagaaacagccatagtctggcacatgctgagctatttaccgtgtactgggcaccattctaaatacttaatgtggctgggcacggtggctcacggctgtaatcccagcactttgggaggccgaggcggacggatcacttgaggtcaggagttcgagaccagcctggccaacatggtgaaacccagcagtctctactaaaaacacaaacaatagctggacatggtagcgcatgcctgtaatcccagctactcaggaggctgaggtaggagaattgcttgaacctgggaggcggagattgaagtaagctgagatggtgccaccgcactccagcctgggagacagagcaagactccatctcaaaataaataaataaataaatacatacatacatacatacataaatgaatgaatactaaatgtgtcttaagaatacatcagtgagccctcacagcatcctttgcaattggtgctatgacaatcctgttttatagatgaggaaacaaaggcacagagatattcactcatttgccctattgctttaggttggttatagagggattatttttaagtccaacatgtttcacaatagcattgcctacaagattcctggcaactggaatgaaaaaaataattgtttctccagccttcctcagtgtaaggtcactagacctggaggaaggcctcaaaacctcaggggcatgactttatccagtggggacatttctttcttcagctcctcctttatgctctgccctggctggcaggggacatttgaagttcttttctaaggtaactctgaggaaacaaagccaaggggtagtgatggtattttctgttgtcctgctccaagtcaattcccagaggaaaagtcagagggctgcatgtggaggtaaacttacccccaagcgtctgatccttgctctggtaggtccggtacagcagcactatttcaatccagtgcctgtagaggagggcactcgccgccagcacggccaccagggtcccgatggtgccaagcaggatgtacaggagcaccactgtggagacagggccagtatgaagagacatagaggcagcgggattggaccaagaccatgttcaggccggcgctatggcccacccagcaccttttccagctctattattttatcaaaatcattgccactagcagcagtttttgtgaatctggaaacctctcaaatcacaccatggaatactacttagccataaaaaggaacaaaataatggcatgtgcagcaacctggatggagttggagaccattattcattatactttttttttttttttttggagacggagtctgtatgtcgcccaggctggagtgcagtggcgcgcagctcactgcaagctccgcctcccgggttcacgccattctcctgcctcagcctcccaagtaactgggactacaggcgcccgccaccacgcccggctaattttttttgtatttttagtggagacggggcttcaccttgttagccaggatggtggataccattattctaagtgaagtaactcaggaatgaaaaacaaaacattgtgtgttttcacttataaatgggagctaagctatgaggacgcaaaggcataagaataatacaacggactttagagactgagggagaagggtgggaggggagtgagggataaaagacgacacaacgggtgtagtgtacactgctcgggtgacgggtatgccaaaatctcaaaaatctaaagattttcagattgaagaacttatccatgtaaccaaaaaccacctgtacccccaaaacctattaaaataaaattttaaaaaatcacattttgagacctgtcttacaataaacactagagaccccaggggaatgggcagttcctgatcagggtggcctgggaaacttatcatattccttttattttttcccctcgtaaacgtccacacaatccatttacatctctctcattgcatattgtaaattattttcctgtattatcattcctactgcagcctaaatttcctgagaccaggagtcccatctggcttacctgacacgagggatctcctgcatactcccatgggggaaaacccccttcacagagcgtttactacaggccagaacacactttgtcttgttgaagcctcagaaacattcaaacctgcttataactatagttatctattaattaaaggaatgaatgatatcaatttcatctctgggcatcttttcaaagaaatttaaacgcttttccttacctagaatttctactccagcttttttttttttaatatatccgtgatatacacacaccattttgaacaatgaacaagattactccttctctcttccattctccactcatcagaacatgaatccatcatgtcctttggatttgaaagccaggaaagaaaaattggaaaggaggctaggtcttagcacaatgcctgccattctgggcataccccatagctattgtagaatgaatgcgtgaatgaatgagtgcatgaatgagttgcttttccaacatggcctcccaaacgcagactattacttaagagaactagctctaaaccagtaatatgcagtttactagttgtgtggctttggtcaaggtattaaatgggttgacaccaggaaagtgcttaaaacaatgtctgtcacctagaaaatgtaatcgctgtcatcattattactattctttaggaaaactcctcccctctcaagtgaaagcagtttcatgcctcctgggcaaccttctgggcttacctcctctcttttctttcagttggacggactgggttgtgtttccaatggagttctggacaaagcaaacaaacttcctgcgaagatcacgctgagtgactttttccaagatgatattacgctcaatgatttcatcctttaaagtggatttaatactgagaaaggag

SEQ ID NO: 1449 - DNA, 480 bp, Homo sapiens
ggtgggttaacatacagaggtgactattccttacctggccacagatgagacttgtgtggggcaggagcacacaagggccaaagtgtgatctccctggatctgtacacctgtgagttagatctgactaacctgattctgttctcactttccatatctgtatctctctttctcatggtgatgatgacagcaagtcacctctatttctgggatgtgtggtatatttaccatttctgtaaggccaagataaaggggtatcagcgtctaatatcaccagactgttgctatgatgcttttattgtgtatgacactaaagacccagctgtgaccgagtgggttttggctgagctggtggccaaactggaagacccaagagagaaacattttaatttatgtctcgaggaaagggactggttaccagggcagccagttctggaaaacctttcccagagcatacagcttagcaaaaagacagtgtttgtg

SEQ ID NO: 1450 - DNA, 2468 bp, Homo sapiens
tggtgggttaaccatacagaggtgactattccttacctggccacagatgtgacttgtgtggggccaggagcacacaagggccaaagtgtgatctccctggatctgtacacctgtgagttagatctgactaacctgattctgttctcactttccatatctgtatctctctttctcatggtgatgatgacagcaagtcacctctatttctgggatgtgtggtatatttaccatttctgtaaggccaagataaaggggtatcagcgtctaatatcaccagactgttgctatgatgcttttattgtgtatgacactaaagacccagctgtgaccgagtgggttttggctgagctggtggccaaactggaagacccaagagagaaacattttaatttatgtctcgaggaaagggactggttaccagggcagccagttctggaaaacctttcccagagcatacagcttagcaaaaagacagtgtttgtgatgacagacaagtatgcaaagactgaaaattttaagatagcattttacttgtcccatcagaggctcatggatgaaaaagttgatgtgattatcttgatatttcttgagaagccctttcagaagtccaagttcctccagctccggaaaaggctctgtgggagttctgtccttgagtggccaacaaacccgcaagctcacccatacttctggcagtgtctaaagaacgccctggccacagacaatcatgtggcctatagtcaggtgttcaaggaaacggtctagcccttctttgcaaaacacaactgcctagtttaccaaggagaggcctggctgtttaaattgttttcatatatatcacaccaaaagcgtgttttgaaattcttcaagaaatgagattgcccatatttcaggggagccaccaacgtctgtcacaggagttggaaagatggggtttatataatgcatcaagtcttctttcttatctctctgtgtctctatttgcacttgagtctctcacctcagctcctgtaaaagagtggcaagtaaaaaacatggggctctgattctcctgtaattgtgataattaaatatacacacaatcatgacattgagaagaactgcatttctacccttaaaaagtactggtatatacagaaatagggttaaaaaaaactcaagctctctctatatgagaccaaaatgtactagagttagtttagtgaaataaaaaaccagtcagctggccgggcatggtggctcatgcttgtaatcccagcactttgggaggccgaggcaggtggatcacgaggtcaggagtttgagaccagtctggccaacatggtgaaaccccgtctgtactaaaaatacaaaaattagctgggcgtggtggtgggtgcctgtaatcccagctacttgggaggctgaggcaggagaatcgcttgaacccgggaggtggaggtggcagtgagccgagatcacgccactgcaatgcagcccgggcaacagagctagactgtctcaaaagaacaaaaaaaaaaaaacacaaaaaaactcagtcagcttcttaaccaattgcttccgtgtcatccagggccccattctgtgcagattgagtgtgggcaccacacaggtggttgctgcttcagtgcttcctgctctttttccttgggcctgcttctgggttccatagggaaacagtaagaaagaaagacacatccttaccataaatgcatatggtccacctacaaatagaaaaatatttaaatgatctgcctttatacaaagtgatattctctacctttgataatttacctgcttaaatgtttttatctgcactgcaaagtactgtatccaaagtaaaatttcctcatccaatatctttcaaactgttttgttaactaatgccatatatttgtaagtatctgcacacttgatacagcaacgttagatggttttgatggtaaaccctaaaggaggactccaagagtgtgtatttatttatagttttatcagagatgacaattatttgaatgccaattatatggattcctttcattttttgctggaggatgggagaagaaaccaaagtttatagaccttcacattgagaaagcttcagttttgaacttcagctatcagattcaaaaacaacagaaagaaccaagacattcttaagatgcctgtactttcagctgggtataaattcatgagttcaaagattgaaacctgaccaatttgctttatttcatggaagaagtgatctacaaaggtgtttgtgccatttggaaaacagcgtgcatgtgttcaagccttagattggcgatgtcgtattttcctcacgtgtggcaatgccaaaggctttactttacctgtgagtacacactatatgaattatttccaacgtacatttaatcaataagggtcacaaattcccaaatcaatctctggaataaatagagaggtaattaaattgctggagccaacta

SEQ ID NO: 1451 - DNA, 4841 bp, Homo sapiens
tagttggctccagcaatttaattacctctctatttattccagagattgatttgggaatttgtgacccttattgattaaatgtacgttggaaataattcatatagtgtgtactcacaggtaaagtaaagcctttggcattgccacacgtgaggaaaatacgacatcgccaatctaaggcttgaacacatgcacgctgttttccaaatggcacaaacacctttgtagatcacttcttccatgaaataaagcaaattggtcaggtttcaatctttgaactcatgaatttatacccagctgaaagtacaggcatcttaagaatgtcttggttctttctgttgtttttgaatctgatagctgaagttcaaaactgaagctttctcaatgtgaaggtctataaactttggtttcttctcccatcctccagcaaaaaatgaaaggaatccatataattggcattcaaataattgtcatctctgataaaactataaataaatacacactcttggagtcctcctttagggtttaccatcaaaaccatctaacgttgctgtatcaagtgtgcagatacttacaaatatatggcattagttaacaaaacagtttgaaagatattggatgaggaaattttactttggatacagtactttgcagtgcagataaaaacatttaagcaggtaaattatcaaaggtagagaatatcactttgtataaaggcagatcatttaaatatttttctatttgtaggtggaccatatgcatttatggtaaggatgtgtctttctttcttactgtttccctatggaacccagaagcaggcccaaggaaaaagagcaggaagcactgaagcagcaaccacctgtgtggtgcccacactcaatctgcacagaatggggccctggatgacacggaagcaattggttaagaagctgactgagtttttttgtgtttttttttttttgttcttttgagacagtctagctctgttgcccgggctgcattgcagtggcgtgatctcggctcactgccacctccacctcccgggttcaagcgattctcctgcctcagcctcccaagtagctgggattacaggcacccaccaccacgcccagctaatttttgtatttttagtacagacggggtttcaccatgttggccagactggtctcaaactcctgacctcgtgatccacctgcctcggcctcccaaagtgctgggattacaagcatgagccaccatgcccggccagctgactggttttttatttcactaaactaactctagtacattttggtctcatatagagagagcttgagttttttttaaccctatttctgtatataccagtactttttaagggtagaaatgcagttcttctcaatgtcatgattgtgtgtatatttaattatcacaattacaggagaatcagagccccatgttttttacttgccactcttttacaggagctgaggtgagagactcaagtgcaaatagagacacagagagataagaaagaagacttgatgcattatataaaccccatctttccaactcctgtgacagacgttggtggctcccctgaaatatgggcaatctcatttcttgaagaatttcaaaacacgcttttggtgtgatatatatgaaaacaatttaaacagccaggcctctccttggtaaactaggcagttgtgttttgcaaagaagggctagaccgtttccttgaacacctgactataggccacatgattgtctgtggccagggcgttctttagacactgccagaagtatgggtgagcttgcgggtttgttggccactcaaggacagaactcccacagagccttttccggagctggaggaacttggacttctgaaagggcttctcaagaaatatcaagataatcacatcaactttttcatccatgagcctctgatgggacaagtaaaatgctatcttaaaattttcagtctttgcatacttgtctgtcatcacaaacactgtctttttgctaagctgtatgctctgggaaaggttttccagaactggctgccctggtaaccagtccctttcctcgagacataaattaaaatgtttctctcttgggtcttccagtttggccaccagctcagccaaaacccactcggtcacagctgggtctttagtgtcatacacaataaaagcatcatagcaacagtctggtgatattagacgctgatacccctttatcttggccttacagaaatggtaaatataccacacatcccagaaatagaggtgacttgctgtcatcatcaccatgagaaagagagatacagatatggaaagtgagaacagaatcaggttagtcagatctaactcacaggtgtacagatccagggagatcacactttggcccttgtgtgctcctggccccacacaagtcacatctgtggccaggtaaggaatagtcacctccgtatggttaacccaccagacaaaccacacagcatcacaggtgcacagaaaccgattatgatgcaaaagcaacatcttcagattgttgaggacattttctgggaagctggtcttttggatcatctggattttatttgagctgagatccagatatcgcaactggaaggcatcttgtagaaaatacttcgtcagactcctgatttgattattcttaagaatcagattcttgaggcttctggaacagttggataatctctcagggacagtggtcagttggttgtggctgaggtccaaagtttccaggttctttagacactggagtttcttccaactgaaagatttgagcccatttttggccaaagagagattctttagatttggaggcataccatcaaaaactccagaaggcaagaaacttagggaatttttagagatgtctaattcctctaattttagcagattcttgaataattgtaagtatctgttatcaccttctctccataaaacatctaagtgatttcctctgaattccagagttctaagagactcactctccatggtcctgctggtggaggaagagatgtcattgtcgttcatcatcagtttctgcagaacctttaggttcttggtaaagtttagcatatgagtaattccttctgattgaaaataatggctattactgcttatatccagaacttccagtttgtgaagctcttcaaatgctgttgaatggagtaaatcaagccggttgttggagaagtccaaatatctcagctctgctaaaggttggaattcactgccattaagagtttggctaatgagatttcctgacagattcaggcatttgaggaaagaaagatgctgaaaatcagaggacttgacaaaaaatatactatttttacttagatccaaggtctgcccatacttgtagcagctttcattaacagacatgaaagaagcctctttgtttttgaatctgcaactccttgcatacttatcatatctgaaataatgtaattgttccaggacctggggttcataactttctacagaagttctggcatttgagcagaagccaacttcacttgaatctcctgaaggtgatattttattcactgaaagatctatgactttcagtcttttaaattgtttaaacatgctgaggttagcaatttttataaagttagtgccaagatcaagaacttcaagattttgaagattatgtaatggcgagaggttaaagcttttcaactctttaaagacatatcctctgatccgcagaattttcaggcttttcagtgaagaaaatgcttgtgatagattcatagatgcacgatagacctgaagttcaaaattgaaagacagatccaattggatgaggctggggagaaaatgcagaaatttagcatccccaatttctttggccaagaagttttgggacagatccagttcctggagtttgttgatgttcttaaaccatcttgggggcacatgctgaagagagttactgtgtagacgtaaaacttttaattctgtcagcgcatcaaaagcatttacagggatctgtaggggagaattatttttacacggcgcacaaggaaatggggcattataacaacgagggcaatttccacttaggtcaagaatttgtaattggttgaggttattaaaatcatcttcttggatttttgcaatcatgttgttgtagagatatagttctgttaaagtagatggcaaaacagtagggacggctgtgacattgttatctttcagggagagcacttttaactttgtcaagtttaggaaggcatctttctctattgaatatgaaacataacaaggatttcgataataacagttttggcccaggtagagtatttctatgttggccagttctgttagattctcttttctgatggaaaagatgttgttggcctcaaggctgagaagctgtaagctaggcgggaggccctgcggtatctctagtagctggtttccatccaggtaaagggattttaaataagtgagtccactaaagcttctgggtttaatctgcagcctcttgatgcacatgttgttttttgaccccagtggaataggtacacagttgcatctgaaatcgatctctaccagatggtccagtctgtgaaaggacgctggggagatgtctggtatgtggttaatggtgagggtgaggttcgtggtgttcgtgggaatacctccaggaatttctgtcaaatgcttgtctgtgcagtccacgatcacatggttctttggaacatccagagtgacatcacagggcagagttttaggaaaccatctagccccaaggagtttggaaattaggattatgttaaaaaggataagaattagtctcttcagtgtccacat

SEQ ID NO: 1452 - DNA, 4841 bp, Homo sapiens
atgtggacactgaagagacaaattcttatcctttttaacataatcctaatttccaaactccttggggctagatggtttcctaaaactctgccctgtgatgtcactctggatgttccaaagaaccatgtgatcgtggactgcacagacaagcatttgacagaaattcctggaggtattcccacgaacaccacgaacctcaccctcaccattaaccacataccagacatctccccagcgtcctttcacagactggaccatctggtagagatcgatttcagatgcaactgtgtacctattccactggggtcaaaaaacaacatgtgcatcaagaggctgcagattaaacccagaagctttagtggactcacttatttaaaatccctttacctggatggaaaccagctactagagataccgcagggcctcccgcctagcttacagcttctcagccttgaggccaacaacatcttttccatcagaaaagagaatctaacagaactggccaacatagaaatactctacctgggccaaaactgttattatcgaaatccttgttatgtttcatattcaatagagaaagatgccttcctaaacttgacaaagttaaaagtgctctccctgaaagataacaatgtcacagccgtccctactgttttgccatctactttaacagaactatatctctacaacaacatgattgcaaaaatccaagaagatgattttaataacctcaaccaattacaaattcttgacctaagtggaaattgccctcgttgttataatgccccatttccttgtgcgccgtgtaaaaataattctcccctacagatccctgtaaatgcttttgatgcgctgacagaattaaaagttttacgtctacacagtaactctcttcagcatgtgcccccaagatggtttaagaacatcaacaaactccaggaactggatctgtcccaaaacttcttggccaaagaaattggggatgctaaatttctgcattttctccccagcctcatccaattggatctgtctttcaattttgaacttcaggtctatcgtgcatctatgaatctatcacaagcattttcttcactgaaaagcctgaaaattctgcggatcagaggatatgtctttaaagagttgaaaagctttaacctctcgccattacataatcttcaaaatcttgaagttcttgatcttggcactaactttataaaaattgctaacctcagcatgtttaaacaatttaaaagactgaaagtcatagatctttcagtgaataaaatatcaccttcaggagattcaagtgaagttggcttctgctcaaatgccagaacttctgtagaaagttatgaaccccaggtcctggaacaattacattatttcagatatgataagtatgcaaggagttgcagattcaaaaacaaagaggcttctttcatgtctgttaatgaaagctgctacaagtatgggcagaccttggatctaagtaaaaatagtatattttttgtcaagtcctctgattttcagcatctttctttcctcaaatgcctgaatctgtcaggaaatctcattagccaaactcttaatggcagtgaattccaacctttagcagagctgagatatttggacttctccaacaaccggcttgatttactccattcaacagcatttgaagagcttcacaaactggaagttctggatataagcagtaatagccattattttcaatcagaaggaattactcatatgctaaactttaccaagaacctaaaggttctgcagaaactgatgatgaacgacaatgacatctcttcctccaccagcaggaccatggagagtgagtctcttagaactctggaattcagaggaaatcacttagatgttttatggagagaaggtgataacagatacttacaattattcaagaatctgctaaaattagaggaattagacatctctaaaaattccctaagtttcttgccttctggagtttttgatggtatgcctccaaatctaaagaatctctctttggccaaaaatgggctcaaatctttcagttggaagaaactccagtgtctaaagaacctggaaactttggacctcagccacaaccaactgaccactgtccctgagagattatccaactgttccagaagcctcaagaatctgattcttaagaataatcaaatcaggagtctgacgaagtattttctacaagatgccttccagttgcgatatctggatctcagctcaaataaaatccagatgatccaaaagaccagcttcccagaaaatgtcctcaacaatctgaagatgttgcttttgcatcataatcggtttctgtgcacctgtgatgctgtgtggtttgtctggtgggttaaccatacggaggtgactattccttacctggccacagatgtgacttgtgtggggccaggagcacacaagggccaaagtgtgatctccctggatctgtacacctgtgagttagatctgactaacctgattctgttctcactttccatatctgtatctctctttctcatggtgatgatgacagcaagtcacctctatttctgggatgtgtggtatatttaccatttctgtaaggccaagataaaggggtatcagcgtctaatatcaccagactgttgctatgatgcttttattgtgtatgacactaaagacccagctgtgaccgagtgggttttggctgagctggtggccaaactggaagacccaagagagaaacattttaatttatgtctcgaggaaagggactggttaccagggcagccagttctggaaaacctttcccagagcatacagcttagcaaaaagacagtgtttgtgatgacagacaagtatgcaaagactgaaaattttaagatagcattttacttgtcccatcagaggctcatggatgaaaaagttgatgtgattatcttgatatttcttgagaagccctttcagaagtccaagttcctccagctccggaaaaggctctgtgggagttctgtccttgagtggccaacaaacccgcaagctcacccatacttctggcagtgtctaaagaacgccctggccacagacaatcatgtggcctatagtcaggtgttcaaggaaacggtctagcccttctttgcaaaacacaactgcctagtttaccaaggagaggcctggctgtttaaattgttttcatatatatcacaccaaaagcgtgttttgaaattcttcaagaaatgagattgcccatatttcaggggagccaccaacgtctgtcacaggagttggaaagatggggtttatataatgcatcaagtcttctttcttatctctctgtgtctctatttgcacttgagtctctcacctcagctcctgtaaaagagtggcaagtaaaaaacatggggctctgattctcctgtaattgtgataattaaatatacacacaatcatgacattgagaagaactgcatttctacccttaaaaagtactggtatatacagaaatagggttaaaaaaaactcaagctctctctatatgagaccaaaatgtactagagttagtttagtgaaataaaaaaccagtcagctggccgggcatggtggctcatgcttgtaatcccagcactttgggaggccgaggcaggtggatcacgaggtcaggagtttgagaccagtctggccaacatggtgaaaccccgtctgtactaaaaatacaaaaattagctgggcgtggtggtgggtgcctgtaatcccagctacttgggaggctgaggcaggagaatcgcttgaacccgggaggtggaggtggcagtgagccgagatcacgccactgcaatgcagcccgggcaacagagctagactgtctcaaaagaacaaaaaaaaaaaaacacaaaaaaactcagtcagcttcttaaccaattgcttccgtgtcatccagggccccattctgtgcagattgagtgtgggcaccacacaggtggttgctgcttcagtgcttcctgctctttttccttgggcctgcttctgggttccatagggaaacagtaagaaagaaagacacatccttaccataaatgcatatggtccacctacaaatagaaaaatatttaaatgatctgcctttatacaaagtgatattctctacctttgataatttacctgcttaaatgtttttatctgcactgcaaagtactgtatccaaagtaaaatttcctcatccaatatctttcaaactgttttgttaactaatgccatatatttgtaagtatctgcacacttgatacagcaacgttagatggttttgatggtaaaccctaaaggaggactccaagagtgtgtatttatttatagttttatcagagatgacaattatttgaatgccaattatatggattcctttcattttttgctggaggatgggagaagaaaccaaagtttatagaccttcacattgagaaagcttcagttttgaacttcagctatcagattcaaaaacaacagaaagaaccaagacattcttaagatgcctgtactttcagctgggtataaattcatgagttcaaagattgaaacctgaccaatttgctttatttcatggaagaagtgatctacaaaggtgtttgtgccatttggaaaacagcgtgcatgtgttcaagccttagattggcgatgtcgtattttcctcacgtgtggcaatgccaaaggctttactttacctgtgagtacacactatatgaattatttccaacgtacatttaatcaataagggtcacaaattcccaaatcaatctctggaataaatagagaggtaattaaattgctggagccaacta

SEQ ID NO: 1453 - DNA, 307 bp, Homo sapiens
gaaacctatgtctctctcacacacatgtcccccacctgcttcagtgagcatgatcttctaaaattggctccatggaatcttccctaggtgacactggctggactctgacacattcaaattcattctttctacttatctcaactttcaagcactaattcagtctttaagattcccctaatctcaggttgtaattcatttctaacatgtttgtcatgacatcagtggttgcatgtcttcatatgtttatcactgccccctcttgggaatttatattaattaaacattttggaaaagctcagacttaaaa

SEQ ID NO: 1454 - DNA, 8798 bp, Homo sapiens
  SITE (7875): n equals a,t,g, or c
  SITE (7885): n equals a,t,g, or c
  SITE (7925): n equals a,t,g, or c
  SITE (8291): n equals a,t,g, or c
  SITE (8295): n equals a,t,g, or c
  SITE (8395): n equals a,t,g, or c
  SITE (8397): n equals a,t,g, or c
gcaggccgtggtgcggccccttggagcgccggaagcccgcagtgccggaggcccgcagcgccggaacctcagaggcgggtcgcagcggcgcagaggaggtcagctgcgggagcgtttccggggacggtgccgccatgagattgaccccgcgcgcgctgtgcagcgccgcccaggccgcctggcgggagaacttccccctgtgcggtcgcgacgtggcgcgctggttcccgggccacatggccaagggtgaggcacggcggggaggggcaaggtcatgcctacggccgcggcgcctctgcttccctcccaccccggtttcggccgtcgcctgcttctcccggtcgtcctgggctggccccgcccctcctcccttgtctcccctccttccccgctctcacccgctcccggagccgccgggaccccttcccctgcgcagctgcgggagaggcccgttcccgcgagtgcccccgcggcgcagcctcggacccagggcctgcttgacctcctacctctggcccgccgcccctgtcctctgttcccagcaagttccttctgcccttttaatcccccgaagcctccgtttccacatgttcttgacaagatagacttttctgagtcttttggggactaaatgaaacagtgggtatgaaggcacctgttcagttttaactggtatcttgagtcgttctcctgcttaacgtctttggtaattcttactgtttgtcacaattcggccccaagaagacctctggggccagcccagcccgtctaggtgttgtgatggccactcctgcgtcggctccgcgtgtactgggggccgagggggaagaagggcccgtgtgggtgactgaggctgtgtcctcggtcttcggataacactggaggggaagaaagctggaagctttgttatcttggttgtgtgtggtattcctggttaggggactatcgtcatcatccccgcgaggtagcaggggcctaatgagccagtgttactctgtgttatagcccagattaagacccgtggaagggcccggccgttggctcacgcttgtaatcccagtactttgggaggccgaggtgggcagatcacgaggtcaggacatcgagactatcctggccagcatggtgaaaccgtgtctctactaaaaatacaaaaaattagcccggcatggtggcgcgtccctgtagtcccagctactcgggaggctgaggcaggagaattgcttgaacctggcaggcggaggttgcagtgagccgagatcgtgccactgcactccagcctgggtgacagagcaagactccgtctcagaaaacaaaaaagcgacccatgcacgttaaatattccacccagagtcagccatgagtcaggtggtgaagaccgcatctggcttttgacacatggcccaccctgtggcagggtgcctcccagtctcccactccgagggtgcggaccttggaggaggcgctcagcggatgttatctgttaccattacttagtacgcttccctcagatgtagtctttttaggttatttatggtggcgtgtcattctggacggttcagcttgaatcgatcactctagaaaggttgtgagccccttcgctgaggcgtccttctgttttccagggctgaagaagatgcagagcagcctgaagctggtggactgtatcatcgaggtccacgatgcccggatatcctttcacagagcaggggaggcccctctgcctgaagtcatattacacattagaattacctggggaggcttttaaaaatatgaattgcgaggcccctttctagaccagttaatcagaatctgtgatgtggggtccagactgcgtgtctttgaaacttcattgttaatacatatatctgcgtcactcaagcctgacggtacggtgcagcagtggaatcctctagatgggctatgaaactgtttaaatgttcctgccaactggggcttttctcctgtacttgaggaatgaattggcaggatgtgatgattcgttcactgatggcaagaaaaaaagttggttggctggtaaagctttggaggaatttttaccttaattttgccacatcccactttcaggccgcaaccctctgtttcaggaaacccttggcttaagcctcacttgctggtcctcaacaagatggacttggcggatcttacagagcagcaggtaaaggcctttctctcagacgccttcagcagtgtggctgtgttttcccgaggtcgcttgttctaacggaagagttgccggacgcacacttgtcagtttgcccaggcaggctctgctttagaaacagccctttgctttgcagaagcgtgccagcatcgtttctcatatggcgtgcccccatctaatgtgtggttcgtgacctggacacccagggagtgcacgtctcctgtgggaagtggccaggttgtgctgccagagcccgagtggtcagtgagtgcgcattgtgggcagaaagccacccaggtgccgaggcaagagaccgaggacacgagcttttccagtgtaataaaacatatgaaataagaatagttatactagatataggtcatagatatgattgtatatgaatattactaatcattagtttgtagcaattactcttcattccaatattattataattcttgctctataatcataacctaggaagaaccaggccatacagagataggagctgaggggacatagtgagacgtgacaagtgtgtgagccttctgttatgcccagacagggccaccagaggactccttggtctagcggtaacgccagtgtctgggaagacgcccgttgccaagccgactgtggtctagcggtagcgtcagtgtcaaggaaaagcacccgctacttagcagaccgggaaagggagtctccctttccccaggggagtttagagaagactctactcctccacctcttgtggaggacctgacatcagtcaggcctgcccgcagttatccggaggcttaactgtctccctgtgatgctgtgcttcagtggtcacgctcctagtccgccttgatgttccatcttgtacacctggctctgtcttttagatagcagtagcaaaattagtgaaagtaccgaaagtctctgataagcagaaataatggcgtaagctgtctctctttctccctctctctctgccttggctgccaggcagggaagggccccttgtccagcggacacatgacccacgtgaccttacctgtcattggagatggctcacactccttaccctgccccttttgctttgtatccaataaatattagtgcagccagacatttggggccactaccggtctctgcatcttggtggtagtggtcccccaggcacagctgtcttttcttttatctctttgtcttgtgtcttattttctttttttttttttgaggcagagtcttgctctgtcgcccagggctggagtgcagtggcgcaatcttgactcactgcaagctctgcctcccgggttcacgccattctcctgcctcagcctcctgagcagccgggactacaggcgcccgccaccatgcccggctaattttttgtatctttagtagagacggggtttcactgtgttagccaggatggtctcaatctcctgacctcatgatccgcccgcctcggcctcccaaagtgctggtattacaggcgtgagtcactgcgtccagcctgttttttttttttttttaaatcatcgcaagtgttttcactagttggtacttttacgtcatatcagtggcaactcctgcctttgaaaatgtgactttttgtagactggtgggtggccgtctagtatagggcacagcagtgtctgacctggtcagagaaaggccagtgcttctgaagaatcgggagagaggtagacttgcccctgggtgccctgccttctgcctccctgagcagggacacccaagtacatttactacccagagtgtgtggcttcaggtgtgtgtcttatgtttgatctctccatccgtgtcatcttcgtggacagctaaataaaaccagctgaatcagtgaaggacttgttgatttaaacatcagtcatactttaggtcagatgattaacagcactgatgtttagaaatatgatactgctttgcactagtttcactgcatgttaaggccagtgaattcaaaaattatctgggcgtggtggcgcatgcctgtaatccctgctacttgggaggctgaggcatgagaatcgcttgaaccagggaggcggaggttgcagggagccgagattgtgctactgcactccagcctgggtgacagagccgagactccagtaaaaaaagtaacatagaaatgttttgtgtctttcagaaaattatgcaacacttagaaggagaaggcctaaaaaatgtcatttttaccaactgtgtaaaggatgaaaatgtcaagcaggtaggcttttcgtctgtgctctctctgacgcttctgcttcagtaggttcgaggagcattataaactgttttatgctttagtaagaagcagagctttggaaaagatcctaggtgttggtttccagctgccacacacggatgcgatctcctggggcaagtgggtctccctgtactgagggcacaaggtcaggctgtagacgcattcccagggttgtaggtggtcagagtcttttggagactcaggtagctcatgtttccagttgtatgtggtagaattttctggcttgatgtgtttcttcattaaaaggtagttacagctgtcactgaagccccgggtctgccctgcttgtttttgatgggaggggacgggcataggtggtccccggccccagagctcagtctgacatctgtgacctggacagaactccagtttcccaacaccggatacttggtgtgctacctccagatgaagggtgacgcccagtttgcctatgaaatgttgggtagaattccagataggaggtttctgttttcctaacggatatgtgaaagtggagacactggaatccctaatcctgttctgaggtggcagaaggagcgggtcagtgcacagacgtccgacctggggtggctccatgagtgggtgtttgttgcagatcatcccgatggtcactgaactgattgggagaagccaccgctaccaccgaaaagaggttggttggtggggcccagagctgggagtgggaggcgggcgtgggatgggccagcccctcctgcctggcctctccaaggagaaggcgcagcgccccaggcagggaggcccctcctttgtcctctcattctcttcagtggaaagggccgaggccgtccccgctgggtgggcagagcctcggcgttaacctcccttcttccctgagctgacctggcctggggtccccttgcctgggtggggttgcagagtctcaggctctagcggccacggtgggccctgtgacccctctctctgcctgcgcagaacctggagtactgtatcatggtcattggggtccccaacgtgggcaagtcctccctcatcaactccctccggaggcagcacctcaggaaaggtactggcgcgtgcggctgatcacctcaggaaaggtactggcgcgtgtggctgatgtgctgatgccaccatctttcttggaggggacgtgcccgaggagcactgccagtcttctgctgaccccgcagccccagagcacaccttgtctcgttcagtccagttcacaggagggctgaacagtgggaccaggtcgttctgtgaatttcacacttaatttttctctcttttaaaatctttaacatgaagatggcttttctaaactttgatatttgttcatttatttaaatccctttggccgggtgcatggctcacgcctgtaatcccagcactttgagaggccgagacgggcggatcatgaggtcaggagattgagaccattcttgctgaaacggtgaaaccccgtctctactaaaaatacgaaaaattaggtgggtgtggtggcgggcacctgtagtcccagccacttaggaggctgaggcaggagaatggcgtgaacccgggaggcggagcttgcagtgagttgagattgtgccactgcgttccagcctgggcgacagagcgagactccgtctcaaaaaaaaaaagaaaagaaaagaaaaaaaatccctttgatccagagaatacaaagcgtgtgaagtagacggggctggattatcaggcagggaggctgcaaggccattcctccatggcgtccgccttgcctttgctggagggttcctggactccggagtcgcaggcgctcctctcctccctctgtgcctgttctcagactctgattcaaagcaggagccccgagcacccttcactgccccgtgggctcttttccttaagtattttcaagtttaattcaagtccttgttggcttcatttttcatattaataaggcatttattaacaaacccattcatgatgtgcaaatctgaaggctttaaactacggtgaactgttattttacagagagggtgtttttggtgctaattggagcattgttacagtcatttattcttttaagtttatttttaagcgtattattttttatcagtggtattaagtgcatttatagggttatgcagccagcaccactattttcaaatattttggttacctgaaaatgaaactctgtaaatacaaagagtcactcccccagcctcctacacccctcgttccactttctgtctgtgaattcgatgactgtaactgcctcctccaagtggactcacagtacttggccttttgtgactggctgatgtcaccgatcgtgatgtcctcaaggttcgtctgtgttgtcctgagtgtcagaattttattcctttttaaggctgatcaccccgttgtgtgtacagaccacatcctgtcttgtccattcatctggatggacacttgtgttttttattcttgggttgtttgtccacagtggagtggcctccttgggacacaccctgagctgggtcctagagcagccagtcgcctgtggacagtgctgtgggaggcaggctgaccttggggtgcaggggtgggtccaggagggaggtgggggactgcgtggaaggagcagctcaggtctgacctccgcagtctgacagtgcctttccagtcctggggagttaggttctggtgcatttgttgaagaatctcagtctctgtgtggcttggaaagtgcccttgctgtgagctggtttgtgactgaaagtgaaacaaattatagccttgggaagctcatctggcttttagtttccattttggccagatatgtttgttacatagtctccctgcttggctggtaagttgtgtttgttacatagtctccctgcttggctggtcagatgtgtttgttacatacgtctccctacttgttctgcagcttctgtgtttagtatacatttgagcctccttttctccttttcctacagggaaagcaccagggtgggtggcgagcctgggatcaccagagctgtgatgtccaaaattcaggtggagtcctcagggccaggcccagcactctgtcaagagctctgcaggcgtctggcacctgccgacctctgtgtggcttccggctgctgaccacgcttccctcccctccactcagtgtccccgctgagcacccgcggcagcactgcccctgcccttattccacagtcgtcatagtctttgcgccaaacctttggggaaggcacgctgttttccccatttccagatgaggaggccactgtccagggccatgcagtggtcaggacagacctgagtgtgcgccccccgccccaccctccactcccttccttgtgttctccttgggagcagaagacaagctgttgggacctgacgcttttatttattctccaaattnagtgggaatnagaatcctctggggaaccctggagcttggtgagagtgacnctgccatggggttgggtccctgaggccttcctcggagcattgggtgccaggggctgcccaggcttcctgagtggccacctgggtgggaggctgccaccgcggcctgatcatgccctctgtgcccacacaggtctctgagcggcccctgatgttcctgttggacactcctggcgtgctggctcctcggattgaaagtgtggagacaggcctgaagctggccctgtgtggtgagccggggctgggctggggctggggctgggaccggggcccctgccaccccacctttagggctggctttggcacagggcccctagacgggagttgttactgcctttgacctggttgctgccagaccttcctcgaagnttantgtgagagctgtaatcagtgcacagctgacaggcactggtcaccattccaccctgccccatgagtggccttccctttccccatttgacggaccagggcananaggttggtcgtcaggtgccaggcaggagtgggggccgggaccacagccgagtgccgtcctcttggttagtgtctttgtcagtggctggcctcttcctcacggcacggtgtctttgggctaggactggaagggatgtgtttgaacttggcaggaacatagatgtggctgtttccagtgctcacctcggctgctgcttccacaggaacggtgctggaccacctggtcggggaggagaccatggctgactacctgctgtacaccctcaacaaacaccagcgctttgggtgagtgcagtgaatgcagggcagctggggcccctcctcctagtcacctcatttaaaaaaaaaaaacaaacaaaaaaacccccagcattataaaggtattataaacacggtaacctg

SEQ ID NO: 1455 - DNA, 8798 bp, Homo sapiens; identical to SEQ ID NO: 1454
  SITE (7875): n equals a,t,g, or c
  SITE (7885): n equals a,t,g, or c
  SITE (7925): n equals a,t,g, or c
  SITE (8291): n equals a,t,g, or c
  SITE (8295): n equals a,t,g, or c
  SITE (8395): n equals a,t,g, or c
  SITE (8397): n equals a,t,g, or c

SEQ ID NO: 1456 - DNA, 2213 bp, Homo sapiens
gaattcttgaagacgaaagggcctcgtgatacgcctatttttataggttaatgtcatgataataatggtttcttagacgtcaggtggcacttttcggggaaatgtgcgcggaacccctatttgtttatttttctaaatacattcaaatatgtatccgctcatgagacaataaccctgataaatgcttcaataatattgaaaaaggaagagtatgagtattcaacatttccgtgtcgcccttattcccttttttgcggcattttgccttcctgtttttgctcacccagaaacgctggtgaaagtaaaagatgctgaagatcagttgggtgcacgagtgggttacatcgaactggatctcaacagcggtaagatccttgagagttttcgccccgaagaacgttttccaatgatgagcacttttaaagttctgctatgtggcgcggtattatcccgtgttgacgccgggcaagagcaactcggtcgccgcatacactattctcagaatgacttggttgagtactcaccagtcacagaaaagcatcttacggatggcatgacagtaagagaattatgcagtgctgccataaccatgagtgataacactgcggccaacttacttctgacaacgatcggaggaccgaaggagctaaccgcttttttgcacaacatgggggatcatgtaactcgccttgatcgttgggaaccggagctgaatgaagccataccaaacgacgagcgtgacaccacgatgcctgcagcaatggcaacaacgttgcgcaaactattaactggcgaactacttactctagcttcccggcaacaattaatagactggatggaggcggataaagttgcaggaccacttctgcgctcggcccttccggctggctggtttattgctgataaatctggagccggtgagcgtgggtctcgcggtatcattgcagcactggggccagatggtaagccctcccgtatcgtagttatctacacgacggggagtcaggcaactatggatgaacgaaatagacagatcgctgagataggtgcctcactgattaagcattggtaactgtcagaccaagtttactcatatatactttagattgatttaaaacttcatttttaatttaaaaggatctaggtgaagatcctttttgataatctcatgaccaaaatcccttaacgtgagttttcgttccactgagcgtcagaccccgtagaaaagatcaaaggatcttcttgagatcctttttttctgcgcgtaatctgctgcttgcaaacaaaaaacccaccgctaccagcggtggtttgtttgccggatcaagagctaccaactctttttccgaaggtaactggcttcagcagagcgcagataccaaatactgtccttctagtgtagccgtagttaggccaccacttcaagaactctgtagcaccgcctacatacctcgctctgctaatcctgttaccagtggctgctgccagtggcgataagtcgtgtcttaccgggttggactcaagacgatagttaccggataaggcgcagcggtcgggctgaacggggggttcgtgcacacagcccagcttggagcgaacgacctacaccgaactgagatacctacagcgtgagctatgagaaagcgccacgcttcccgaagggagaaaggcggacaggtatccggtaagcggcagggtcggaacaggagagcgcacgagggagcttccagggggaaacgcctggtatctttatagtcctgtcgggtttcgccacctctgacttgagcgtcgatttttgtgatgctcgtcaggggggcggagcctatggaaaaacgccagcaacgcggcctttttacggttcctggccttttgctggccttttgctcacatgttctttcctgcgttatcccctgattctgtggataaccgtattaccgcctttgagtgagctgataccgctcgccgcagccgaacgaccgagcgcagcgagtcagtgagcgaggaagcggaagagcgctgacttccgcgtttccagactttacgaaacacggaaaccgaagaccattcatgttgttgctcaggtcgcagacgttttgcagcagcagtcgcttcacgttcgctcgcgtatcggtgattcattctgctaaccagtaaggcaaccccgccagcctagccgggtcctcaacgacaggagcacgatcatgcgcacccgt

SEQ ID NO: 1457 - DNA, 18449 bp, Homo sapiens
actactgtctttcgaggagagccagagaattaagaagctccatgaagaaaacaaacagttcttgtgtataccgaggaggtgagctgaagaagaatttagaatgccacaaaacatccgaggctgctgagtattcattttttaaattgcttctttttctcagctgccattattagatccaaattacctattttattttggttacttatatgaggaatttttttccttctatgattgtttcagaccaaactggaaccaaaatactaccccagaagaactcaaacaagcagagaaagataactttctagaatggagacgtcagcttgtccggtgagtattatagactctatgaagacttactttgaaatcctgagttcagatatttggcatgcttacacagccatttgtgttttgaagttttgattcttttaagaaggaaatggtagcattctgctaacaagtgcaaatagatgtatgcacaaacaagattgctaggtgcaaatgcatccttgcacagagatcgtgagttggttactctgctcagttccgggccttttcctttcattcccttctttggccattgggcatcctggagttgatcgctgctctcctgcacatttttccagtaagagtgtgggaaagaaatgactttgtgtgataggtaaacttccagggcataaatagcttcaggataaaatttgaatttggtggagtattgtctaaataaatagtatttttatggtgtctcagcaggaaatatataaaataatttgactctggatatttgtgcccagtacttatttttaatgtaataaatttgagcatttacactgctaaaaattgtctattataatctggcaaatatataaacttctcattcaaaaactaggctagaagaggaacagaagctgatattgactccatttgaacgaaatttggacttttggcgccagctctggagagtcattgagagaaggtgaattatcattttcttttgtgtaataaagacattgtagtgaagttatattcgatttggctgttgatataggcttataggctcagggtatgggaattaagctatgcagagggttactgagaattataaaaacacagcatgatactaccgtatattttgtatagtttttttgttgttagatgaatatgttgataagtgtgtgagaataatgaacattttctgcaaggtgaattctgaagcacctatatagatattttagcaaatgtatatttggtttctactggtaatgtggaaaatatggatacgaaaaagagttaagttcctgcctgcaaagagcatctatgttatggggagaggcgaatgtcagagctcctgtcagccgagttacaccatgttcagctaaatgctaagcaaagcaccaggcaccagggacacacagatgaatgacatgcaattcttgcactcagaaaacttaatacgtagtgaaatacagagggcagtatgattcctgctttgctgcagatagaaaggcagtgggctgagtcatagcagaggaaggagtggttgataagtattgaggaaatcacggggtggtttttatgttttttatttatttatttatttatttatttatttgagacggagttttgctcttattgcccaggctggagtgcaatggcacgatctcagctcaccacaacctccgcctcctgggttcaagcagtgctcccgcctcagcctcccaagtggctgagattacaggcgcacaccaccacgcccagctaatttttttttttgtatttttagtagagacagggtttcaccatgttggtcaggctggtctcgaactcctgacctcgtgatccacccgcctcagcctcccaaagtgctaggattacaggcatgagccaccatgcccggcctggtttttattttttttaactgggctctgaaaagaagagaatgattttgacaaattgagaatgggagatctttattctttttcatgtaatgctaaggagaattcctgattgttagaagttgatgaacacctgtctctaatctcacctctttggtatagttaaaaggtttctgttttcctcaaagagtttctgaattactttcaaggatgccataaatgaaccttatatttgaaatgttttcaacaaggacccttcaggctggttttttttcctttgaaatctataaagtgaacctagtaagaacactaggaaacagaatgctttaattgggattctcagaaaagaatcttatcacatttagcattgttattaagaaaacagggcccagcgcggtggctcacacctgtgatcccagcactttaggaggtccaggcaggtggatcacttgaagtcagcagttcgataccagcctgaggaacgtggtgaaaccctgtccctactaaaaatacaaaaatagccaggcttggctactacttgggaagctgaggcaggagaatcacttgaatccaggaggtggaggttgcagtgagccgagatcgcaccactgcactccagcctgggtgacagagcaagactctgtctccaaaaaaaagaaaacagtacttggactaaacttgtaaaagtcacttacatttcctattagggtgatgacaaagtcacttgaatgcccccatcctcagctctctacgggtacagaaagggctcttgggctgggatgcggggaggtcagagaagcaaggcaaatctctaaggcagaagaagggaaaggctttctctgaggcagaagaagggaaaggctttctctgaggcggaagaagggaaaggctttctctgaggcggaagaagggaaaggctttctctgaggcggaagaagggaaaggctttctctgaggcggaagaagggaaaggctttctctgaggcggaagaagggaaaggctttctctgaggcggaagaagggaaaggctttctctgaggcggaagaagggaaaggctttctctgaggcggaagaagggaaaggctttctctgaggcggaagaagggaaaggctttctctgaggcggaagaagggaaaggctttctctgaggcggaagaagggaaaggctttctctgaggcggaagaagggaaaggctttctctgaggcggaagaagggaaaggctttctctgaggcggaagaagggaaaggctttctctgaggcggaagaagggaaagggtttctgctgatttggggtccatgcaggctccttttactcaagcttgaggagggcttcggaaggcccacagtcattctcctggggaactggggaactgctgtggagcagagtagcctcttcgttggtgcctccttggtagttgatgctgtgtactcctgagaatgcccgttttctaatttccgaagagaaatggtaacaagtgcagaagtactgcagcccggaccttgaggacagcaccctccatcttcacacttaattacagtttttgttttgttttcagattttgtcctacttcctatattatctgtctttcctctttgttccttttctttttctcctggtttctgacttttacggaagaggccttcctcaggtgtctagtggtgtttatctgtctttaagaacaaagcattacaaagccggttgacaagcctgcctgtttaggtggaatttgccaactggtgagcttcactgtagggtgcctgggcaggggtcagttttattttgttggaataccccaagatgttaagatctgtaggtcttttccccagagccagtcagttttgtgtgtgtgtggttttgttttgttttttgagacggactttcgctcttgttacccaggctggagtgcagtggcgtgatctcggctcactgcaatctccacctcctgggttcaagcgattttcctgcctcagcctcccgagtagctgggattacaggcacgcgccaccacgcccggctaattttgtatttttagtagagacggggtttctccatgttggccaggctggtctcgaactcctgacctcaggtgatccacccacttcagcctcccaaagtgctggggttacaggcatgagccactgtgcccagtgccagtcagtttttaaaaagaagaatgatctcctgccaggaaaggggcaggaggtggtataatacaagggtgctgggcaccttcacagttcagtatcttcataggcttatgctgaattcccctttttgccctatggcaactctttcccattttccctgtgcctgaggtcccagtcctggaacttgtcaagttcattttctccataataaaccctagccttctgctattggggtggggaatgggggctgtgtggtgggttgcagttgcctcactgaatggaacagggtagccgacctatgagctcactgttcagatggattacgggcgcgggcctcgttcttgccctggagagatagagctgatgtttctaatactgggctttcttgggcgtcaggggcatgaacaggtttgcttcttgttggtttgacatttggttgctgctgttctttctctttatcctaatgggtttcagcctttgtttttgtaggttttgagagggagcagaggtaaccatctgtgttcagtttaacaggaagcccctcttacactgtttatgtccctaataatttcccaagtgagcctgtacatgttgaaacttctagcttcagcttggattacagtattatttgctctcttatttttgttatgtgatatttctcctttttttaaataagagaacatgttttctagctcaaggaatatagttatatgaaagtggatctgaattacacagaaatatttatttaaaaatgactgccgccacatctttgaatgggaaatatttattgatgtcttctccacagcagatgtctcctgtttggtaacaggctggctaaaccatctgcctctttaattctaatagtagttatcagaaaagattagatgtataacatgtccttgaaatgcaggaaaccgcagaggcactgagggcggaacactgtcttccagtcagataaggcacttccattgtgctgtgtagacccctcctgctacatggctggtgctttgctctgcatcctcactcagcacatgaagcagctgtcttgaaatgtcttttcttactgctatttctaaactgatggttcttcctacatgttctgtatgtaaacataatgtttgtagacattgtagttttagttgattaggctttgtccatttttttgtaatcattttttcattcactattaaatatccagtttgaaagtgcattattaccttaaagaaggaaatactagaagcagctgaactagagaacttaaaaaacaatttgtccaaaattagcaactctgtgagtttgtgtcagaggattatgctgacattttaactatcctaaaagaaaatgcacttttaattgtcaaaagaatgtcctaaatggtaaccttaattccttggaatttagcatatttgcaaagttgcctcagaaaaggctggttaacagaataaggattttggggagactctgccgtgaggtagtcatgcatctgtagcttatgtcctcccagcggcagtcacggtgggcctttataacatctagcacagaggctgaaggaagggaggagcctcccatagaagggaatttttttttctccttgcagtgctggacacctgtagtccccactatatttgtgagggatttgaggggcttgccaccagctgcagaaagttatcttattgctgtactttcttatacgtgatggaagaagttggacttgccattcctgcttcagccgggcaacctaagttaatactttcctgttttctctttttgccatttaaacacattgttggaattggtggatgattgtttgccaaaaatatgctttcttccttcttattcctgggtttaaataagatactagcttcaatagtggcagctgtcagcaagtgatttactagttttcttttgaggccttaacatgagggcagattagggattgaatatttagtagactttgccgtggagtgaagtgtttggaatactcttttatctcaccaggacagtttaatagaagtacggtggatgtcttagcaatgaaacatcatccgaacccctctaggctgtatgagagcaatagcatgttatgattaagagcatcacctctggtccaggctgcctgggctcccattctggctgtgttacttactagctggtggccttgggcaagttacttaactgctctgagccttaagtcactcatatataaaccgggaataattataccttaaaaagttaatatatgtccagtgcttaatatattgccagggtttgctactctggccattattatgtggttagtaaaatccctttcacttcacggtgattggtctatctcgtgtttgtttttcagtgatattgtggtccagatagtagatgctcgaaacccactcctgtttagatgtgaggatttggtaagtcaagtttgacaaaattcaaacatcagtcctttgagtagcagtgccagcaccgcatccctcagcaatgactgtaggcatacattctgccctctctggcttcgtttagtgaggccttccctccttccaaggccaggagcttgcagaacgccactgttgagacagatgttttctcaaacaatggtgtccatctgcaggaaggcacagacacttaaatgagctttctagcttttagtttagaagccacttaaggcatttgccggtttcccatttgtcagggaacaccagttgaaatagcattttatttattttagcatattgccggtcacttcactttttaattcatcccataaggttctgtcttctcacactttagttatgactccctgtggtattttacaagtgaactaagtttatgaaacaccacaggggctgataactaacatgtgagagtcccatgaaataatgtaatacagctttgggttagttaacaaaacattgtataatatgtgaggtattcatatttctttttgagaactgtaatacatattatttatttatttattactatcttatagatctaattttttgtagagacaggatcttgtcatgttgcccaggctggtctcgaactcctgggctcaagcaatcctccctcctccgcctcccaaagtgctggaattacaggcgtgagcccccatgcctggcccagattatttttaaacccactggtgcataacaaaaatattaatggtggaacttcttttcaaagcttactgaaaggattagtataatgtgtcatgattaaaaatgtttaaattaggaaatgatttaaaactaggggcagtaaaaacttgtattgggatctttaatataattagcctcatttttttacttgtttgaagaggtctttctaaatctctttgtcttgcttaggaatgttatgtgaaagaaatggatgccaataaggagaacgtcattctgatcaacaaggcagacttgctgactgctgagcagcggagtgcctgggccatgtacttcgaaaaagaagatgtgaaggttattttctggtcagctttggccggagccattcccctgaatggtgactctgaggtaacctgagggacattttaggttggctttcaaagagggaattttgatttcttgttaatgtgcttcgtttgtgttttgtttattcttatggaaaatctgtgggaattagagtttttcctctgtgtgctggattaggatgacctatagaaagtgaatcacaaagttactttctctgtggttgttggacagtctgacctctccagtgttgttacacactgatattagctgtatttttaaatttttttaaaaggttgtagacaggaaattgtataggaagttccacaatgaccctgtaactgcttttaagagaagtcagaacacaagagtacaactgaaggatgtagtcagttctcaggacttgattagaatctcttttgactttgttttgaaaacagagaaactaagtaaccctaaattaggatataccacatattttatcttttagcccaaattttgcaaaagtagtttgggctttatttttacttttgaataaaataatatctataagagggccaggtgccgtggctcactcctgtaatcccagcactttgggaagccgagaggggcagatcacctgaggtcgggagttcgagaccagccctaccaacatggagaaaccccatctctactgaaaatacaacattagccgggcatggtggcgggtgcctgtaatcccagctactcgggaggctgaggcaggagaatcggctgaacctgggaggcggaggttgtagtgaaccgagatcatgccagtgcactccagcctgggcaacaagagcgaaactctgtctcaaaataataataataacaacagctatgaaaagaaattagtaattagaatcgtagagatggagagacttaggaagtactgtctttttccctgtccttttctcccgtctctgtttatcaggcatctgttgaccgtggagtgtgtgttgagctgggttatgaatacaacaccctcccctccatgagctcagtatataagctctcacctctaactatgtgaaggagtttcttcctccacttccctgtcaaagttgcatatttctctttgactattttaagcgacaggatgcttgagaccaggtaactcgtttctttttacctctaaatgtagaaagttcttccattcagtgaaacgaagtcagccaccctaccctttgatctgaggactctttgtcccttcggttctctcctgcagctgtgcattttcagctttcatattcctcatagacaccagctccgggacacccatcctgggtgcctgtcttcttgcgtcaggaccacaggcaaaactagccacacctaattgaatacgttattccaggtggtatttgcctagggcgtatacacagcattcatatttcttgtgatcaggatagtcacattaattcagtttctgttagttcatcccctttcagaagctgtttgctcttggctcattaaacctgtgagcaaccgaatccctcaaatatcaaaaaaaaaaaaaaaaaaacttactaagcaaacctcatcccatctttatatggaaagatatttgttctgttttacctcaacttaggagagtactgttccttttaaatatgttaatggtttagtaccaaggtagagttcattttagagtgtgcagttagcatttccttgccttctaactgtgaatttttgtgtcattgataacatcgttgaacaggctaggtccaaggatacagctctgtgatcttttgtggacttactagcagcactctatgccaagcgtttttttttttttttaaggttgccttttttttctttttaattttactattattatactttaagttttagggtacatgtgcacaatgtgcaggtttgttacgtatatatacatgtgccatgttggtgtgctgcacccattaacttgtcatttagcattaggtatatctcctaatgttatccctcccctctcccccgaccccacaacagtccccggcgtgtgatgttcctgttcctgtatccatgtgttctcatcgttcaattcccacctatgagtgagaatatgcggtgtttggttttttgtccttgcaatagtttgctgagaatgatggtttccagcttcatccacgtccctacaaaggacatgaactcatcattttttatggctgcatagtattccatggtgtatatgtgccacattttcttaatccagtctatcattgttggacatttgggttgtttccaagtctttgctattgtgaatagtgctgcaataaacatacgtgtgcatgtgtctttatagcagcatgatttataatcctttgggtatatacccagtaatgggatggctgggtcaaatggtatttctagttctagatccctgaggaattgccacactgacttccacaagggttgaactagtttacagtcccaccaacagtgtaaaagttttcctatttctccacatcctctccagcacctgttgtttcctgactttttaatgatcgccattctaactggtgtgagatggtatctcattgtggttttgatttgcatgtctctgatggccagtgatgatgagcattttttcacatgttttttggctgcataaatgtcttcttttgagaagtgtctgttcatatccttcacccgctttttgatggggttgtttttttcttgtaaatttgttggagttctttgtagattctggatattagccctttgtcagatgagtaggttgcaaaaattttctcccattctgtaggttgcctgttcactctgatggtggtttcttttgctgtgcagaagctctttagtttaattagatcccatttgtcaattttggcttttgttgccattgcttttggtgttttagacatgaagtccttgcccatgcctgtgtcctgaatggtattgcctaggttttcttctagggtttttatggttttaggtctaacatgtaagtctttaatccatcgtgaattaatttttgtgtaaggtgtaagggagggatccagtttcagctttctacatatggctagccagttttcccagcaccatatattaaatagggaatcctttccccattgcttgtttttgtcaggtttgtcaaagatcagataattgtagatgtgtggcattatttctgagggctctgttctgttccattggtctatatctctgttttggtaccagtaccatgctgttttggttactgtagccttgtagtatagtttgaagtcaggtagcgtgatgcctccagctttgttcttttggcttaggattgacttatgccaagcgtttttatgtgaatatagatatattcccaagaatataccaataataattattactataattaaaactaacccataaaattaatcagttaataaaaacatattctttaccagacaccactattctaaacactttacatattttactcatttagtcttctcggcagtaagtatagatacttaccattcttaggcagaagaatagtttgccctgttaaaccattatttctattgtttccagtctttcctggaagtcaatgtcttggtgaagttttaaaatagatacttatcattatattgctctgccctgatgcaataaccctatcaaaaatggaagagattagtttctgcatctgtggccttcttgatttactaaccaagataacaaagggaaatgaaattttttgcatgatcagttttcagggaactcactgcctcctgttgatgactgtcttatttttagggctcaccaggtcacctgtagaattgttttaatgtcagtgtctggattaacagtgtatagtttatggaagatattctttcctcctttttaagagtgaggcgccatttgcttctcccaagttttctggactctgctgttttccatgatttctcaggttgtgaagtcttacttgtaacttgatactaatatctgtaatttgggtatcaaacatgaatgtattagaagtagcctgatattcactgttttcttgcctggaagtttgggtcatcttctatagttgttcaacttcagttgtttgaaaaacgtgaatgttctgaaaaaatgtgacatttttcaaaagacacaggccaattctgagttgagtatctctggtttcctttggtcaccttgaaagtgcactgtgttccccgaaagcttgactttttccttctttcttttaatttttaacataattacggcaaagtcctttgattgtctttagtacttttcctgaagctgaactgctccccgctgtagtttttctactacacattcatgttcagttcacattcttgtttttatgctactttcatatttgaaaatgactcaaaagagcccacagtgacgacactgacttctttaccttcgctgctcatttaccatagaaattgcttccagttctatatttctctcataagccagggttctttttgagttgccaggcttgattgttaaatcatacctatttttcctgacattttgtttttatttctgctttcttaagatttaggatacatgtttgagttcatcgtgtccccttctgtgactgttaatcattctaacaaagctacttggaaatgataccaggtttccatcactttcaagtcccgacaaattcacccttatttctgctttgttgtcaagagggattcagaagaattaacacacccttgagtagaaaatgatttgtacctttcactttccaaagggaatctttcatcagtaaataatttccacatgtggagttgagttttgctgccacatttcacacacagggatctgtgtgtgctccatggtgctttgacttctaaaagcaattatgagagaagagcagatttctttaaacatgccaaccaccgtctttaaaaatacaaatgtaaaatgaactgcaaatggcaaagtctgcccttgctttgtgcagagaggagtatgttaaatgtgttgttgttcctgagaaatgctttgttttatcatgcagcccattgcaaaataacgtactgtcaagagttcagtttaacataagcttttccccttgctgtctttgaagagttttgttgttgttgttgtggtggtggttttctgtttgtttttgtagacacccagtcttgctgtgttgcccagactggttttgaattcctggccttgagcgatcctcccacctccgccacccaagcgctgggattacaggcgtgagccgtagcacccggcctagagttattttaaattacaaaagtaatacatgttctttgtacagagttcaaatagtacagaaacatataaagtaaaaagtgaagggaaggtccaattctcccctccaggagggcgccaccctcgatggttgtctgtcacggcactgaactgaaaggctttcgttgtctcctccctgtgttcacctttccatctccgtcgaactttgcttgtcccctgttcatcttttttttttttttgtgagacagagccttgtctgttgcccagactggagtgcagtggcaccatctcggctcactgcaccctccgcctctcaggttcaagcagttctcctgcttcagcctcccaagtagctgggattacaggtgtgcaccaccacgcctggctaatttttgtatttttagtagaggcggggtttcaccatgttggtcagcgtggtctcaaactcctgacctcaaatgatctgcgcaccttggcctcccaaagtgctgggattacaggcttgagccaccacgcccagccatcctctgtccatcttacaactcattaagtatttttactagagtggaaactgcagttatatacttctgagcgtttctattattttgtcaggaagaggcaaacagagatgatagacaaagcaacacaaccaagtttggacattccagtttcgaccaggctgaaatttcccacagtgaatccgaacatctcccagctagggattctccttcacttagtgaaaatcccacaacggatgaagatgacagtgagtatgaggactgtccagaggaggaggaagacgactggcagacgtgctcagaagaagacggtcccaaggaagaggactgcagccaggactggaaggaaagctctactgcagattctgaggctcggagcaggaaaaccccacagaagaggcagatacacaattttagccatctggtatccaagcaggagttactggagctctttaaggagctacacactgggagaaaggtgaaagatgggcaacttacggtcggactggtaagatgacatatgtcataacattgttaccacgtgattgtctttaatccccatttttcagtagctgcacgaccccaaagaccaaccaggcttccggcatcgtagggaacattgccctcttgttgcccactggcatcacgggattaggcagtgggatagacagagcccaactcaaaggaatcaacttcctcaaggcctgtgttggtaacatacctattcacattgaatgtattctccagtctcctttcagttcagcttttcctgccgtgtgaagtaccaagacagcagaatgagagagatgttaatgttgtcttcagacttcagcccagtgttctttgggcaccctgtgatccttgccagcttatgctgtaaatgttccagatgcttaatagggagaatcccagcatcttggggctggacgaaatatgacaaatgcattagttgcataaacactgcatagtagataggggaaagcagatcccatccccagccttacataccctaattccagaagtggctgcggaagtgcgcaaaccccgaggggctacgacatggctctagatggccccatccttagctaaggagatgtgagatgttagagaaggtattgattataaagacctatccagaatataacagtgagggaaaggaggtcatggcatgtttaaagtctcccagcttttcagttacatgctaagtgtagctaatcctagttagttttgagcccccttctctctgccccaaccccctgccccaaaatgcctgtttaaaatgactacagtagattagcatcttattttagtgcagtagttaaaagagctgtctgtggaatcagacagacctaggtgtaattcccaattcagcagtagaactaacttgttaggaacacggggaaagttgcttaatgtctctgagctttaaagcttcattctctatattgttgctaaaaatttgtatcagaaagttcagcttctctacaagttttctcacatttatggaaaaactgagcatcctccctcattttctgaatttcttactctagaaattctgcagacacttattgatcacctgccacatgccagacattccacttggctttaactaaaacgtgactgaaaattaaaaataattgtgtgttgtgattattcaaatgtccatccgatcagcctcacccagtgtggaagatgcgatggaaaccactgtctgtagatggggcagtgagggaaggctgggaacaaggggatgaaattttctgtagcatctgctgttaacagcaaaacatataatattaaaatgtgcataacttggccatttgtcactggagatgtgtctgaataaatatacccacaccacaggagaaaaaagatgtctcaacaaacacagcatggatttcaaataattttctaaagtaaccagatgcttatgctagtcttgccaccatctatgtcatatctttgagtcttttgatagatgtactgttttactgtttggtaacttctgagtctcttctaggtgggctaccctaatgttggtaagagttcaacaatcaacaccatcatgggcaacaagaaagtatctgtgtctgccacacctggtcacacaaagcactttcaggtatttctgtggtgctttgccacttgcatgcagctctttcttccttttatctgttgtatacccagctcaaacctcttgcttgtcttccagactctctatgtggagcctggcctctgcctgtgtgactgtcctggcttggtgatgccatcttttgtgtctaccaaggcagaaatgacttgcagcggaatcctcccaattgatcagatgagagatcatgttcctcctgtatcactaatatcctttctgctttggaaacactctagttattacgtgcatattagggcttcaggtttattttgggcatttgagggattcagatttgatgaagaattgaaaatactagtgatctgcacaagtttatactgtgagatagcatgagaacttcagaatagaacctcatttcctgatttcagcagtgtagccttgaagaaatgggagaatccaggtttcagatactcagttccaagttgcaaacctatttaacaatgccatgtaaccgtttgaatgaccttggaaaacttgcttaaccttcccaaatactttccttttctctaagtgggggaaaatctatctcacggttgattatatttaatcagtatagctaacatatattgaatacttgctacggtgcttttctaaacccttaccaaataccttttagtcctcaaaaagcaacgcttaaggcagatactgctgttattcccatttcctcaaacttgaggaaactgaggcacagagaagttaaataatttatctaagctcttatagctagtaagcagtaaattaggaactctgctacctctcagcagcataatgaattaacttacataaagcatctaggacagtgcccagcatggaaaaaagactcaaagatggatttgttaagaactatgcaggggccaggtgtggtggttcatgcctgtaaccccaacactttgggaggctgtggcaggcggatcacttaaggccaggttttgagaccagcctggccaacatggcgaaaccctgtctctactaaaaatacaaaaattagctgggcgtggtggtgcacacctgtagtcccagctactcgggaggctgaggcacgataatctcttgaacctgggaggcggaggttgcagtgagctgagatggtgccactgccctccagcctgggccacaaagcgagactcttgcctttaagaaaaaagaaaatgaaagaaaaaaaaaactgcaaggtctgagattttactctacttataagctaataagttagtctattattgttttgtagatactagcagaaaataggagacttcatgaaattggcacactaatccgctggcttgtaagtagagtaaaattcccttcataactacacttaaggccacagcttattcatagatacatatatatgaaaaagtgtatagcttttttttttgtttttgagatggagtctcgctctgtcacccaggctggagtacagtggtgcaatctctgctcactgcaacctccacctcctgggttcaagcaattctcctgcctcagcctcccgagtagctgggattaacaggcatgtaccaccatgcccagttaattttttttttttttttttggtagagatggggtttcaccatgttggccaggctggtctcaaactcttgacctcagataatctgcctgcctcgacctaccaaaatgctgggattacaggcgtgagccaccacgcctggccttttaagtttctctgtaaattaatagtgagacatgaatcatttattgcaggtagccttaggttaggtgctgtggaggatagggcataaatagagatggctcctgccctttacgaagcatcagtctgttggggcacatgaggcatgtacttgaataactctagtacaaggtagaatattgttagtggcttaaggaaaatttggacaaactatgggagatgagacaaaggaggaaaagtaatcctgcctaactgtaggcattagaaacagagactccccttgctttatctctaaattagaatcacaaatgcgtaatcttttcagggtaaaaatgtgtcatctttaaagtctgtttcagatatattttaaattactattttaaatgaattcatatggaaaagtcgtgggagcttaaggccttgtttaaaagggaaaaaacaactgagtctttttagattaatcaaaaactatcctcttcctttggagaggagagagtgtttgtcacacgcggaatgaagtgccatgttctttgaggcacgatttgtatgccatggggaggagggagtccgttcaagagaatggattccctgacaagctacgtttgccagaatattccaagacatgttttagaagctacctatggcattaacatcataacgcctagagaggatgaagatccccaccgacctccaacatcggaagaactgttgacagcttatggatgtaagttgtgattcatcagaaaatgtgaacaaaagtaacagtatacctaatgaatagaaataagaatagtaatagtactagaattgctgttctgcaaagatacacatttataatatttcttcagcatttttcaagccatctttcgtctctgtgggccttgcctacaaagtaacctaaagtgcaaaaagcttttaggacgtttgctgctttgatggtacccacgtgcagcacaggggttctcatcgtaggctgtgttggctctttctggagtcgtctcccaaacaagaagaaagcggatgtgtggaagaaaatgaatccgcacgccacagcgaggcaggagagttaggaggggagcaccagaagggagacccctcagagacggggacagagtggagcttggttaggataggggcacaaagcatcctccttcctctcccatcagcccctgtaaacttatttgacattaagatgagtccacagctctcccacctctgtgttttatcccaattccacgtgggaacctatgatttcttgccttaaatgtaaactttaaaggtggcctggagaaccttgtgtctacctaaaaaaaaaaaaaaaaa

SEQ ID NO: 1458 - DNA, 2405 bp, Homo sapiens
ggtcattcaaacggttacatggcattgttaaataggtttgcaacttggaactgagtatctgaaacctggattctcccatttcttcaaggctacactgctgaaaacaggaaatgaggttctattctgaagttctcatgctatctcacagtataaacttgtgcaaatcactagtattttcaattcttcatcaaatctgaatccctcaaatgcccaaaataaacctgaagccctaatatgcacgtaataactagagtgtttccaaagcagaaaggatattagtgatacaggaggaacatgatctctcatctgatcaattgggaggattccgctgcaagtcatttctgccttggtagacacaaaagatggcatcaccaagccaggacagtcacacaggcagaggccaggctccacatagagagtctggaagacaagcaagaggtttgagctgggtatacaacagataaaaggaagaaagagctgcatgcaagtggcaaagcaccacagaaatacctgaaagtgctttgtgtgaccaggtgtggcagacacagatactttcttgttgcccatgatggtgttgattgttgaactcttaccaacattagggtagcccacctagaagagactcagaagttaccaaacagtaaaacagtacatctatcaaaagactcaaagatatgacatagatggtggcaagactagcataagcatctggttactttagaaaattatttgaaatccatgctgtgtttgttgagacatcttttttctcctgtggtgtgggtatatttattcagacacatctccagtgacaaatggccaagttatgcacattttaatattatatgttttgctgttaacagcagatgctacagaaaatttcatccccttgttcccagccttccctcactgccccatctacagacagtggtttccatcgcatcttccacactgggtgaggctgatcggatggacatttgaataatcacaacacacaattatttttaattttcagtcatgttttagttaaagccaagtggaatgtctggcatgtggcaggtgatcaataagtgtctgcagaatttctagagtaagaaattcagaaaatgagggaggatgctcagtttttccataaatgtgagaaaacttgtagagaagctgaactttctgatacaaatttttagcaacaatatagagaatgaagctttaaagctcagagacattaagcaactttccccgtgttcctaacaagttagttctactgctgaattgggaattacacctaggtctgtctgattccacagacagctcttttaactactgcactaaaataagatgctaatctactgtagtcattttaaacaggcattttggggcagggggttgggtcagagagaagggggctcaaaactaactaggattagctacacttagcatgtaactgaaaagctgggagactttaaacatgccatgacctcctttccctcactgttatattctggataggtctttataatcaataccttctctaacatctcacatctccttagctaaggatggggccatctagagccatgtcgtagcccctcggggtttgcgcacttccgcagccacttctggaattagggtatgtaaggctggggatgggatctgctttcccctatctactatgcagtgtttatgcaactaatgcatttgtcatatttcgtccagccccaagatgctgggattctccctattaagcatctggaacatttacagcataagctggcaaggatcacagggtgcccaaagaacactgggctgaagtctgaagacaacattaacatctctctcattctgctgtcttggtacttcacacggcaggaaaagctgaactgaaaggagactggagaatacattcaatgtgaataggtatgttaccaacacaggccttgaggaagttgattcctttgagttgggctctgtctatcccactgcctaatcccgtgatgccagtgggcaacaagagggcaatgttccctacgatgccggaagcctggttggtctttggggtcgtgcagctactgaaaaatggggattaaagacaatcacgtggtaacaatgttatgacatatgtcatcttaccagtccgaccgtaagttgcccatctttcacctttctcccagtgtgtagctccttaaagagctccagtaactcctgcttggataccagatggctaaaattgtgtatctgcctcttctgtggggttttcctgctccgagcctcagaatctgcagtagagctttccttccagtcctggctgcagtcctcttccttgggaccgtcttcttctgagcacgtctgccagtcgtcttcctcctcctctggacagtcctcatactcactgtcatcttcatccgttgtgg

SEQ ID NO: 1459 - DNA, 3082 bp, Homo sapiens
ttttcttaaaggcaagagtctcgctttgtggcccaggctggagggcagtggcaccatctcagctcactgcaacctccgcctcccaggttcaagagattatcgtgcctcagcctcccgagtagctgggactacaggtgtgcaccaccacgcccagctaatttttgtatttttagtagagacagggtttcgccatgttggccaggctggtctcaaaacctggccttaagtgatccgcctgccacagcctcccaaagtgttggggttacaggcatgaaccaccacacctggcccctgcatagttcttaacaaatccatctttgagtcttttttccatgctgggcactgtcctagatgctttatgtaagttaattcattatgctgctgagaggtagcagagttcctaatttactgcttactagctataagagcttagataaattatttaacttctctgtgcctcagtttcctcaagtttgaggaaatgggaataacagcagtatctgccttaagcgttgctttttgaggactaaaaggtatttggtaagggtttagaaaagcacatagcaagtattcaatatatgttagctatactgattaaatataatcaaccgtgagatagattttcccccacttagagaaaaggaaagtatttgggaaggttaagcaagttttccaaggtcattcaaacggttacatggcattgttaaataggtttgcaacttggaactgagtatctgaaacctggattctcccatttcttcaaggctacactgctgaaatcaggaaatgaggttctattctgaagttctcatgctatctcacagtataaacttgtgcagatcactagtattttcaattcttcatcaaatctgaatccctcaaatgcccaaaataaacctgaagccctaatatgcacgtaataactagagtgtttccaaagcagaaaggatattagtgatacaggaggaacatgatctctcatctgataatttgggaggattccggtgcaagccatttctgccttggttgaaccaaaagatggcatccgcaagccaggacagtcacacaggcagaggtcaggctccacatagagagtctggaagacaagcaagaggtttgagctgggtatacaacagataaaaggaagaaagagctgcatgcaagtggcaaagcaccacagaaatacctgaaagtgctttgtgtgaccaggtgtggcagacacagatactttcttgttgcccatgatggtgttgattgttgaactcttaccaacattagggtagcccacctagaagagactcagaagttaccaaacagtaaaacagtacatctatcaaaagactcaaagatatgacatagatggtggcaagactagcataagcatctggttactttagaaaattatttgaaatccatgctgtgtttgttgagacatcttttttctcctgtggtgtgggtatatttattcagacacatctccagtgacaaatggccaagttatgcacattttaatattatatgttttgctgttaacagcagatgctacagaaaatttcatccccttgttcccagccttccctcactgccccatctacagacagtggtttccatcgcatcttccacactgggtgaggctgatcggatggacatttgaataatcacaacacacaattatttttaattttcagtcacgttttagttaaagccaagtggaatgtctggcatgtggcaggtgatcaataagtgtctgcagaatttctagagtaagaaattcagaaaatgagggaggatgctcagtttttccataaatgtgagaaaacttgtagagaagctgaactttctgatacaaatttttagcaacaatatagagaatgaagctttaaagctcagagacattaagcaactttccccgtgttcctaacaagttagttctactgctgaattgggaattacacctaggtctgtctgattccacagacagctcttttaactactgcactaaaataagatgctaatctactgtagtcattttaaacaggcattttggggcagggggttggggcagagagaagggggctcaaaactaactaggattagctacacttagcatgtaactgaaaagctgggagactttaaacatgccatgacctcctttccctcactgttatattctggataggtctttataatcaataccttctctaacatctcacatctccttagctaaggatggggccatctagagccatgtcgtagcccctcggggtttgcgcacttccgcagccacttctggaattagggtatgtaaggctggggatgggatctgctttcccctatctactatgcagtgtttatgcaactaatgcatttgtcatatttcgtccagccccaagatgctgggattctccctattaagcatctggaacatttacagcataagctggcaaggatcacagggtgcccaaagaacactgggctgaagtctgaagacaacattaacatctctctcattctgctgtcttggtacttcacacggcaggaaaagctgaactgaaaggagactggagaatacattcaatgtgaataggtatgttaccaacacaggccttgaggaagttgattcctttgagttgggctctgtctatcccactgcctaatcccgtgatgccagtgggcaacaagagggcaatgttccctacgatgccggaagccctggttggtctttggggtcgtgcagctactgaaaaatggggattaaagacaatcacgtggtaacaatgttatgacatatgtcatcttaccagtccgaccgtaagttgcccatctttcacctttctcccagtgtgtagctccttaaagagctccagtaactcctgcttggataccagatggctaaaattgtgtatctgcctcttctgtggggttttcctgctccgagcctcagaatctgcagtagagctttccttccagtcctggctgcagtcctcttccttgggaccgtcttcttctgagcacgtctgccagtcgtcttcctcctcctctggacagtcctcatactcactgtcatcttcatccgttgtgg

SEQ ID NO: 1460 - DNA, 8798 bp, Homo sapiens; identical to SEQ ID NO: 1454
  SITE (7875): n equals a,t,g, or c
  SITE (7885): n equals a,t,g, or c
  SITE (7925): n equals a,t,g, or c
  SITE (8291): n equals a,t,g, or c
  SITE (8295): n equals a,t,g, or c
  SITE (8395): n equals a,t,g, or c
  SITE (8397): n equals a,t,g, or c

SEQ ID NO: 1461 - DNA, 8798 bp, Homo sapiens; identical to SEQ ID NO: 1454
  SITE (7875): n equals a,t,g, or c
  SITE (7885): n equals a,t,g, or c
  SITE (7925): n equals a,t,g, or c
  SITE (8291): n equals a,t,g, or c
  SITE (8295): n equals a,t,g, or c
  SITE (8395): n equals a,t,g, or c
  SITE (8397): n equals a,t,g, or c

SEQ ID NO: 1462 - DNA, 2213 bp, Homo sapiens; identical to SEQ ID NO: 1456

SEQ ID NO: 1463 - DNA, 6286 bp, Homo sapiens
cttggaggacaacctagacctccctcaccacggcctggccgacagctccgctgacctcagctgcgacagccgcgttaacagcgactacgagacggacggcgagggcggcgcgtacacggatggcgagggctacacagacggcgagggggggccctacacggatgtggatgatgagcccccggctccagccctggcccggtcctcggagcccgtgcaggcagatgagtcccagagcccgagggatcgtgggagaatctcggctcatcagggggcccaggtgcgtcggacatggggggcaggcctgggaagggtctccggaggggatgccagcacagagcagacacacactgggagcctgttttctaccaggacgtcaacaaacacggcttccctggtcagactggtttctgggactcagacctggggtagctgagacccacgtggcactgagtaacttgcagcattttttttttttttttttttttgagaagcagtcttgctctgtcgcctaggctggagtgcaatggcgcaatcttggctcactgcaacctccacctcccaggttcaagcgattctcctgcctcagcctcctgagtagttgggattacaggcacctgccaccatgcccggctaatttttgtatttttagtagagacggggtttcaccattggtcaggctggtcttgaactcctgaccttgtaatccacccgccttggcctcccaaagtgctgggattacaggcatgagccactgcacccaggcttttttttttttttttttgagatggagtttcgcttttgttgcccaggctggagtgcgatggcgtgatctcggctcaccacaacctccgcctcccaggttcaaacgattctcctgtctcagcctcctgagtagctaggattacaggcgtgcaccaccatgcctggctgattttgtatttttagtacagacagggtttctccatgttggtcaggctggtctggaactccagcctcggcctcccaaagtgctgggattacaggtgtgagccactgcacccggcctttttttttttttttttttttttttgagttagagtctcgctctgtcacccaggctggagtgcagtggcacgatctgggctcactgcaacctcggcctcctgtgttcaagcgtttctcctccctcagactcccaggtagctgggattacaggtgagcaccaccatgcccagctaatttttttttttttttaaggtattcttagtagagacagggtttcaccacgctggccaggctggtctccgattcctgacctcaggtgatccacgtcggcctctcagagtgttgggattagaggcgtgagccaccgcacctggcctccagccaacattttaacctctctgtgcacctgtttcctcatctaggacacagggtggatggtatcagacttggtggcacagggcggtggtgagcactcaatgtgctcagcccaagttttggcacatagtagttgcgtgtctttttgaacttgacctatctaatttatatattttattttttaaattttagagatagggtcttgccctgctgcccaggctggagtgcagtagtacaatcatagttcgttgcggcctccaactcctgagctaaagggagcctctcatctcagcctccggagtagctgggaccacaggcgcgcaccaccacccacacccagctaattttttttcattttttgcagagatgtggtcttgctatgttgcccaggctggtctctaactcctgggctcaagtgatcctcctgccttggcatctcaaagtgctgggagtacaggcgtgaaccacagcgcccagctgtagttgggtgtttaacagtaacaaatgtgtatgtagctcttagtgtatatgcctcagcatcttcttccacaccctctctaggtcaatgtaaaaatctatgaatcaatgacatctctgattagagtgattttcctggggttgtgcagtacccaacctgctcaactgtccatggcaggctgcatacggagcagccactgtactaagtcctttacgtacatgaactcatggctgtggccctgtgaggacttgcacagatgagaaacccaattccccttttgctgacaggctaggaggtctcagctaaggccttcccctatcccagcctcagttttctcatttagatttggggatgacctgcagacttgtcacggggttagcaagtgggcagcatggcccgggccaaggtgggggatgggatggaggtggttattgatctcgactcaccatgctctggggggagttttgaagctcctctctccctctcctccaaggtggacagccgccacccccagggacagtggcgacaggacagcatgcggtaagaaccccatattccagattggggccctcaacccttcccttgggactcagactctgcggactcagatctagatccaagctatgccttcatggtgcccctagcctagtggggaagacagagcctgccagagcctctctaagccccatataatcagggccaagggagtaggaatccacttcctgggaggcctaggaaggcttcttgaagggcaggatattgcagctggggctttgagggatgcataggagtttgttaacaaggccctacccatgaatgcccagatgtgcttatctctgcccacacccactgtgcctagcacagccagcctcagtttatggtgagaaagctcacacccttcccacccacagcatctattctatttcctgatccccagaacctatgaacgggaagccctgaagaaaaagtttatgcgagtacatgatgcggagtcctccgatgaagacggctatgactggggtccggccactgacctgtgacctctcgaaggctgccagctggtccgtcctccttctccctccctggggctgggactcagtttcccatacagaacccacaaccttacctccctccgcctggtctttaataaacagagtattttcacagcaccggcttctagtggcttccaggaaggacaaggtcctcggtcccgtagaccctgatccgagactttgccaaatgcataagcttttactgtttttatattaggaaatcatacaggaccaagaaccgctggggtcctggccagccagggcaggcccaggatggggctccggggccatggaggcgaaggcacagtggcaggcaagggatgaggtggtcacaggtacacgggctgctcctggcctgtaaggaggcgatatgtggcagctggcatcgtcttgatatgcacctggggagtggaggcggaacggggctcagggcaggcctgggctcgtgggggacgtgggggcgcccctggccaccacccaccacccgcacacctcgccataggcctcggtgagcagctcgatgatgcgggcgtgtggcgtggccaccacactctgcccattgatctcaatgatgcggtggccgacgcggatgcccccacgctcggcgatgccaccacggaggaggctgcagatctgggggagaaaagagggggacgggaaagaggtgggggctgctcaggggccgtgctcagggccgccctacccccccaccccggggccaggggccggggcctcacgatgccgtcctccacgcagaagcccagctgctcgcgggcgtggggccggtggatgatggcggtggtgacgggagggcagtggacgatgctgagtgtcaccgacgtctgcgacttcgtctcctgtggggcgggggccgttggcctcactcagctgccggacagcctggcaggttgtagccccctctgggcctcagtttaccctctcataaaccagagacctggagtccaggggctcaattctggaagaccccctcagatgtgatagagaacagactcgggcccggtgggcatggggtcgaagctgtctgacccgagccatatcgcttccttatggccaaaagccaagccgacagccgggctctccaggcaggctgcaaacatctgtaagaggctgcacggactgtggcctcattcctctgacgggggcaggtccctccctatctctgggcctcagtttccccatctgagcaacaaaggttgagactcaaaaacatggccaggtgcagtggctcacacctgtaatcccagcactgtgggaggccgaggcaggtggatcacttgaggccaggagctcaagaccagcctggccaaccaacatagtgagactccatctctacaaaaaataaaacaataaactgggcgtggtggtgcacacctgtggtcccagctactcgggaggctgaggaaggagatttgcttgagcccagaaggtcaaggctgcaatgagccaggtgcaccgctgcactccagcctgggcaagagtgagaccttgtctcaaacaaacaaacccccccagaaattagctgtttcttgttagagagagagagtggcccagccctggagctgggccacccgcatttccatcctggctctggtactagggaggtgccctggacaagtggcctcccttctccaggcctcagtttccccaagggcacaccagtgggcaggacttaaaagttcgactttgtccctcctggctgggctggagagacctggccagggaggagacctctctgggactcagctccccttcctgggagtgtgggggccctgccacaccaggaaactcacgcggacagcggcctggcacgcagccaggggcagccccaccaggctggtcccgttgatggcggtcaggcggtccccgatgctgagggcccccgagcgctcagcaggccccccgtgcagcaggttggcgatgacggctgtgggcagcagggagccccagcccgactccaccagggccacgcccaggccctcccctcgccgcttctcgaggtgcacctgggacacacagggggcgcggaggctgctcagcagggcccggtgcaggtgcacgggtgtggggggcaccaggtgggggctgcccagcacctcactcacctcccggcagttgtcactgttggagaagtggtccaggtccccattatggaggtggcaggcgcctgggctcgggtgcacgcccacctggctggggtcaataccgctttcccgtaggaactggctgtaggcggcggcgaaggcctggccaatggcctgggcgatgagctgggcctgcggggaggagtggcgcgtccctggggtgtcccacccacctcctccaggtccccaaagtccccagggtcctcagagctgagccctcctgtccccacctggggtgagagtcccaggacacagccttctgccctggggctttgggggaggtggagagacagccgcatcttggggaatctacggggagaaggaaggggaggggcagccctgggctggggggacgatgagggaggcagctccctgcgcatgggctgtgggaaaagctatcaaagacccagccagggggcctggggcctcatgggtggcagggacagcccaggagcgggcaaggtttcggggagtcggccgagagtcttggagtcttataggaggctggacgcggtggctcacgcctgtaattgcagcactttgggaggctgaggtgggtggatcgcttgagcccaggagtttgagaccgtgttcacctgggcaacagagcgagaccgtgtctctataaaaaatacaaaaattagccaggcatggtgataccccggtggtcccagctactagagaggctgaagtgggaggatcgcttgagcctggaaggttgaggctgcagtgaactatgattgcgccactgcactccagcctgggtgacagaaggagaccttgtcccaaaaaaagaatttaaaaataagcttatgggagggaggttaaatgcacggcccactgagggaggcgacagttgcagtgaggagggcctcaggagggtggccccgcgccctggctgctcacgtcctccgcgtagaatacgtggcagagcatcttgtagaggcggcggccgtggtcctggggtgccggcctccgtgccagccgccgccgcgccatcagcaccagcacgcagccgatgtcggctgtgtaggagatggtatgcagggcgtggtccatcatggcctcctggggcgggagaggcagcctgggtgggttggggggccgtgccaggctcgatcaccccacccgcatccctggggcgggtccctgccccgtacctgggagtccgctgtcaagaccttgatcctcttggtggagacgaacaggtccacctccgtcatgggctgggtctc

SEQ ID NO: 1464 - DNA, 31168 bp, Homo sapiens
ggaggaggtggaccagggccggggctatgacggcgactcatccagtggctccggccgctcctgggacgagcgctcccgccggccgaggcctggtcgccggggccgggccggcagccatgggcgtaggagcccaggtggtggctctgaggccaacgggctggccctggtgtccggctttaagcggctgccacggcaggacgtgcagatgaagcctgtgaagtcagtgctggtgaagaggagagacagcgaaggtcagaagaggcgggaggtcggacacgatcagtactggacacagggcaccgtggtcggatgggcgacggtttcaagtgattctcctgcctcagcctccctggtggctgggactccaggcgcccgccaccatgcctggctaatttttgtacttttggtagagatggggcttcaccatgttggcaaggatggtttcgaattcttgacctcaggtgattcacccacctcggcctcccatagtgcttgctgggattgtgggcgtgagccaccgcgcccagcctggaagctacaactacacctggcatcttcttgctcctcgctccccccaccacaaatccccactttctgcttttctgtccctttctgcctgtctgtatttcatatattctctctagctctttctctctgaacctggtggtccctaattctgggctaggttgagccatatcacctgtcagccacttggggcccagaaccattttatcaacatgtccccgcgctgatccccgggacctctgtttaggccacctcacttagcaagagggactcagcagatgggatggagtgaaggaccctgagctcagaggtgatcctggatgatctggggggcccagtgtcaccacagggtccttataagaggaggcctggctgagtgtggtggctgatgcctgtaatcccagcactttgggaggccaaggcaggcagatcacttgaggccagtagttctagaccagcctgaccactatgatgaaaccccatctctactagaaatacaaaaattagccaggcgtggtggtgtgcacctgtaatcccagctacctgggaggctgaggcacgagaattgcttaaacccgggaggtagaggttgcagtgacctgagattttgccactgcactccagccccggcgataggagtgagactccttctcgaaaaaaattaaaaaataaaaaataaaaattgaaacaatgatgatgttatgagcaatagaatgcccttagcctgtgcatggcaacatcacgagtggcacggtgacctggtgtccccgccccgtggagatgtcattgacacaatcagatctcgggtcctacgggcgacatcactgttctccttatgatgccatcaaggtgttaggatgggagggcccgcacctggactgcttacagcaggagaatgctcccaggcacccgtctccagagtcctgcctcagtttccctcctccccccttacagagtttggcgtcaagctgggcagtcagatcttcatcaagcacattacagattcgggcctggctgcccggcaccgtgggctgcaggaaggagatctcattctacaggtgaggccgggcttcttgtcctgagagcagggagacaaggcagggttggggcgggcagtcccacggagtcatacagcaaggacagcagaactgggccccaaagcatttaccttcagtgttgttgcttgtatctcaaaggttgcagatggccaggcataaaaccccctttttccccagctactactaatccacagccaaatgtcggtttctagtatccccatggggttgtctgtttctaataccctctagctttgatgtgcatcagagactcatgtgggcagctgactcctggacctaccctaggtgactggatgctaatgacccagtcaccaggtttaggggagctgccctgccctaaaggatggtatctttctggattcttcccctgaaagtctgtttctagtgactcctagtgtttgatttccaaattgctttcagctgattatttccagtgtcttcaaaaagttatctgtttctttttttttttttcagacagagtctcgctctgtcacccaggctggagtgcagtggcgcaatctcggctcactgcaacctccgcctcccaggttcaggtgattctcctgccttagcctcccgagtagctgggattacaggtgcccgccaccacacccagctaatgtttgtatttttagaaaagacgggtttctccatgttggccaggctggtctcgaactcctgacctcaggtgatcccccccgctcggcctcccaacgtgctgggattacaggcgtgcaccaccacaccttgctaattttttgtatttttagtagagacggggtttctccatcttggtcaggctggtctcgaactcccgacctcaggtgatccatccgcctcggcctcccaaagtgctgggattacaggcatgagccaccacacccggccgacattaagttctttctaggaattgtgtgtttctaatctacctctagatgactgttttcttttctcttttcttttctcttctcttttttcttttcttttctttctttttgatatggagtgtcgctctgtcacccaggctggagtgcagtggcgggatcttggctcactgcaacctccacctcccgggttcaagtgattctcctgtctcagtctcctgagtagctgggaccacaggcgcccaccaccacgccctgctaatttttgtatttttagtagagacagggtttcaccatgatggccaggctggtcttgaactcctgacctcaactgatctgtctgcctctgcctcccaaagtgctggcattacaggcgtgagccaccgcgccccactctagatatctgtttctagttatctcccagaagattgtgtgtttctagtatcttttaagtatctgatactccctcttctccagttagagttgtttataatgtcaccctcacatctgttcctagtatcccctgagacatttccacttttggtaagaaaggagagtcaacctgtttctcattttccccagtgtctcccacccctcttagaacattttctgtttctagaattcggtgctcagttcttggtgtggtctccactcacagcaggaatccaattcaacactttccttagggagtggctgtttttagcaacctctgggggaattgtctgtttcaagttcccccacaccaggctgtttctactgtctcccatctctcattaactcacttccgctctttcattcctggtccctttcagatcaacggggtgtctagccagaacctgtcactgaacgacacccggcgactgattgagaagtcagaagggaagctaagcctgctggtgctgagagatcgtgggcagttcctggtgaacattccgcctgctgtcagtgacagcgacagctcgccattggagggtgaggacctagaggttaggacctgggagggggttgaatggatggcagggaaggtgggaagccccaggcagggccaaggaatcaatgagcctggtccctagaggctcagagagtgacaggaacttgctgaaggccacacagcaagtcaagagttcaggggggcgatctcggctcactgggttcaagcgattctctgcctcctgggttcgagcgattctcgtgccttggcctcctgagtagctgggattataggcgtgagccaccgtgcccagctccagagccgaatcttctaactgagcttctgactttggtctagggccctttgtttagaggggtgttgatatacccctctgtaaaatgggtccagtccagaaggcgtgaccatggctgatgagatgtcctctccccctgcagacatctcggacctcgcctcggagctatcgcaggcaccaccatcccacatcccaccaccaccccggcatgctcagcggagccccgaggccagccagaccgactctcccgtgtaagtatcacccatcggccagaatggtgatagggagggagagggaggtgggagggagaggggaacgcgggcgtagctttccaactgggggtaaccttgaggacgcagtcctgtatttctagcatgtgcctcaaaatacctccagcctctacccattacccagttccaaagccgtgtccgcatttgtaggtgttggttacagcagcaccccacttcttagtatcaaactctgccttaggccaggtgcggtggctcacgcctgtaatctcagcactttgggaggccgaggagggtggatcatctgaggttaggagttcgagaacagcctggccaacgtggtgaaaccctgtctctactaagataccaaaattagcccggcgtggtgccgggtgcctgtaagctcagctacttgggaggctgaggcaggagaatcacttgaacccaggaaatggaggttgcagtgagccgagatcgtgtcattacactgcagcctaggcaaccagagcaaaactctgtcttaaaaaaaaaaatttctttttcctctatttatttatttgttttgagactgagtcatgtgagactggctaattttcatatttttggtagagatggggtctgtattgcccagctatgttgcccaggctggtcttgaactcctgggctcaagcatttggcctgcctcagcctcccaaagtgctggtattacaggcgtgagccaccacgcccagcccagataaattaaaattatttttattttgtttatttatttatttatttttttggagacaaggtctcactctgtcgcccaggctggagtgcagtggcatgatcttggctcactgcaacctctgcctcccgggttcaagcaattctcctgccttagcctcctgagtagctgggattacaggcgcccaccatcatgcccggctaatttttgtatttttggagagacggggtttaacctcgttggccaggctggtcttgaaatcctgacctcaggtgatctgcccacctcgacctcccaaaatgctaggattacaggcatgaaccaccgtgcccggcctaaaattctttttaaaatggccccttgaaatccatccctgcctcactcccaatctgttccccaccagggagagtccccggcttcggcgggaaagttcagtagattccagaaccatctcggaaccagatgagcaacggtcaggtgggtggtgactctgagcacccctgtccctgacatttctgatccctgacagcaaggctgtgccaggcagagctgggggaggttggcctgagcctaagtggtgagacatggtttcctgagaaggactcgaggtgggtgacagtccttccaggatgaggacataaagcaaaggtttggaggctggactgagccagtgtgcttgggaaagagactggcttttccctttcagagttgcccagggaaagcagctatgacatctacagagtgcccagcagtcagagcatggaggatcgtgggtatgtaccccagaagaaagcaaacccgctcaaaactcctacatcccaggctgcctccctcatcagcgcaatcctgcctgcttgtatccattgtgttgagtgggaccattaagtgggggttttggggaaactgaggcctggagggggtgggggctttcccaaggacaatgctgagccctccctttgtccgcccactctgctctgaccccatctctgcctccccttgcaggtacagccccgacacgcgtgtggtccgcttcctcaagggcaagagcatcgggctgcggctggcagggggcaatgacgtgggcatcttcgtgtccggggtgcaggcgggcagcccggccgacgggcagggcatccaggagggagatcagattctgcaggtgctccgggggcggctggccagccccactgatcatgggcgtgcagtgtgctaggtcctgcccttgtctgttccagtcctccccttgggtccacctggggactgtcgagaccccagatgggtatttgaacatttcagtgtctccttggctgtgtcatgattttgctgatgtcacgaccttatcttccaggtcatgacctcatcgtccagttacaacctccttttctgtgccttgaccttatctgggttcattttttgttgttgttgtttttgagatggagttttggtcttgttgcccaggctggagtgcaatggtgtgatcttggctcaccgcaacctctgcctcccaggttcaagcaattcttctgcctcacctcctgagtagctgggattacagttgtccaccaccacgcccggctaatttttatatttttagtagagatgagggtttcgccatgttggccaggctggtctcaaactcctgacctcaggtgatccacctgcctcggcttcccaagtagctgagattacaggcatgagccactgcgcctggctaactttttttttttttttttttgagatagagtcttgctctgtcacccaggctggagtgcgggggtgtgatcttggctcactgcaacctccgcctcccgggttcaagggatcatcctgactcagcctcccaagtagctgggatcacaggtggccgccaccatgcccagctaatttttgtgtttttagtagagacagggtttcaccatgttggccaggctggtcttgaactcctggcctcaagtgatgcacccgcctcagcctcccaaagtgctgagattataagcttgagacactgtgctcaagattgggaacaacaatcttgttgttcatgtcatatgacattgttcatgtgacattcttgttatcaatgtcacaatctccttgttatcaatgtcaggactttgggtcacagcctcattgcctatgtcatgaccttgtctgggtcgcaatcctcttgttcctgacattggctgtgttgaccgtgtcatgaccgtcttgtatgtcctaatcgtgtggtcaggtcacagatcattctctcatgatctccatgtccacttatagtcattttctgtgccaccatcccctgtgtctgtgttgtgaccttgcctgtgtcctgccttcatgacagtgtcataactacctccaggatccacagcccctcatcatccccccatctctgtccttgcctcatctcatccccaggctgtctcccctgtcccttgcgcgagttcactcaccaagtctcacccccactttgctctcatgaccttgcttgtgtcttgaccttgcagtgtgagttgtgattcatgatggagtcacagctccccactttccatgtcataagcccactggctgggtgaaaacttgatgccaaattgcctgagggtcatggtattttttactgtatttctactcattttgcttgtgggattctaaccttgacatccacgtcatgaccccgagagtaggtgtctgtgcccacaagctgtgcaagtatattgctgtccctgttatgaccctgagagcaggtggctgtgtctgtatattgctgtccatgtcgtgaccctgagagcaggtggctgtatattgctgtccatgtcatgacccggagagcaggtggctgtatattgctgtccatgtcatgaccctgagagcaggtggctgtgtctgtatattgctgtccatgtcatgacccggagagcagatggctgtgtccatatattgttgtccctgtcatgaccctggtggtaggcatctgtgacccactgtgtgtccatatatcgttgtccctgtcacgaccctgtgactactgtgactacgtctgagttcttttgagcatttcacacagtttccatcgagctccatgccatgacctctgttcccatgttttgatattgacaacccaccatgatttggttatctgaggacaagtgcagtgcctgtgcccgtttctgtgtcaaaactcttgtatccttacaatgccaccagctgtctgtgtcacacatcacacagccatagggtgataccccagtcggaaagccctcggggaactgccgggtcccttggcagcagctctggaagcagctggggctgagttttgcccagaggaaggtccaggatctcatgcacgcccaagaggtaccagagctttttctatagctgcacttgctttctggcaggtgaatgacgtgccattccagaacctgacacgggaggaggcagtgcagttcctgctggggctgccaccaggcgaggagatggagctggtgacgcagaggaagcaggacagtgagtgcgcgtggatatgggtgtgcctgtgtgttgcggggggaggacctggctgtgtggcctggtggtgagtgcagggatgtggttgaatctgcatctctgcaccctccatccctctccctggcccctacagggagagtgccccaaatctccagccaggcccactctcgggtggggagggctcagatcaggcagcagcccaggcagctcatgtggcctcccgctctccccagttttctggaaaatggtgcagtcccgcgtgggtgactccttctacatccgcactcactttgagctggagcccagtccaccgtctggcctgggcttcacccgtggcgacgtcttccacgtgctggacacgctgcaccccggccccgggcagagccacgcacgaggaggccactggctggcggtgcgcatgggtcgtgacctgcgggagcaagagcggggcatcattcccaaccagagcaggtggggactgtgtgctcctgcagtggggcacttctgcttcagcctcagtctccccgttagaaatgggctcgattgggctggacgcggtggctcaggcctgtaatcctggcactttgggaggctgaagtgggcagatcatgaggtcaagagatcgagaccatcctgggcaacatggtgaaacctcgtctctactaaaaatacaaaaattagctgggcgtggtggcacatgcctataatcccagcttcttgggaggctgaggcaggagaatcgcttgaacctgggaggcagaggttacagtgagccgagatcacgccactgcactccagcctggcaacagagtgagactcttgtctcaataaataaataaataggcatgatatcactgcttagcagtgttggtggttcaatctgaggaggtccacaaaaggctctgggcgggccccatttggtgctggtatgagcttcctgttgttgctgtaacagatgcccagaaacttagtggctttaaacaacacacacatcctcttacagttctggagagcaaaagtactaaagtcaaggtatgggcaggcctgggccctcccagaggctccaggagaaaaccaattttccacctttcccagagtctagaggggccgcatccctcagctcggggccccttcctcccccttcatagccacagcacagcctcttctagtctctctctgactctcaccctcccgcctcttcttgtgaggaccctgtgaggacatcgggtcccctgggtcacccaggatcatcatccacctcaatagcatcagtttaatcccatctgcaggccaggcacggtggctcacgcctgtaatcccagcactttgggaggctgaggcgggcagatcacgaggtcaagagattgagactatcctggccaacatggtgaaaccccatccctactaaaaatacaaaaattagctgggcgtggtggtgcatacctgtaatcccagctacttgggaggctgaggcatgagaatcgcttgaacctgggaggcggaggttgcagtgagcagagattgcaccgctgcactccaacctggcgacggagcgagactctatctcaaaaaagtaaataaataaataataaagattagctgggcgtggtggcgggcacctgtaatcccagctatttgggaaagtgaggcaggagaatcgcctgaacccaggaggcagaggttgtaacgagtccagcctgagtgacagagcaagactttgtctcaaaaaacccaaaataataataatagtaataataatcccatctgcagagtcccttttgccatacaaagtggcctgtccacaggctccgaggggtaggacgaggacgtctttggggccaccatgctgctgaccccagtgctcagtactgtcccctcttctccccagggcggagcagctggccagcctggaagctgcccagagggccgtgggagtcgggcccggctcctccgcgggctccaatgctcgggccgagttctggcggctgcggggtcttcgtcgaggagccaagaagaccactcagcggagccgtgaggacctctcagctctgacccgacagggccgctacccgccctacgaacgagtggtgttgcgagaaggtggggcccggagctggaggggccctggggaggcctcacacacagctcctggtgcacctgttcactaacattcagcctctaaaaggcacagtcttggcccggcgtggtggctcacgcctataatcccaacactttgggaggccgaggtaggaggatcgctgaggccaggagttccagatcaacctgggcggtaaagcaagactacatctctacctcaaatttatttatttatttatttttgtttttatttttatttttagacagagtcttgctctgtcttaggctggagtgcaatagcgtgatctgagctcactgcaacccctgcctccctgattcaagcgattctcttgcctcagcctcccaagtaaccgggattacaggcgcccatcaccccgcccccagctaatttttgtatttttagtaaagacggggtttcaccatgttggccaggctggtcttgaactcgtgacctcacgatccacccgcttcagcctcccaaaatgctgagattacaggcgtgagccaccacgcccggcctctacatcaaatttaaaaagatagctgggcatggtggtgcatacctatagtccccgctgcttgggaagctgaggcaggaagattgcttgagcttgggaggtcgaggttgcagtgagctatgatcgcaccagcctggcccacatggtgaaatcccatctctactaaaagtacaaaaaattagctgggcatggtggcaggcgcctgtaatcccagctacttgggaggctgaggcaggagaatcacttgaacccgggaggcagaggttgcagtgagctatgatcgcaccactgcactccaccctgggccacagattgacactgtcttcaaaagaaaaaaaaaaaaaagcatgtttctaaccactctccttctatcaaaaatacttttgggcctgggtgcggtggctcacgcccgtaatctcaatggtttgggaggctgaggcaggtggatcacctgaggtcaggagctctagaccagcctggcccacatggtgaaatcccatctctactaaaagtacaaaaaattagctgggcatggtggcaggtgcctataatcccagctacttgggaggctgaggcaggagaatcacttgaacccgggaggcagaggttgcagtgagcggagatcacaccactgcactccagcctgggcaacaagagcaaaactccgtctcaaaaaaaacaaaaaaacaaaaaaattttgggttattttaggggacagaaggacaggaagggggttcattccttaaaaatctatttgtgtctccaacagaaatatggtgcaaggcatgtagatagccttacaaaaggaaaaagaaatagcaataataataattttaataatttatcttctttgaccgggcgtggtggctcacgcttgtaatcccagcactttgggaggccaagatgggtgggtcacttgagcccaggagtctgggaccagcctggacagcaaagtgagactctgtctctacaaaataaaaaataaattagccaggtgtggtggtacgccagtagtcccagctacttggcaggctgaggtgggaggatcccttgagcccaggaggtcgaggctgcggagagctatgatcatgctgctgcactctagcctgggcaacaaagccagactctggggggaaaaatgcctcatcctgatttcaggaagggaagagattaagctcttatcagaggacagggggttaaaaacccaggtgcagcgattttccaaataaaaccacaaaaggggtgggaagagcaaattgcccgggacaggggtgggtggatggaccttgagaaaagcctttgacactgtcatcgcgctgctccaacatccagatgaaaacgtcctagaaatacaaggccacggccaggcgtggtggctcacgcctgtaatcccagcactttgggaggccgaggtgtaatcccagcactttgggaggtgggtggatcacctgagttcgggagttcgagaccagcctggccaacgtggtgaaaccccgtctctactgaaaatacaaaaattagccgggcgtggtggtgggcgcctctaatcccagctactcaggaagctgaggcaggagaatcacttggacctgggagatggaggttgcagtgagccaagattaagccactgcaccgccagcctcggtgacacagcaagactctgtctcaaaaaaataagtaaataggccacgtgcggtggctcacgcctgtaatcccagcactttgggaggccgaggcgggcggatcacgaggtcaggagttcgagatcagcttgaccaacatggtgaaacccagtttctactaaaaatacaaaaattagccaggcatggtggcgcacgcctgtaatcccagctactcaggaggctaaggcaggagaactgcatgaacctggaaggtgaaggttgcagtgagccaagattgcgccactgcactccagcctgggccacagagctagactccatctcaaaaaaaaaagtaaataaaataaaagaaagaaagggagaaagagaaggattaagttgcaaagaccctgggctaccacttttctcccctcaagacgcttctgtgactgtttcttcagtggtaaaatggtgtatctggtaggccaggtgtcaacatacttttcctgcaaaggatcacatagtaactattttaggctttgtgggctagtctctggcagaactactcagctctgctcaaaggtagccatagacaggacataaagaaatggttgtgactgtgttttgataaaactttattgacgaacacatgcagtgggccagatgtggccctcaggttgtagtctgctgacctatgagttagctaggttcaactgctaaaaagagaccctacagccaggaagaaagggaatgaaggcaggagaggggcttattcctgcccttgaaggcggaacccagaaatgtacacatcaattctgctagtgttccattggccattatttggtcataaggctaacctagctgcaaaggacactgggagatgtagtatttggctgggtagctatggtcctggttaaataggctgtttactataaggaagtggaggggtttgtacaacacactagcagtctttgatcgcaaatgggaccctgattctttcactgtgtctctacccctcagccagtttcaagcgcccggtagtgatcctgggacccgtggccgacattgctatgcagaagttgactgctgagatgcctgaccagtttgaaatcgcaggtgagaagccagatcctctggaaacctcgttggtgaaatagtttcacaactgtttttttgtggggggtcgggggagagttagaataatgatggcaaacatgaagcagatgggccaccagtgccccccccaatacccaagccagacatcctcaatccatcttggcaccgtttgtctggatagaacctccaaatccttcttaacacagttcaccaggtagccattgccaattgaggcaaagtgccacctgttatttgtttaagagaaatttattgatcttctgagacagcagtgaacacgacaggcaaggtcccttggagaagactccaaattaacaactgtagaaacaatggccgggtgcggtggctcatgcctgtaatcccagcactttgggagtccgaggcgggtggatcacgaggtcaagagattgagaccatcctggctaacatggtgaaaccccgtctctactaaaaatacaaaaattagctaggtgtggtggcgcgtacctgtagtcccagctactcgggaggctgaggcaggagaattgcttgaacccgtgaggcagaggttgcagtgagccgaggtcatgccactgcactccagcctgacgacggaatgagactctgtcaaaaaaaaaaaaaacaaaaacaattaagatagactaggaggccgggcgcagtggtcaggagttcgagaccagcctggccaacatggtgaaaccacatctctactaaaaacacaaaaaattagctggacatggtggcgcatgcctgtaatcccagctactcaggaagctgaggcaggagaattgcttgatcccaggaggcggagggtgcagtgagcagagatcacgccactgcgctccagcctgggtgacagagggagaccctgtctcgaaataaaaaacaaaaaatagttaagattgcaaattttggctgggtgtggtggctcacatgtaaaatctcagcactttgagaggccaaggtgtgaggatgacttgagcctaggagtttgagaccagcctgggcaacacagcaaaatcacgtttctataaaagaaaaaagaatttttttaattaaaaaaagatgcaaattttatgtcttttttttttttttttttttttttttttttgcatcagagtcttgctctgttgcccaggctggagtacagtggcaggatctcgactcaccgcaacctctgcctcccaggttcaagtgatcctcctgccttagccaccctggtagctgggattacaggcacgcgccaccatgcccggctaatttttgtatttttagtggagacaggtttcgccgtttggccaggctggtctcaaacttctgacctcaggtgatctacctgcctcagcctcccaaagtgctgggactacaggcatgagccactgtgcccggccaattttacgtttttaaccacaaaaacaaaaaggggggatgagatcacgtctccctccttgaacccctccatgccaggctatgtctccttcctgaaactttgcacgatccaggagggcttcctggaggaagcagtgctcctctcaggtcctagaagacagataggggcaagagtggagtttcctgtggggtcgtagcctgagcagagccctggagttggaactgagtctgggagagccaggggctgcagctcaggctcagcatcaggcctctgaccctgcaaccctgagcaagtggcctgttgtctctgagcctcagtttccccacctgccacataggccagtaccagccacccactcctcaggaggaggagggggctgaggtcaggaggggatgtgagtgcagtgcctggcacttggccaacatgagtttctgctgctgttaggatttctctccagggcaatggggagccatggtggcttcttgagcaggggaggggcaggtaggcatgaatttgaggggacgggggctgccctcctgaagctgctggtcctctctgccgtccacagagactgtgtccaggaccgacagcccctccaagatcatcaaactagacaccgtgcgggtgattgcagaaaaagtaagccgggtcctgctacgggtcccatttcatggatgggggaaaccgaggcctgggcatccaactgaatgtcctgacctgttctcagcccacaccccacaagtgcagtcttccatagagccccttttggaggctttgtgaggcaggaggcccgagacagacaagggcttctcggagtcaaacagcagccagccctgggcaaaggcagagagactcaagttgaggttttgatgcccaagatgctgcgacctgggctgttaccacccccatccccaacttgctagcctgtggatgtgagaggctggggtccactctgacctcagactcttcatctttctatctttctctctctgtttaccctgctgcaatccccctcaccccaacgtccgccggcctggcccaggacaagcatgcgctcctggatgtgaccccctccgccatcgagcgcctcaactatgtgcagtactaccccattgtggtcttcttcatccccgagagccggccggccctcaaggcactgcgccagtggctggcgcctgcctcccgccgcagcacccgtcgcctctacgcacaagcccagaagctgcgaaaacacagcagccacctcttcacaggttggggggtgggtgtcccagggtaggcgggtgggccccagcctgagtctcctgcacacactgacgtcccctccctgcagccaccatccctctgaatggcacgagtgacacctggtaccaggagctcaaggccatcattcgagagcagcagacgcggcccatctggacggcggaagatcaggtactgccgcggtgtgggtgggtcgggcagggaggccccacagacgctgtgcaggcccagctggggtttggggcctctgtcgggagttagggcttggtcagggatcaggactgtggccagagtcaagatgggacctgagacaagggtgttggactggaacttgggtgagatgagattggaggagctgttttttgttgtttgatttgagatggagtctcatgtcacccaggctggagtacagtggtgtgatctcagcttgctgcaacctccgcctcccgggttcaagtgattctcctgcctcagcctcccgagtagctgggactacaggcgagcgctaccaggcccagctaatttttgtatttttagcagagacgaggtttcaccatgttggccaggctgggctcaaactcctgacctcaggcgatccacctgcctcagcttcccaaagtgctgggattacaggcctgagccaccgcgcccagcctggaggagctgttttgagaatggagtcagtggggcacgggagctcacgcccatggtcccagctactcaggaggctgaggcaggagaatcacttgaacccgggaggcagaggttgcagtgagcagagattgcgccacagcactccagcctggcaacagagactccttctcataaaaaagagagagagaatggagtcttctcttggggctggagtcaaggtttggggctcagcttggatttgggggctgagcctctcaggtgaagggtcaatggatacaacccatcctggagtcaacagagaagcctccactgaggctccaggctccaggctcctcgccttgatttgggaccagagtttgaaggtggggggatgtcgtgggtggcagctggggtcctggccagggccagccgcagcatccacacccaccccacagctggatggctccttggaggacaacctagacctccctcaccacggcctggccgacagctccgctgacctcagctgcgacagccgcgttaacagcgactacgagacggacggcgagggcggcgcgtacacggatggcgagggctacacagacggcgagggggggccctacacggatgtggatgatgagcccccggctccagccctggcccggtcctcggagcccgtgcaggcagatgagtcccagagcccgagggatcgtgggagaatctcggctcatcagggggcccaggtgcgtcggacatggggggcaggcctgggaagggtctccggaggggatgccagcacagagcagacacacactgggagcctgttttctaccaggacgtcaacaaacacggcttccctggtcagactggtttctgggactcagacctggggtagctgagacccacgtggcactgagtaacttgcagcattttttttttttttttttttttgagacgcagtcttgctctgtcgcctaggctggagtgcaatggcgcaatcttggctcactgcaacctccacctcccaggttcaagcgattctcctgcctcagcctcctgagtagttgggattacaggcacctgccaccatgcccggctaatttttgtatttttagtagagacggggtttcaccattggtcaggctggtcttgaactcctgaccttgtaatccacccgccttggcctcccaaagtgctgggattacaggcatgagccactgcacccaggcttttttttttttttttttgagatggagtttcgcttttgttgcccaggctggagtgcgatggcgtgatctcggctcaccacaacctccgcctcccaggttcaaacgattctcctgtctcagcctcctgagtagctaggattacaggcgtgcaccaccatgcctggctgattttgtatttttagtacagacagggtttctccatgttggtcaggctggtctggaactccagcctcggcctcccaaagtgctgggattacaggtgtgagccactgcacccggccttttttttttttttttttttttttttttgagttagagtctcgctctgtcacccaggctggagtgcagtggcacgatctgggctcactgcaacctcggcctcctgtgttcaagcgtttctcctccctcagactcccaggtagctgggattacaggtgagcaccaccatgcccagctaatttttttttttttttaaggtattcttagtagagacagggtttcaccacgctggccaggctggtctccgattcctgacctcaggtgatccacgtcggcctctcagagtgttgggattagaggcgtgagccaccgcacctggcctccagccaacattttaacctctctgtgcacctgtttcctcatctaggacacagggtggatggtatcagacttggtggcacagggcggtggtgagcactcaatgtgctcagcccaagttttggcacatagtagttgcgtgtctttttgaacttgacctatctaatttatatattttattttttaaattttagagatagggtcttgccctgctgcccaggctggagtgcagtagtacaatcatagttcgttgcggcctccaactcctgagctaaagggagcctctcatctcagcctccggagtagctgggaccacaggcgcgcaccaccacccacacccagctaattttttttcattttttgcagagatgtggtcttgctatgttgcccaggctggtctctaactcctgggctcaagtgatcctcctgccttggcatctcaaagtgctgggagtacaggcgtgaaccacagcgcccagctgtagttgggtgtttaacagtaacaaatgtgtatgtagctcttagtgtatatgcctcagcatcttcttccacaccctctctaggtcaatgtaaaaatctatgaatcaatgacatctctgattagagtgattttcctggggttgtgcagtacccaacctgctcaactgtccatggcaggctgcatacggagcagccactgtactaagtcctttacgtacatgaactcatggctgtggccctgtgaggacttgcacagatgagaaacccaattccccttttgctgacaggctaggaggtctcagctaaggccttcccctatcccagcctcagttttctcatttagatttggggatgacctgcagacttgtcacggggttagcaagtgggcagcatggcccgggccaaggtgggggatgggatggaggtggttattgatctcgactcaccatgctctggggggagttttgaagctcctctctccctctcctccaaggtggacagccgccacccccagggacagtggcgacaggacagcatgcggtaagaaccccatattccagattggggccctcaacccttcccttgggactcagactctgcggactcagatctagatccaagctatgccttcatggtgcccctagcctagtggggaagacagagcctgccagagcctctctaagccccatataatcagggccaagggagtaggaatccacttcctgggaggcctaggaaggcttcttgaagggcaggatattgcagctggggctttgagggatgcataggagtttgttaacaaggccctacccatgaatgcccagatgtgcttatctctgcccacacccactgtgcctagcacagccagcctcagtttatggtgagaaagctcacacccttcccacccacagcatctattctatttcctgatccccagaacctatgaacgggaagccctgaagaaaaagtttatgcgagtacatgatgcggagtcctccgatgaagacggctatgactggggtccggccactgacctgtgacctctcgaaggctgccagctggtccgtcctccttctccctccctggggctgggactcagtttcccatacagaacccacaaccttacctccctccgcctggtctttaataaacagagtattttcacagcaccggcttctagtggcttccaggaaggacaaggtcctcggtcccgtagaccctgatccgagactttgccaaatgcataagcttttactgtttttatattaggaaatcatacaggaccaagaaccgctggggtcctggccagccagggcaggcccaggatggggctccggggccatggaggcgaaggcacagtggcaggcaagggatgaggtggtcacaggtacacgggctgctcctggcctgtaaggaggcgatatgtggcagctggcatcgtcttgatatgcacctggggagtggaggcggaacggggctcagggcaggcctgggctcgtgggggacgtgggggcgcccctggccaccacccaccacccgcacacctcgccataggcctcggtgagcagctcgatgatgcgggcgtgtggcgtggccaccacactctgcccattgatctcaatgatgcggtggccgacgcggatgcccccacgctcggcgatgccaccacggaggaggctgcagatctgggggagaaaagagggggacgggaaagaggtgggggctgctcaggggccgtgctcagggccgccctacccccccaccccggggccaggggccggggcctcacgatgccgtcctccacgcagaagcccagctgctcgcgggcgtggggccggtggatgatggcggtggtgacgggagggcagtggacgatgctgagtgtcaccgacgtctgcgacttcgtctcctgtggggcgggggccgttggcctcactcagctgccggacagcctggcaggttgtagccccctctgggcctcagtttaccctctcataaaccagagacctggagtccaggggctcaattctggaagaccccctcagatgtgatagagaacagactcgggcccggtgggcatggggtcgaagctgtctgacccgagccatatcgcttccttatggccaaaagccaagccgacagccgggctctccaggcaggctgcaaacatctgtaagaggctgcacggactgtggcctcattcctctgacgggggcaggtccctccctatctctgggcctcagtttccccatctgagcaacaaaggttgagactcaaaaacatggccaggtgcagtggctcacacctgtaatcccagcactgtgggaggccgaggcaggtggatcacttgaggccaggagctcaagaccagcctggccaaccaacatagtgagactccatctctacaaaaaataaaacaataaactgggcgtggtggtgcacacctgtggtcccagctactcgggaggctgaggaaggagatttgcttgagcccagaaggtcaaggctgcaatgagccaggtgcaccgctgcactccagcctgggcaagagtgagaccttgtctcaaacaaacaaacccccccagaaattagctgtttcttgttagagagagagagtggcccagccctggagctgggccacccgcatttccatcctggctctggtactagggaggtgccctggacaagtggcctcccttctccaggcctcagtttccccaagggcacaccagtgggcaggacttaaaagttcgactttgtccctcctggctgggctggagagacctggccagggaggagacctctctgggactcagctccccttcctgggagtgtgggggccctgccacaccaggaaactcacgcggacagcggcctggcacgcagccaggggcagccccaccaggctggtcccgttgatggcggtcaggcggtccccgatgctgagggcccccgagcgctcagcaggccccccgtgcagcaggttggcgatgacggctgtgggcagcagggagccccagcccgactccaccagggccacgcccaggccctcccctcgccgcttctcgaggtgcacctgggacacacagggggcgcggaggctgctcagcagggcccggtgcaggtgcacgggtgtggggggcaccaggtgggggctgcccagcacctcactcacctcccggcagttgtcactgttggagaagtggtccaggtccccattatggaggtggcaggcgcctgggctcgggtgcacgcccacctggctggggtcaataccgctttcccgtaggaactggctgtaggcggcggcgaaggcctggccaatggcctgggcgatgagctgggcctgcggggaggagtggcgcgtccctggggtgtcccacccacctcctccaggtccccaaagtccccagggtcctcagagctgagccctcctgtccccacctggggtgagagtcccaggacacagccttctgccctggggctttgggggaggtggagagacagccgcatcttggggaatctacggggagaaggaaggggaggggcagccctgggctggggggacgatgagggaggcagctccctgcgcatgggctgtgggaaaagctatcaaagacccagccagggggcctggggcctcatgggtggcagggacagcccaggagcgggcaaggtttcggggagtcggccgagagtcttggagtcttataggaggctggacgcggtggctcacgcctgtaattgcagcactttgggaggctgaggtgggtggatcgcttgagcccaggagtttgagaccgtgttcacctgggcaacagagcgagaccgtgtctctataaaaaatacaaaaattagccaggcatggtgataccccggtggtcccagctactagagaggctgaagtgggaggatcgcttgagcctggaaggttgaggctgcagtgaactatgattgcgccactgcactccagcctgggtgacagaaggagaccttgtcccaaaaaaagaatttaaaaataagcttatgggagggaggttaaatgcacggcccactgagggaggcgacagttgcagtgaggagggcctcaggagggtggccccgcgccctggctgctcacgtcctccgcgtagaatacgtggcagagcatcttgtagaggcggcggccgtggtcctggggtgccggcctccgtgccagccgccgccgcgccatcagcaccagcacgcagccgatgtcggctgtgtaggagatggtatgcagggcgtggtccatcatggcctcctggggcgggagaggcagcctgggtgggttggggggccgtgccaggctcgatcaccccacccgcatccctggggcgggtccctgccccgtacctgggagtccgctgtcaagaccttgatcctcttggtggagacgaacaggtccacctccgtcatgggctgggtctccccatcgggggcctgtgggtggcggcgtgggaggtggaggcccccacagacccagcctgcagcccacccgcctgcccgcccggccccggccgccccctcaccttgacgcggtccatggcctcccgggcctgggccatgcgcgtgctggtgggcgggttccgttccgacaccagctgggtggaccccaggtacctggccccaaatatgacaccgtccaggaggtcttcatggtcacagggaccaggcactgagggcgacagcgaagagggtcggcccccaggggcccactcccacaggctctgccccagggctacgctctccgagatggccgggagacacagtgttctagctggtggcttagcactctccagccaggaagcacagcccactgttctagaaccatccaagcagcctggccctcacaggtctagaaccttctgtccatccctcaaggactcgcaggtgggaaaccagtgagtccaggccatggctggattcaaagccagatctagcacccacagataccttcaccccgtgtccccagaattccatgatcaggccggaaccagacagtcccactcctgcttttttgagacacggtctcgctctgtcgcccaggctggagctcggtggtgtgatctcagctcactgcaacctccgcttcctgggttcaaacgattctcctgcctcagtctcatgagtagctgggattacaggcgcccaccaccacgcctggctagtttttgtatttttagtagagacggggtttcgccacgttggccaggctggtctcaaactcccgacctcaagtgatccacccgccttggcctcctaaagtactgggatgacaggcgtgagccacgacgctccaccccccactccaatttcgaaacctccacaacattctagaaccacagtggacccctgcttcttggttctggaattccctccatcaatctagaactggccagctctgcccactgttctagaaccgtctgcagtcagcccaggatagcaggcagctctgttcccgggttgtagaaccactcagaacagagacagaccctgctgcctgtctaaaattcccatactctccagaaccccagctggttctgacccttgattccagaactctctgacaggtctcatagcaattctgtcaggagttttagaatcttattatcactctagaatcagacttctctgctccgtgattccagaacatcttaatcacaatcgcgtcaggcagctcttcctgtggttctagaatctccttcagtagttcacacctttggctacaccagggattctaagaattacctgaccagtcaaggaacaaacaattctgttccaggagaattctagacagttccagaatactcccaacccagcccagaactacataaagctttactcctggctgggtgcggtggctcacgtctgtaaccccagcactttaggaggccggggggggggggtggatcacctgaggtcaggagttcgagacctgcctggccaacatggcgaaaccccgtctctactaaaaatacaaaattagctgggcgtggtggcgcgtgcctataatcccagctacttgaaagctgaggcgggagaatcacttgaacccaggaggtggaggttgcagtgagccgagagagatcgcaccactgcacaccagcctgggtgacagagcaagattccatctccaaaaacaaaaaggaaaaaaaaaaaaaagctttactctcatggttctagaattccctgagctacccagagccagacagctctgccagtggccctagaacattctaaccagtaactacggctctttggtttagaaccacgggtgtagggccccgttctggacaccactaagtgaaattcaccctacaccacagtcggttctgcccactatccttcaggatctaagcattctggaacaagagctccactctggggttctagagagatacgtcattcactgtggtagccaccaggcacatgtatctatcacagacttgaaatgtggctcgactgaatagagatgtaaatagaaaatacacactagatattgaagatttggtatgaaaaaaagtaatttaaggtcaggcatggtggttcacgcctgtaatcccagcactttgggaggcagaggcgggcggatcacctgaggtcaggagtttgagaccagcctggccaacatggtgaaaccccgtctctactaaaaataccaaaattagctgggcatggtggcaggcgcctgtaatcccagctactcgggaggctaaggaaggagaatcacttgaacccaggaggcagaggttgcagtgagccaagattgcgccattgcactccagcctgggcaacaaggtgagactgtgtctcaaaaaaataaaaaagtaaattaaaaatattgattgtatgttgaaataatattttaaatatgttagcttaattaaaatgttattaaagttaatttcttagccaggtatggtggcgtatgcctatagttccagttactcaggaggctgaggcgagagaatcgcttgaagctgggaggcggaggttgcggtgagctgagatcgtgccactgcactgcagcctgggcgacagagcgagactccgtctcagtttaaaaaaaaaaaaagttatttcacctgtttttaattttttaacgtggataactacaaaattttaaatcacatatggctcacgttgtatttctattgtagttccatctagaactttctgattacactataattggacagctctgcccagggttatagaacactagataactattccctccatggttctagaattctccagtctgagtagaaccagatgcctctgttcaccaattctgagcattctcatcagcccagattcctttaccctagaaacagacaaaatgccaagccctggaactccctaggtgtcacagctctgctcgattctagaaccttcttagagctataggttcaaaccagtttttctctctgcaaccacagaactgtttttttttttcttttttttgagacatggtctcactgtcacccaggctggagtgcagtggcacaatcttagctcactgcagcctcaagtgatcctcccacctcagcctcccaagtagctgggattatagacccatgccacgtgcctggctaattttggggggggattttatttttgtggagacagggttttgctgtgtggcccaggctggtctcgaactcctgggctcaagcgatcctcccacatcagcctttcaaagtgttgggattacagatgtgagccacccttcccggccagaacttactatctgacctatatccttagcgaagtgtagaacagaggctggccgcggtggctcacacctgtaatcccagcattttgggaggccgaggcgggtggatcacaaggtcaggagtttgagaccagcctgaccaagacggtgaaacgccgtctctactaaaaatataaaaattagctgggcacggtggcggacgcttgtaatctcagctactcaggaggctgaagcaggagaatcacttgaatccgggcggcagaggttgaagtgagctgagattgcaccactgaaaaaaaaagtctagaacattccagagggccagaaattgttcttcccatgcttttagggcagggcttggcaaacattttctgtaaagggccaaagagtaaatattttcagccttgtaggtcacaaggtatctgctgcagctactcacctctgccattcgaacatcagagcagccatggacaacacatgaataaccaagcatgatgtgtaccaataaaactttatttatgtacactgaaatttgtttttctttttttagagacagagtctcactctattgcccaggctggagtgcaatggcgtgatctcagctcaccgcaacctccgcctcccgggttcatgtgattctcctgcctcagcctcctgagtagctgggattacaggcgtgcactaccatgcccggctaatttttgtatgtttagtagagacggggtttcaccaatgttggccaggctggtctcgaactcctgacctagtgatctgcccaccttggcctcccaaagtgctgggattataggcgtgagccaccgcgcccagcttatgcacactgaaatttgaattgcatttttttatttttgagacagagtctcgctctgttgcctaggctgtagtgcagtggcgtggggtgatctcagctcaccgcagtctcgacctcctgggctcaagaacttctcccgcctcaacctcctgagtagctgggactacaggcatgcaccgccacacctggctaactttaaacattttttgtagagatggggtcttgctacgttgcccaggctggtctccaactcccggctcaagcgatcctcctgcctcagcctcccaaagagctgggattacacgtgtgagccaccatatccagcctagcatatcattttcacatgtcaagaaatagtattctttggccaggcgtggtggctcacgcttgtaatcctagcactttaggaggccaaggcgggcggatcacaaggtcaggagttcaacaccagcctggccaacacagtgaaaccccatctctactaaaaatacaaaaattagctgggcgtggtggcgagcacctgtaatcccagctacttgggaggctgaggcaggagaatcacttgaacccgggaggcggaagttgcagtgagccgggatcacgccactgcactccaagcctgggtgacagactctgtctcaaaaagaaagaaagaaatagtattcttctttcaatgaaaaaaaaagtcaattaaaaatgcaaaggacacccgggcatggtggctcacgcctgtaatctcagtactctgggaggctgaggcaggcagatcgcttgagctcaggagtttgaaaccagcttgggcaacatggtgaaaccccatctctacccaaataaatacgaaataaaattagctgggcgtggtggcacgcacctgtagtctcagctatttgggaaactgaggtgggaggatcgcttgaacctgggagatggaggttgcagtgagctgagatcaagccactgcactccagcctggataacagaagtcatcaaaaaaagtaaagaagccccaaacgcaaaaaccatctttaactcgagacctacgtgagcaggcagtgagttgggtctggcccgacgacgatgatttgccaagcccggttctagaacccagtgctgccaatggccggagctgccccacagtccccttctcactctaccccgttctcaaggctggctctcctctccctggccagccggaatctgctcgaaaccaccctcagaggctcccgagaacctcgtccttactggcaagctgttgccaggctggtgagcctgattctggctgtctaggggccttcagtgcctgaggctagggtgggcgggacactcaccctcctggggggcagggtaggaagccagggtctcggggctctggaagaagatagaggaggggcaggactgagtctccctgcttggttccaggcagtccaggatgcctggagggcggggcgggcactacctgggcaccagcgggtggctcttcaggtgtgactagaggcaccgtctccagccagggttccggggaactgcttgagctcctgctgccctcctgctcagcagaggccccctccacccattctggggagtcagaatcctcatctgggtcctcagggggctgcaacagtcggggggcaggctctagaggctcttcaggaccagtctgggaaggcgggcattcctcgcagtgcaagaggcccagcaggtcatcccggccagcttcggcagacaggagcccgtgggcatcagcaatctcctgggaggccaggccatggcctgtggcaatgtgtaggggacagggggctccacctggggatgggcccaccagatcgcctggcagagcttcaaactgctgcaccagctcctgaaggcttgactcatcaagttccatccgactgaggctgccggggcctcctggcatagggtcccactggctgtcaggggtgaggtcctccgaaggcacaagaatgtccctgggcccctccaagtccatggctggaggccccgaaggggatcgggaaattgtggggaagtccatgcctggactccaggcttaggccggcatcttcaggcagctgaaagagagagagtcagcactgaggtttcgcccgggtgcagtggctcatgcctgtaatcccagaattttgggaggcccagaagggctgactgaacccaggagttcaagatcagcctgggcaacagagcaagaccctctctctacaaaaaatacaaaaaattaaggccgggcacagtggctcacgcctgtaattcccagcactttgtgaggccgaggcgggcagatcatggggtcaggagtttgagaccagcctgactaacatggtgaaattccgtctctactaaaaatacaaaaaattagccaggtgtggtggcaggcacctgtaatcccagctacgcaagaggctgaggcaggagaatcgcctgaacccgggaggcggaggttgcagtgagctgagatcgcgccattgcactccaaggtgggcgacagacgagactatctccaaaaaaaaaaaaaaaaactagctaggggtggtggtgtaggctgtagtcccagctacttgggaggctgaggtgggaggatcacctgaaccaggggaggcagaggctgcagtgagccttgattgtgccactgcactccagcctgggtgacagagtgaggccctgtcttaaaaaaaacaaacaaacccgaaaaacaaaaaacttgaggtttcccggctgcctatccggtgctaggctctagctgggtactgttcatacagggcacataatttaatacccactaacccttgcaaggaagttaggattcccattttacagatgaagaaactgagccacagaatggggaggtgtgaggcagtggcttcccgagcccctgtgtcatcccagacctctctcaactaatggagtctgttcactccagccctggttcttccaggtcctcctccctcaagacgcggaacccaggctggagacccagacctcacaccctgactctaccgactggtcagaggcagttccccaagaccccagacccaagaccccagtcccatgacctcaacccccaatacctccatccagaactttagacccaggaccctggacttaataccagagacccaagacgccataaggcggaccccagtctccaaacctccaatgctaccccaagatcgactccagactcagaccccgacttcaggacccagccccaagcccagaccctagtcccccctcagaccgaagacctcaagcgccgactcagactgcgctctgcacctcgaggacactcacttcccaaatcgaggccgcctcagccccgcgcagcctccaggaccccgctccccacggacggccccgacgtagcccgggccgcgtcccc

SEQ ID NO: 1465 - DNA, 131 bp, Homo sapiens
cgcaatacgtcatggcgaccaaacgccttttcggggctacccggacgtgggccggctggggggcctgggagctcctaaaccccgccacttccggaagactcctggcccgggattatgccaagaaaccaggt

SEQ ID NO: 1466 - DNA, 5819 bp, Homo sapiens
ggcctgttattcagctctccgctccgctgggacccgcacagcgccagtggctcgggggtcggccctcgcctcctccccggcccgggcctagagccacccctaaccagaggccggagacagctggagcggctgccgcatcccggcccagcctcccctaccatccctcccccttccactggacatctggaccctaggcccccgcaccgacagggttccggaaaccctccccgcccagcccggcggccgggccccgcgcctctctctctctagagcccccagccctcctcaagactagacttccgcctacccctggacacctcctcccggtcccctccctccccccctcccacagcctggaccggggtaggagggagggggggtgtgcgcccggcgccgtccccgccccgccccccgtgattccccctgcatggccggcccgggtggggggcgcgggggggcccgggcgccatgcggggggggcacaaagggggtcgctgtgcctgtccccgtgtgatccgaaaagtgctggcaaaatgcggctgctgcttcgcccgggggggacgtggtgagtgccaggtcgagagggtccagtgttgagtggggggcgggctgggggttcagggcatctgtttgccctggcccttgggatttagggttggagactgtatgtgttttccaggaaagtggtttcttaagtgatccctaaggtcccttctgcctccaaatttctgttagttcaagttaaggaaataggggaaggggcagggaactcatctctttccctttgtcaaatgggtttgagaaaaacccacccacaatccccttaggcctagaaccgattattttcctcaaaccttttgctaagaatctacttctgaagagggacaggagaatggaggaatgagaatgaggtggttctacaaggggctttataaggaatcacagctctctgtcgctgagcacaggccaacgataaccctgatggaccctcctcactggcctcctctattgggtctacgcatgtgttggggaggtgggctgcagaagtcttttctttttatagtgattactgcaattggtggaggaggggactgggagtggcagatggacccagctcatcctcccctcttcccagagaatggtctgtacccattgaaagagggagggttgtaggagagcagatggccacccccagcttccaatgtctgcccagatggctgcccccacccccatatctatgctatgctcaggatatggggaacctccacatgtaactgggggttccaggcctggagagccaggcgtttaccttactgtgctttctcccaggggtgccctggtgaaattttctatcctggccaactcaaatgaggatggcaagagagtgagcccttggagagagaggctgagcatcatgaagagaagaccctgggagttccctggggaccctgagtctggagctggggcaaggtctatcacctcctctctttttcctcccattagaatcctattccattgcgggcagtgaggggagtatatcggcttctgctgcctccggtctggctgccccctctggccccagctctggcctcagctctggcccctgttccccaggccccccagggcccgtcagtggcctgaggagatggttggatcattccaaacattgtctcagtgtggaaactgaggcagacagtggtcaggcaggaccatatgaggtgagcagggaacggcaccaaagcatgtgggacatctatgaaggacactggcagagagggcaagttggggccacccagctactgtccccgacctctgacacttgatttctggcccccagaactggatgttggagccagctctagccacaggagaggagctgccggaactgaccttgctgaccacactgttggagggccctggagataagacgcaggtgtgaggacaggctctggggaggctcctttcactcaaggggcattcgtttgctcaccctaggatgttctttccttccagccacctgaagaggagactttgtcccaagcccctgagagtgaggaggaacagaagaagaaggctctggaaaggagtatgtaagtgtccacagcccttccctgcagttgcacaacttccagaagactgtccctcacattttagatggaatttcctccaaggttggctatgatgataaaggggaggagggaggaacgggctgaaccaaggatgagctccgacgctgaagtgggggcctcctcctgctttcatcctaggtatgtcctgagtgaactggtagaaacagagaaaatgtacgtggacgacttggggcagattgtggaggtagctccctttaccccttcccagcccctcctgcctgcttttccatctgcccagggctattttcaggaggtgcctgggcgctcctctgtcccacctctcaagcctccccactcctggaccttcctactctgggggcagggcggctcccaccagggagggggaggtggaacacaccctggatttgtgtacaggagcaccattaaggtggggagagggccaccacatgctcatgacccaacctcaactttcccacagggttatatggccaccatggctgctcagggggtccccgagagtcttcgaggccgtgacaggattgtgtttgggaatatccagcaaatctatgagtggcaccgagagtgagtggtggaactctgacagctaggtgctggagaggggccctcatctggttgtcctgtatcctaacatcagcccattgcgacttaaggaatgtttggagaagttttgtagggcacactaccagggcagacagctcgaaactgctgggagtgggcgaggtgggggttgtgaaatgtatttgacctgctgcttctctaccaacccctccagctatttcttgcaagagctacaacggtgtctgaaagatcctgattggctggctcagctattcatcaaacacgtgaggcttgagggggcagggcctggggcggggcttaggaatgggctgggattctctggagatgcgtcctccctccttgcccaccctgctctctcttaaacattacccctgttaggagcgccggctgcatatgtatgtggtgtactgtcagaataagcccaagtcagagcatgtggtgtcagagtttggggacagctactttgaggtcagtagctgagatgtcttggtgggaaggaggacagaactggggctttccaggctgcataaccaccctgtccctgtccccaggagctccggcagcagctggggcaccgcctgcagctgaacgacctcctcatcaaacctgtgcagcggatcatgaaataccagctgctgctcaaggtcaggaccccctttttcctgggggcacagctggctggcacagctgtttcctcattcatctccccagggttcttagggctcccccagacttcctgagggccctcactggtgtcctcaggggaggatgtgagagcttctaagggtgtcctcgtgacctccctgagcatttcttctctctgtcttaggattttctcaagtattacaatagagctgggatggatactgcagacctagaggtgaggaccccagatcttccaggacacaccatgtgctccttatcctcctagtatctcatgggttcccccagccccttgggtggtttacagctgtctggtttttagggggaggctggttggggttgagataccgtctgaagaggcaactggctgaggaggcctctttcccaataatgactctcttcgcccaacaatgcgcctccctcacctgtgtcccagcaagctgtggaggtcatgtgctttgtgcccaagcgctgcaacgatatgatgacgctggggagattgcggggatttgaggtacggagatagggcaagaaactggaggcccgatgctcttctgccccagccctagcattcaggaggtccttatggggagttgtcttctcctggggctgaccccatggttggttgggcatgtcaggcgaggaagggaggagcagagaattgtcctttttcttgttctttttccaaggccactatccttttggtttcagggcaaactgactgctcaggggaagctcttgggccaggacactttctgggtcaccgagcctgaggctggagggctgctgtcttcccgaggtcgagagaggcgcgtcttcctctttgagcaaatcatcatcttcagtgaagccctgggaggaggagtgagaggtggaacacagcctggatatgtatacaagaacagcattaaggtggggagaaggccacgagggagggcttggagagagagagggcatgaggcctctgagaggatgtctcagaggagccagggagggcctgaggaatctgggggctgtctcctatctgccaattcaggtgagctgcctgggactggaggggaacctccaaggtgacccttgccgctttgcactgacctccagagggccagagggtgggatccagcgctatgtcctgcaggctgcagaccctgctatcagtcaggcctggatcaagcatgtggctcagatcttggagagccaacgggacttcctcaacggtgaagctctcatcctttcttcccgatgtgctctctcagccccttaacctcctgaatccctcactgcccagtctccagtacctaccctctgaccatggcccatccccttttccactgctagctcaaaatttgatagaatcccctaaagccctaagcaattgacattggctgacagggagggagggcaaagtgggagaatgatacaggccctagggagcagacctgtctctgcggtaaccctccttctgttcctctctttgctccagcattgcagtcacccattgagtaccagagacgggagagccagaccaacagcctggggcggccaagagggcctggagtggggagccctggaagaattcagcttggagatcaggcccagggcagcacacacacacccatcaatggctctctcccctctctgctgctgtcacccaaaggggaggtggccagagccctcttgccactggataaacaggtatgacgaatagagctccctcattgtagggataaaaaggggagagcctctcttgttctgggaccccaagttccctccccatatcattccttccttttatctggtccttcctacttcccatcccttacgcttctcccctctattttaactctggagaagctgatagtctcagacagtctaagatatctagcaagaggaggtggcttggctagggacttaaactgaaaagagagaagtgagggtagatttctggcctttttgatcctctgacttgaatcttttcttcaggcccttggtgacatcccccaggctccccatgactctcctccagtctctccaactccaaaaacccctccctgccaagccagacttgccaagctggatgaagatgagctgtaactggtgaaaaccatgggggtggtgctgactcagccgcctattccccaaggagcttcagggcagtccttctggcactgctccagaattcctccttcttggtgtgtctggagggtgggcaaggctgggagggatatcaacttggaggagaacacctagacccaaggacttttttctgcccaaggaacacagtttccttcagctcccatccctatgcatgcatcatggtccccccaaaaggaggatatgtgggtgggtgggagggctggggcaggggccagatagaaattattggttttgttttttaattttgtttttcctgttttctgagaataaaggttttgttatatcacc

SEQ ID NO: 1467 - DNA, 4540 bp, Homo sapiens
ccaggcctgactgatagcagggtctgcagcctgcaggacatagcgctggatcccaccctctggccctctggaggtcagtgcaaagcggcaagggtcaccttggaggttcccctccagtcccaggcagctcacctgaattggcagataggagacagcccccagattcctcaggccctccctggctcctctgagacatcctctcagaggcctcatgccctctctctctccaagccctccctcgtggccttctccccaccttaatgctgttcttgtatacatatccaggctgtgttccacctctcactcctcctcccagggcttcactgaagatgatgatttgctcaaagaggaagacgcgcctctctcgacctcgggaagacagcagccctccagcctcaggctcggtgacccagaaagtgtcctggcccaagagcttcccctgagcagtcagtttgccctgaaaccaaaaggatagtggccttggaaaaagaacaagaaaaaggacaattctctgctcctcccttcctcgcctgacatgcccaaccaaccatggggtcagccccaggagaagacaactccccataaggacctcctgaatgctagggctggggcagaagagcatcgggcctccagtttcttgccctatctccgtacctcaaatccccgcaatctccccagcgtcatcatatcgttgcagcgcttgggcacaaagcacatgacctccacagcttgctgggacacaggtgagggaggcgcattgttgggcgaagagagtcattattgggaaagaggcctcctcggccagttgcctcttcagacggtatctcaaccccaaccagcctccccctaaaaaccagacagctgtaaaccacccaaggggctgggggaacccatgagatactaggaggataaggagcacatggtgtgtcctggaagatctggggtcctcacctctaggtctgcagtatccatcccagctctattgtaatacttgagaaaatcctaagacagagagaagaaatgctcagggaggtcacgaggacacccttagaagctctcacatcctcccctgaggacaccagtgagggccctcaggaagtctgggggagccctaagaaccctggggagatgaatgaggaaacagctgtgccagccagctgtgcccccaggaaaaagggggtcctgaccttgagcagcagctggtatttcatgatccgctgcacaggtttgatgaggaggtcgttcagctgcaggcggtgccccagctgctgccggagctcctggggacagggacagggtggttatgcagcctggaaagccccagttctgtcctccttcccaccaagacatctcagctactgacctcaaagtagctgtccccaaactctgacaccacatgctctgacttgggcttattctgacagtacaccacatacatatgcagccggcgctcctaacaggggtaatgtttaagagagagcagggtgggcaaggagggaggacgcatctccagagaatcccagcccattcctaagccccgccccaggccctgccccctcaagcctcacgtgtttgatgaatagctgagccagccaatcaggatctttcagacaccgttgtagctcttgcaagaaatagctggaggggttggtagagaagcagcaggtcaaatacatttcacaacccccacctcgcccactcccagcagtttcgagctgtctgccctggtagtgtgccctacaaaacttctccaaacattccttaagtcgcaatgggctgatgttaggatacaggacaaccagatgagggcccctctccagcacctagctgtcagagttccaccactcactctcggtgccactcatagatttgctggatattcccaaacacaatcctgtcacggcctcgaagactctcggggaccccctgagcagccatggtggccatataaccctgtgggaaagttgaggttgggtcatgagcatgtggtggccctctccccaccttaatggtgctcctgtacacaaatccagggtgtgttccacctccccctccctggtgggagccgccctgcccccagagtaggaaggtccaggagtggggaggcttgagaggtgggacagaggagcgcccaggcacctcctgaaaatagccctgggcagatggaaaagcaggcaggaggggctgggaaggggtaaagggagctacctccacaatctgccccaagtcgtccacgtacattttctctgtttctaccagttcactcaggacatacctaggatgaaagcaggaggaggcccccacttcagcgtcggagctcatccttggttcagcccgttcctccctcctcccctttatcatcatagccaaccttggaggaaattccatctaaaatgtgagggacagtcttctggaagttgtgcaactgcagggaagggctgtggacacttacatactcctttccagagccttcttcttctgttcctcctcactctcaggggcttgggacaaagtctcctcttcaggtggctggaaggaaagaacatcctagggtgagcaaacgaatgccccttgagtgaaaggagcctccccagagcctgtcctcacacctgcgtcttatctccagggccctccaacagtgtggtcagcaaggtcagttccggcagctcctctcctgtggctagagctggctccaacatccagttctgggggccagaaatcaagtgtcagaggtcggggacagtagctgggtggccccaacttgccctctctgccagtgtccttcatagatgtcccacatgctttggtgccgttccctgctcacctcatatggtcctgcctgaccactgtctgcctcagtttccacactgagacaatgtttggaatgatccaaccatctcctcaggccactgacgggccctggggggcctggggaacaggggccagagctgaggccagagctggggccagagggggcagccagaccggaggcagcagaagccgatatactcccctcactgcccgcaatggaataggattctaatgggaggaaaaagagaggaggtgatagaccttgccccagctccagactcagggtccccagggaactcccagggtcttctcttcatgatgctcagcctctctctccaagggctcactctcttgccatcctcatttgagttggccaggatagaaaatttcaccagggcacccctgggagaaagcacagtaaggtaaacgcctggctctccaggcctggaacccccagttacatgtggaggttccccatatcctgagcatagcatagatatgggggtgggggcagccatctgggcagacattggaagctgggggtggccatctgctctcctacaaccctccctctttcaatgggtacagaccattctctgggaagaggggaggatgagctgggtccatctgccactcccagtcccctcctccaccaattgcagtaatcactataaaaagaaaagacttctgcagcccacctccccaacacatgcgtagacccaatagaggaggccagtgaggagggtccatcagggttatcgttggcctgtgctcagcgacagagagctgtgattccttataaagccccttgtagaaccacctcattctcattcctccattctcctgtccctcttcagaagtagattcttagcaaaaggtttgaggaaaataatcggttctaggcctaaggggattgtgggtgggtttttctcaaacccatttgacaaagggaaagagatgagttccctgccccttcccctatttccttaacttgaactaacagaaatttggaggcagaagggaccttagggatcacttaagaaaccactttcctggaaaacacatacagtctccaaccctaaatcccaagggccagggcaaacagatgccctgaacccccagcccgccccccactcaacactggaccctctcgacctggcactcaccacgtcccccccgggcgaagcagcagccgcattttgccagcacttttcggatcacacggggacaggcacagcgaccccctttgtgccccccccgcatggcgcccgggcccccccgcgccccccacccgggccggccatgcagggggaatcacggggggcgggcgggacacgccgggcgcacaccccccctccctcctaccccggtccaggctgtgggagggggggagggaggggaccgggaggaggtgtccaggggtaggcggaagtctagtcttgaggagggctgggggctctagagagagagaggcgcggggcccggccgccgggctgggcggggagggtttccggaaccctgtcggtgcgggggcctagggtccagatgtccagtgtatagggggagggatggtaggggaggctgggccgggatgcggcagccgctccagctgtctccggcctctggttaggggtggctctaggcccgggccggggaggaggcgagggccgacccccgagccactggcgctgtgcgggtcccagcggagcggagagctgaataacaggcc

SEQ ID NO: 1468 - DNA, 5819 bp, Homo sapiens
ggcctgttattcagctctccgctccgctgggacccgcacagcgccagtggctcgggggtcggccctcgcctcctccccggcccgggcctagagccacccctaaccagaggccggagacagctggagcggctgccgcatcccggcccagcctcccctaccatccctcccccttccactggacatctggaccctaggcccccgcaccgacagggttccggaaaccctccccgcccagcccggcggccgggccccgcgcctctctctctctagagcccccagccctcctcaagactagacttccgcctacccctggacacctcctcccggtcccctccctccccccctcccacagcctggaccggggtaggagggagggggggtgtgcgcccggcgccgtccccgccccgccccccgtgattccccctgcatggccggcccgggtggggggcgcgggggggcccgggcgccatgcggggggggcacaaagggggtcgctgtgcctgtccccgtgtgatccgaaaagtgctggcaaaatgcggctgctgcttcgcccgggggggacgtggtgagtgccaggtcgagagggtccagtgttgagtggggggcgggctgggggttcagggcatctgtttgccctggcccttgggatttagggttggagactgtatgtgttttccaggaaagtggtttcttaagtgatccctaaggtcccttctgcctccaaatttctgttagttcaagttaaggaaataggggaaggggcagggaactcatctctttccctttgtcaaatgggtttgagaaaaacccacccacaatccccttaggcctagaaccgattattttcctcaaaccttttgctaagaatctacttctgaagagggacaggagaatggaggaatgagaatgaggtggttctacaaggggctttataaggaatcacagctctctgtcgctgagcacaggccaacgataaccctgatggaccctcctcactggcctcctctattgggtctacgcatgtgttggggaggtgggctgcagaagtcttttctttttatagtgattactgcaattggtggaggaggggactgggagtggcagatggacccagctcatcctcccctcttcccagagaatggtctgtacccattgaaagagggagggttgtaggagagcagatggccacccccagcttccaatgtctgcccagatggctgcccccacccccatatctatgctatgctcaggatatggggaacctccacatgtaactgggggttccaggcctggagagccaggcgtttaccttactgtgctttctcccaggggtgccctggtgaaattttctatcctggccaactcaaatgaggatggcaagagagtgagcccttggagagagaggctgagcatcatgaagagaagaccctgggagttccctggggaccctgagtctggagctggggcaaggtctatcacctcctctctttttcctcccattagaatcctattccattgcgggcagtgaggggagtatatcggcttctgctgcctccggtctggctgccccctctggccccagctctggcctcagctctggcccctgttccccaggccccccagggcccgtcagtggcctgaggagatggttggatcattccaaacattgtctcagtgtggaaactgaggcagacagtggtcaggcaggaccatatgaggtgagcagggaacggcaccaaagcatgtgggacatctatgaaggacactggcagagagggcaagttggggccacccagctactgtccccgacctctgacacttgatttctggcccccagaactggatgttggagccagctctagccacaggagaggagctgccggaactgaccttgctgaccacactgttggagggccctggagataagacgcaggtgtgaggacaggctctggggaggctcctttcactcaaggggcattcgtttgctcaccctaggatgttctttccttccagccacctgaagaggagactttgtcccaagcccctgagagtgaggaggaacagaagaagaaggctctggaaaggagtatgtaagtgtccacagcccttccctgcagttgcacaacttccagaagactgtccctcacattttagatggaatttcctccaaggttggctatgatgataaaggggaggagggaggaacgggctgaaccaaggatgagctccgacgctgaagtgggggcctcctcctgctttcatcctaggtatgtcctgagtgaactggtagaaacagagaaaatgtacgtggacgacttggggcagattgtggaggtagctccctttaccccttcccagcccctcctgcctgcttttccatctgcccagggctattttcaggaggtgcctgggcgctcctctgtcccacctctcaagcctccccactcctggaccttcctactctgggggcagggcggctcccaccagggagggggaggtggaacacaccctggatttgtgtacaggagcaccattaaggtggggagagggccaccacatgctcatgacccaacctcaactttcccacagggttatatggccaccatggctgctcagggggtccccgagagtcttcgaggccgtgacaggattgtgtttgggaatatccagcaaatctatgagtggcaccgagagtgagtggtggaactctgacagctaggtgctggagaggggccctcatctggttgtcctgtatcctaacatcagcccattgcgacttaaggaatgtttggagaagttttgtagggcacactaccagggcagacagctcgaaactgctgggagtgggcgaggtgggggttgtgaaatgtatttgacctgctgcttctctaccaacccctccagctatttcttgcaagagctacaacggtgtctgaaagatcctgattggctggctcagctattcatcaaacacgtgaggcttgagggggcagggcctggggcggggcttaggaatgggctgggattctctggagatgcgtcctccctccttgcccaccctgctctctcttaaacattacccctgttaggagcgccggctgcatatgtatgtggtgtactgtcagaataagcccaagtcagagcatgtggtgtcagagtttggggacagctactttgaggtcagtagctgagatgtcttggtgggaaggaggacagaactggggctttccaggctgcataaccaccctgtccctgtccccaggagctccggcagcagctggggcaccgcctgcagctgaacgacctcctcatcaaacctgtgcagcggatcatgaaataccagctgctgctcaaggtcaggaccccctttttcctgggggcacagctggctggcacagctgtttcctcattcatctccccagggttcttagggctcccccagacttcctgagggccctcactggtgtcctcaggggaggatgtgagagcttctaagggtgtcctcgtgacctccctgagcatttcttctctctgtcttaggattttctcaagtattacaatagagctgggatggatactgcagacctagaggtgaggaccccagatcttccaggacacaccatgtgctccttatcctcctagtatctcatgggttcccccagccccttgggtggtttacagctgtctggtttttagggggaggctggttggggttgagataccgtctgaagaggcaactggccgaggaggcctctttcccaataatgactctcttcgcccaacaatgcgcctccctcacctgtgtcccagcaagctgtggaggtcatgtgctttgtgcccaagcgctgcaacgatatgatgacgctggggagattgcggggatttgaggtacggagatagggcaagaaactggaggcccgatgctcttctgccccagccctagcattcaggaggtccttatggggagttgtcttctcctggggctgaccccatggttggttgggcatgtcaggcgaggaagggaggagcagagaattgtcctttttcttgttctttttccaaggccactatccttttggtttcagggcaaactgactgctcaggggaagctcttgggccaggacactttctgggtcaccgagcctgaggctggagggctgctgtcttcccgaggtcgagagaggcgcgtcttcctctttgagcaaatcatcatcttcagtgaagccctgggaggaggagtgagaggtggaacacagcctggatatgtatacaagaacagcattaaggtggggagaaggccacgagggagggcttggagagagagagggcatgaggcctctgagaggatgtctcagaggagccagggagggcctgaggaatctgggggctgtctcctatctgccaattcaggtgagctgcctgggactggaggggaacctccaaggtgacccttgccgctttgcactgacctccagagggccagagggtgggatccagcgctatgtcctgcaggctgcagaccctgctatcagtcaggcctggatcaagcatgtggctcagatcttggagagccaacgggacttcctcaacggtgaagctctcatcctttcttcccgatgtgctctctcagccccttaacctcctgaatccctcactgcccagtctccagtacctaccctctgaccatggcccatccccttttccactgctagctcaaaatttgatagaatcccctaaagccctaagcaattgacattggctgacagggagggagggcaaagtgggagaatgatacaggccctagggagcagacctgtctctgcggtaaccctccttctgttcctctctttgctccagcattgcagtcacccattgagtaccagagacgggagagccagaccaacagcctggggcggccaagagggcctggagtggggagccctggaagaattcagcttggagatcaggcccagggcagcacacacacacccatcaatggctctctcccctctctgctgctgtcacccaaaggggaggtggccagagccctcttgccactggataaacaggtatgacgaatagagctccctcattgtagggataaaaaggggagagcctctcttgttctgggaccccaagttccctccccatatcattccttccttttatctggtccttcctacttcccatcccttacgcttctcccctctattttaactctggagaagctgatagtctcagacagtctaagatatctagcaagaggaggtggcttggctagggacttaaactgaaaagagagaagtgagggtagatttctggcctttttgatcctctgacttgaatcttttcttcaggcccttggtgacatcccccaggctccccatgactctcctccagtctctccaactccaaaaacccctccctgccaagccagacttgccaagctggatgaagatgagctgtaactggtgaaaaccatgggggtggtgctgactcagccgcctattccccaaggagcttcagggcagtccttctggcactgctccagaattcctccttcttggtgtgtctggagggtgggcaaggctgggagggatatcaacttggaggagaacacctagacccaaggacttttttctgcccaaggaacacagtttccttcagctcccatccctatgcatgcatcatggtccccccaaaaggaggatatgtgggtgggtgggagggctggggcaggggccagatagaaattattggttttgttttttaattttgtttttcctgttttctgagaataaaggttttgttatatcacc

SEQ ID NO: 1469 - DNA, 604 bp, Homo sapiens
cccagcagaagcctctttctcctctctgcccctggccccccacaccacacctgtaggggacctgtctgactgggaagggagttccgagagggagggggcaatcccttcccccatcccccactggccaagtgtttcaatgcagtgtgagccactcccttctggcagaggccgacctccaaggctctgttctcccctccccgtgtacatatactcccggtttccctgcccctccattgcccttggctttttctggtatgtgctgtgctccacgaccaagccgagaaaggacctagggtggggaagggagggtctcttgattcctaaccgcccccacatactgctccaccgctgaacttcgggtgccggggaggagaaattgggctgatgtgagctccccgtcacccgccatggagccggctgtgtgtgttcatcagatacagttctcccttaaccttgtcctttctctcctgtgtctcagtctccgtcagtctgtctttctccgctcttctctgacccctgtgaggaacctccttaccctgttctggaatcgctgccagactgtagcttttaatttaataaaaataaagtaaaatatgcaactctt

SEQ ID NO: 1470 - DNA, 5378 bp, Homo sapiens
aagagttgcatattttactttatttttattaaattaaaagctacagtctggcagcgattccagaacagggtaaggaggttcctcacaggggtcagagaagagcggagaaagacagactgacggagactgagacacaggagagaaaggacaaggttaagggagaactgtatctgatgaacacacacagccggctccatggcgggtgacggggagctcacatcagcccaatttctcctccccggcacccgaagttcagcggtggagcagtatgtgggggcggttaggaatcaagagaccctcccttccccaccctaggtcctttctcggcttggtcgtggagcacagcacataccagaaaaagccaagggcaatggaggggcagggaaaccgggagtatatgtacacggggaggggagaacagagccttggaggtcggcctctgccagaagggagtggctcacactgcattgaaacacttggccagtgggggatgggggaagggattgccccctccctctcggaactcccttcccagtcagacaggtcccctacaggtgtggtgtggggggcagggggcagagaggagaaagaggcttctgctgggtcctagtagaggcagacagcaggggccttggcaaaggcgatgtccttcagtcatctgtgatacccttcgctctcagctcctcttgcacccgggtcaggtaggtggggtctgggtacccaaacctgggagcaaagagaaatgagggtgagggttgttagctgtttgaacttgctattatccccatgctcaccctcattctaggtggctcagacacctccccacctcccctaagggaggacacctccaaatccaagataatttagcccagttctgcttatttttgtaggctaagctgggcacaccaggaccaggttgaatgtaggagaaactgagatggctgaacagtttggaagtggttctctccagttaggaggctccgtgagcgaggggttggtgggtccctcagtggaaatggaacaaaggggaggagccaagggaaaggaaatgaagaggggtcgcacagctggggtccccctgtgcagctggtcttgtggtggatgtcgttccaggtgatgacattcggtctccctgtggtcatggacgtgccgatagtgaaggtgagacgctggtcaaacgccttgcggaacagggtcagcaccttgttgccctcagggcagtccgggaggtaggccacccgtgtggtgccaggataccgaactcctgggtttgggtgttcagcctgggaggaaggtgaagcagagtgggcagtgagcagccaggcatcctaaggcccagatgccagaggagggtcatccaggctagtctctgtctgagcacccccagctaatgcgaacggggcagcaacaggctgacagctttccacagaaggagagattatacggcctcggcagcaagagcctgtttcagagcataatccttatgtgttaagagattttttctgctgtctcaatccctcaagtctccattcagcaacaaatggattctcagaagtgatggaagttagctggtccctacactccagacaactcagcaaaaatgtgaagacagaataatctatctttcagccttcccttcacctgaaaatactcctaatgtttctgccactgtctaacttgttccattttccatcactcttctgtgcagcttcttcacccctctgcagccagaattgcacattactctttgtccagcaggaagacacctataggccttgactactcctgtttttacagagtgatgctcctggctctgttgggttggtcagatcccttcctattgtgcctcccttcccctaagccaccacctccacagaatttacctctgccaagatgtcagcacagtatttgtgttcatcaaggaaataatatgcaattccttcctctcatatctgatttgcttttttttttcctagctcatatctgattttcacgtgtgccttgggatcacagggatggaaaggctgggcctcacggggacctcctaggtccagggcactgagtaggagggcacagtggaagacagcaagactgtctcacatctaacaagcacactcaccctcacccggttttcctaggtcagagcttggggaaagccaaagggtaagggcaggccatggtcttcttaccccctggacaccgggcgggaagacgtactggatgacaatggtgccgtacttctcatagctgggcagtaggagggtggcgtccttagagaccagcatccgcccattctggggctggttgcccaccagctgcccatagaagcggccgcacatggggcaggcctttttcacctgcagagcccgggtgatgcagccctcgcagaatgaatgccggcacttctccaatgtcttggcattctggatctcccccagacagatggggcaggtgctctcctgctcttctgcctcctcccgaaggcgaggaggaagaggtgggggcagggggggaggaggaggggggagcccccgagctcctgggggcagaagtggggctgctcggagagggggtgggcctgcgcggtgcatctcagggtgctcccctccaccccccagagccaggcagcccatcagctccccctgcctctgagctttcttcagctctttctctgcctcttttagcagccccttgagagccttccgggctaggtagagcccatttggaggggccgggggaggaccctgtggggaaagctggagaacatagatgtcagaagtctcgccatctatgaggatggacacacggtgctcctcccgaagccgggccagccgggctggggtctctttgctcaggaagtcccacacgggcttggacacagtcactttgttcttgcaggtgcctccacaggctgccattctggacaggacgaacgacactgcccccagggtgaaagggactcagggtggggggtccccatttgacaagtatcagtgcctcctacttcaggttccttccaaaccctctattacctctgttttctcaaagcctaatccccaacccttcacccaaattcatattctgtctccccttatcttccaaacccaaaacccactgaagagcaaaaaagtttccagagctatattatcatctaagccaagtatcagtcttgtttctcctgtcatttctcccagatcatagaaacaacttgcccctcccacctcttggggaaaaatgggctgtttaaaggggagggagactctttgcccctcctttttgcttactttgatcctgaagagcttagaattggcatgcaggctcactcttctttccctgctccctacttgtaggtcgtgtgacctggtagggcggaaaaatggaaggaaagtgagaaaccccttctcccaattcccatggcccccaacccagcagcccatggaacagagacagaaacctgggtataggttactaagaatggcattacttggaacatggaatgaaggaaaccagtttaagggtgaaaattgaggatcccttgcgggggagatacctggaaagcccatggaagatgatggcagcagaaatccttctatttccactcagctgaccaggactgggagtgggggaagggtaaaaagttatgatggcaaatgttaccattcccctcagccaacccagaaataaaaactccccttccatctcctctcttctctgcagaattccattatcagcttctccccaagttgctcaagaaggaacttcaacatgctaaccttcctcctttcttccccagctctgaggcccccaagaaagcctagggcacacataagagaagtcaggaaagaaaacgcccacacaggtggaggtcttcttgccacctccctcagatcacatggaccggaatatttcctatgctccccaactcctcgcctgctccacattgccaaataattcagcccctattgccagggagccttccttgagagctaactcagtcccttctgctgaagtctgttaaggatgtgaacaaagtggcagcagcccctgcaataacaaagttctcattgtcaccttttaaacccagcacaggcagtgctgtctgtcagctcccaagtctggcatttagggaggggcggggctcacacaagggctcagctggaggggcctgatgttttccctgagtctggtcgcattgggctacggggctgtctccacaacacttccaaatgcagctcaaacagaaagaagggccattagtgtgacctccatttattgactgatccaagaaggagcagctgtcccttcatgcctccatcatcgtcccccaaggccagatgcacctcgagattcataagtgaaaatggaaccctagagtctcagcccatacagtctatccgcgatgcaacacttctctccccatcacgggggacccaggacctaggtgtcctaggtccaagtcctgctggcacagaaaagggaggcggggccccagtttagggtgggtctgtgattcctctgtggcaacccaggccggacaaggaaccagtctctccctccagacagaggccagagggaggcacagcccggatgggcaagggtccctgggggcatccactgaagcagctcccgccctccccccacggcctcctccaagacccgacccggaaccaactccccacatccctcagtagccaaagcccccggatccccaccgccgggtgggggtgcatgtcggcccgatcgcagccctcagaacccccgaatggaggccaaggctggagggtgctagaaagatgatcggccgggcacggagcggggagcccggagccgcgcgcggggaggggaggtggaggagggggcgccgggggagcggggggcgcgtgaggggtgcgagcggggcccggggggcgcgcggtgggtgtggggggcgccgggctcacctacctctcgtcagcgccgccattgccggtcacatgactgaggctgttgctgggatgacggtccgggccttagcaacaaggagggggagaccccgaaaggtgggggattgcagggggtgcaggctgaggaaaagggaaggagggaggacagcaccccctttcccctcacaggtgataatcaccgttcctttgacccccttctatccgcaagcccctgcccttcctccccaaaacaaaaatggaggcgctgtcccagtctttggagggagggggtggcgtcatggaactgagggtaggaggttaaatccctggagacgccaccctactcgctccccgctcccggcggagcactctcccttttctttcccagccagctgcgtagcagctcccaggagctggtggtggatgggtgggtgaagtgttggtgggtatatgggg

SEQ ID NO: 1471 - DNA, 10322 bp, Homo sapiens
ccgggccccgccaggcgcctctccataaagatgaagaagctgccggaactgcggcgccgcctgagcctgcgaggcccccgggctggcagggagcgcgagagggctgcccctgcgggctccgtcatcagccgctaccacctggacagcagcgtggggggccccgggccggcagcagggcctgggggcacccggagcccgagggccggttacctcagcgacggggactcaccggagcgcccagctgggcccccatcacccacctccttccggccctacgaggtgggtcccgcagcccgggcacccccggccgcactctggggccgcctcagcctgcacctgtacggtctcggggggctgcggccagcgccgggggccacccccagggacctctgctgcctactgcaagtggatggggaggccagggcccgaacagggccactgcgaggggggccggacttcctgcggctggaccacaccttccacctggagctggaggccgccaggctcctgcgcgccctggtgcttgcgtgggaccctggcgtgagaaggcaccggccctgtgcccagggcaccgtgctgctgcccacggtcttccgaggtaggacatgcggctgcaggggaggaggggcagggacccccaaaccccaccgccaccccccgcagagtgcctagggggctgggctccgggcggaaggtgtggcctggagcagcgaggccagggtacatgaagcttcagagcacacccggctcaggcccccttgtgtcctcagggtgccaggcccaacagctggccgtgcgcctggagcctcaggggctgctgtatgccaagctgaccctgtcggagcagcaggaagcccctgccacagctgagccccgcgtctttgggctgcccctgccactgctggtggagcgggagcggccccccggccaggtgcccctcatcatccagaagtgcgttgggcagatcgagcgccgagggctgcgggtgagcacccaccccaccccaaccctctggcccccagacctcagaccactcttcaggacaccctatgtacagatgccagacccctacccccaggcctgagccactcctagctccaatcccaacctagacaagggcagaaggcgcccccttgactgtagcaccctgggcagaacccatgggtcatccattgatttaaaaacaggatccaagccctcctggggctcagagtctgatgggggaaaagatacgactctagtcattcacaaatgtaaaactataactgggactggagttggggtggggtgtacctagggtctgggagagcttaaaacaaaacctggggtagtcatggaaagcctcctcaaagaagtgtcagtttcctaagtcaaaggagatggcagccaagacaagtagtccaagcagagggtttacaaggccaggttgtcaaggtagttccaacctcccagcccacaatgcccattgctgcctggcccagaattccagtgctcaccccactgggccctgattagtctgtggccccggcaagaagacattcactctctcttcccacccccaggtagtgggactgtaccgtctttgtggctcagcggcagtgaagaaagagcttcgggatgcctttgagcgggacagtgcagcggtctgcctatctgaggacctgtaccccgatatcaatgtcatcactggtcagcatggccccctctcccctgcctgctcacccccattcaatgcctcacttcaaggccttggggctcctctgggacctcagtcctcctatctgaccttgctttcacccacctcctcttcccccttagctgtgccctccttagccttagaagccagtggtgccctgaccagaggggaccctgtgttcacaggcatcctcaaggattatcttcgagagttgcccaccccactcatcacccagcccctgtataaggtggtactggaggccatggcccgggaccccccaaacagagttccccccaccactgagggcacccgagggctcctcagctgcctgccagatgtggaaagggtgagttgggcctggtgggagtgatgggacttgagagtgggctgataccaatagaatgtttcacccatgcctgggcctgagatgggcatgagctggcagcatcatcatatccccaagaaataggtgctattagcatcccacttcatagatttggaaactgaggcccaaagcaggtgacagttgcccaaggtcacacagccaggatgtgtcaaaaatgcaggctgaacgctgatctttcaacctacaagggaggttcctggctgagggaacctagacaagtcccatccctctctgtgcttcaatatcttcatctgtaaaatgagattcatggcagctctgcttttccaatgcttagttgcctttggcttcagtcttccctccaacaaaataggctcataatactaacatctaatgattaatagtcttaacccgaccacatcccagctatgagactgtgaacctgcttccctactctagccaccttagtctcttgcaggtaggtgccacaggggcctgactttgtctgacttacatcctctcaaccctctcccaggccacgctgacgcttctcctggaccacctgcgcctcgtctcctccttccatgcctacaaccgcatgaccccacagaacttggccgtgtgcttcgggcctgtgctgctgccggcacgccaggcgcccacaaggcctcgtgcccgcagctccggcccaggccttgccagtgcagtggacttcaagcaccacatcgaggtgctgcactacctgctgcagtcttggccaggtgagttcatgcccagggcctgcaccaccaatctgagccaggctgctacagtgatgccaccttaagggaccaatcagtgtcttaggcttgaagctacgccccctcatggagtaaactggtacctggttgcctcagcaaccagttcagatccaaccaatctgtctgttttgtctttttttattttcatttttttgtaaagacagggtttctctatattgcccaagctggtctcaaacgcatgatctcaagccatccttccgcctcagcctcccaaagtactgggattataaaccaaatcaccttgccccacagagctgattcatctttttatttttattttttattttttttgagatggagtcttgctctctagcccaggctggggtgtggtggcatgatctcagctcactgcaacctctgcctcccaggttcaagggattctcccacctcagcctcccgagtagctgggattataggcacgcaccaccagtcctggctaatttttatattttaagtagagcagggtttcactgtgttggccaggctggtcttgaactcctgacctcaagtgatccacccatttcaggcctctcaaagtgctgggattacaggcatgcactaccaatcctagctaatttttgtatttttagtggagatggggcttcacggtgttggccaggctggtcttgaactcctgacctcaagtgatccgcctgcctcaggcctcccaaagtgctgggattacaggcatgatccaggcatgatccacagacctgcccctacccatctttgatgcagtcagaggccctgcctcttgacatgccaatcagaggcctagttgcgtaagcaaccagtcctagctctgccagtgaaaacctgaaagggtcgaaggccgctttccacaggccaatcaggagcctagttccctaagcagccaatcagaggtcggctgtcgcctctttctatgacctaccctgtctcccttcagatccccgcctgccccgacaatctccagatgtcgcgccttacttgcgacccaaacgacagccacctctgcacctgccgctggcagaccccgaagtggtgactcggccccgcggtcgaggaggccccgaaagccccccgagcaaccgctacgccggcgactggagcgtttgcgggcgggacttcctgccctgtgggcgggatttcctgtccgggccagactacgaccacgtgacgggcagtgacagcgaggacgaggacgaggaggtcggcgagccgagggtcaccggtgacttcgaagacgacttcgatgcgcccttcaacccgcacctgaatctcaaagacttcgacgccctcatcctggatctggagagagagctctccaagcaaatcaacgtgtgcctctgagccagatgacggggtgggaccccggttagtaaggaccgggcgcccagtggctaaggcggtgccctggtgaccaaggagagccagacctgttgctcaggccgagctcctggttgccagcgagttaccacgggaccagtcgcgtgtatggctgagactcattcccagtttccagggcccggtatttggacactagttgccaagtctggggcctggggattttagggaccagcggttgtgaccatctttcctgagcaccaagggcttccccttttgttgccaaaaaggtagttctcgcgcttgctaggctggcctctcttgcctccccttggccggggcaacaccagttactgtgagcatcaccctggtgtggtgagtcacctctagtcggccctcttgctgctgccaaccaaatcagtattagctttgagcactgcactgtttctccctcccttggacgacacaaagactagcatgaggcactgtttgtggggggcagcccctatcctgggttccagcatggacacaggggtagcctggggcttatagagaaacagctggtttcccctacccttttccggggaagtccccacgattggcctctagtcagcaaatggagataacagagtctggcctttccaatccccatctccttgccccccccttgcccccccccccgaaaaaaattgagcacttaaacccctcccttttggagggggccccctgaagcgtcaggctgggggcagtctggtacggaacatatttattgcctccatgcatgtgtgtgtgtgtctgtgaggactggtgtgcgtggacacgtctgaagcaggcgtgtggggctctttcagggaccacagaggagggagcagtttgcagtgcccagccaccctgaaatccccaataatggtgcctcagtgggccccagagttccagtgggagagtacggttccctcctgtctccctcttcttttccgcacctccatctttgtggataataaataaatatgcacaggttctgagactgagtacttgggcctacatgggccagaggtggtttattcagtctccataagagaggggacaaacggcacagttgggtccgtgaagaggagggtccaagagctcacaagagagcctctctgagatttgacccctccatcccctcctcagggaggttgtggagtcactgggcctcatgggataggcccagggcaagcaatgatgagactccaaaccagctggacacagtccaggggcaggaaggcagccaagcgtcctgacccacaaggccctatacagcaatggagccatcgcggaagtccgtcctcccaatgaggatgttgaccacaaccgggtggccgtctcggcactgctgctgggcatcgtgcagcaccttgaccacctgatcctcgttctcccgtgagagcagcaagccccgggcccccagacccatggctgccttgtgataatctaaaagaagagattaagtcggatagtggcaaggactcagcccaccgcacatgcagccagcccaggagaggaacacaagcccagctgggactgaaacagcctcctgtcctcccaacctcgctgaggccccctcaccagtgtaggccaggccacaggccacgttgctgcccagagagggcacctgctcccgagaaatctgtgtccagccagcatcattccctaccaaggccatcactgggatctacaggaagatgatgaaggcaggccgcagccttcagccccatggcttggccagccagaggacagagacagggatagggcctctgccagagaggaggctccctccccacctcagcccacccctggtgacatctcccagaaccccaggccctaagcttccctcaggccagcccagtcaccttgtgtctgacgaatgtatcaaattcgatgaggctgtagccaaaagctccgtccccaaacaggcaccagacctagtcgggaggggacccaggatggttagggtggatcaggacctagagagcagcaagtctcccaactccagtgcctcacctcagcatctggccggcacagcttggccccaagtgcaaatcctgcaccaactcccagagtcccaaaggcccctaagaggaccaagagcaggtgggtgtgaaggcgtcctgatggatggtgcccactgccccaggcgggggcccttccttaccaggatcgagccagcgcagggggccgcggggctgtaccagatgggcagcagtgcccacgaagtccccgccatccaccaccagaattgagttgtcaggtagcgtttcctccaccagctgcagcacctgcactgggttcaggtgctgggccacaggcatcgctgccttctccctgcgacaggacagcgaaggtcaccagggttggcagcagggtctgccgggaacccccttcccacatccactccacccaggccccaccgaaaggtctgctccttctgccggtcggcttcccgcagctcctccacccagtctggggcccaggtctggccctgaaggccctccactaacttcagcacgaaggaacccacatctcctggggaaggaagaggacacagctgtggggagctggcttcctcctgttcttccagcatcagaggcctcaaaacagcaggaagccagcagcagcatccgagcaggcagacgggaagcaggccaggggtgctcctagaaaaaaaacaggtgaaacaccccagaacctgccagaaccaggggagggcagcccaggtgaaaagggaagacaaggcccaagaaacaagggttaaggagcacaaggcaggtgacaaacccaagctggcctcgtcccctccctccacctccttctgcctgggaaacactcaatgaaaagagctacatccaccaagcacatctctcaaatccaggcacgtggaagcgcacagcgaacgttactgaagtgaactaacaaacagccccgtgatgtatctttcaccaccccatttttcaaatgatcaaatggaggctctgagaaggtgaggctctgccgctgttcatctccagttcaggcctcctcgcttctgtcctggccattttgagcagcccccctggcctccacccagcccccttccggcctgccgtccatggctgctgagtggaccttcccaacacagatgcaacggtgctacttctctgcttaatacaagagtgtcctgtcgcctaggctgcaggggagtcaacatcctcagaatgatgaaccaagttcaagtccaaggggactaaaataaggggaggggagagatacggcaggaagacaggctaaggggccaacgagtgtgctctctgtcctgagggcagtgggcagtgtgggagggaacgtgatcacatgcacgttttcaagcctccctctgtgtccaccccaccatttgttcctacagaagcatctatcaggccgggcgcagtagctctggtctgtaatcccagcacttttgagaggccgaggcaggaggatcacttgaggccaggagttccacgccaacctgggcaacacagtgagatgctgattccacaaaaaaaaattaacaaattagcctggcatggtggtgcatacttgtagtcccagctactcaggaggctgaggtgggaggattgcttttgagcctgggagtttgagggtgcagtgagctgtgattgcactactgcattccagcctgggtgacagagcgagacctcgtctctaaaaaataaaaataaaaaaaatttaaagaaagaagcattcatcagtttgagagccaactatttgtctctggttgactggctacccctagggcaaggtctgggcctcaatcactgtaccaggctcaagccagctgcagcagaaaccaggaggagagggactgggaggagcacatatgtgtacggggggattaaggggctcaccctgcacagcctcctggggcttccagaagatgtctgagttgagcaacatctcttcccgattacgattgacgatgatgatcttgctgctgtggctgaggacacggccataggataggcggaagtcacacacagttcctggtgtgggggacaggaatgcagtaggcagaggccccatgtcgtctaccttacttgatccactgtggtggactggatgcaaatgagtccctgttcctcaccgagtctccctgcacctgtgccacctacagtgaccttgcagctccccacaccccctgaatcgggactggcctcatgacatgctttggccaacaggatagggcagaggcaggttatattttcccagatggccataatatctcccaccctacatccatttgtacaaggtcaccttgacatgcctcccatggagagaggtgcagcctaggtcccctttccttgaaagtgacacaccatgacacccaacaaggaagatatgcagtttcttccttgttcacttttagaggcctgggtggggccaaggaatgtgctctctgtctaagaagtctgactaccctgaggccatcatgctgggaggaaaccggagccacacatagagacctgtgtagttgccctagtccacagcccctccaacagctggcgtcaattgcaagacctctgagtgaagacacctccagatgattcaggacccccaccccccattcctgcagactctacttcaagaagccacacagcctccactcactctcttgaataaccgcactctcctagccccatagttttctcatccttcaccaagtcggccagcccaggctagcctactggaggatgagaaacaagggggccatggagacaggggtgaagaactctatgaccccagctgaggccatcccagacgagctgcagggccagccaatccccatacaggtgagcaagcccagcctggatcagcacagctgccttcctgcctaacccaagtgcagactcatgaatgagcccagccaaaaccacagctaccacctaccttataggtggatcttgagaaatcagaaatgcatttttagccattgagtttggggatggttgttacagggcagtagctatctgatacacctattatgcgtctggttgggttcaaagcgctttatgtgaaaatgtgtatcaagtacaataggtgcccactagaccttcctcctccttcgtgtgaagctgggtaacagggtgagggggttcctgggggaaggagggaaaggaagaggctcaggcccacctgctaggacaatgacatccgccttcttcagggccgcactgcggttctcccggatgtggagggggtggttgcggcctaacagcccccgtgccatccctccaaggaagcagggaacacccaaggtctccacggcagccctgggagtccaggcagagcagaggtcagtgtggccggggcctcccgcctccccaagagcacccgaggactggggactgggaacgtgaaaacaagggcagggctggcgcttctcaccgaagcttgtcggcagacgttggggtgagcagggcctgactccccagcaccatcagaggcctcttggcccggctcaggatctccacacagcgctgaacctggagcgagaggtggggatcaaagggctgtctttttatttatttatttttttgagacacagtttcactctgttgcccaggatagagtgtaatggcatgatctcagctcactgcagcctccacctcccaggttcaaacgattctcccgcctcagcctccagagtagctgggattacaggcgcgtgccaccatgcctggctaacttttgtattttcagtagagacagggtttcaccatgttggccaggctagtcttgaactcctggcctcaagtgatccgcctgcctcggcctccctaagtgttgggattgctgctgtgagccaccgcgtccagccaaagggccgcccttgagtcgccatgagcacccaagattaaggccccagtactgactcagggagagggtcagggggccctctcccctcagggagagggtagggtcctcagacacaaaagagaggcaattcacctgctgcggggaagcctgggggatgtccaggggcagcggtccctcgggctgaggctcccaggctcctgcaaagaggttggccaggtaattc

SEQ ID NO: 1472 - DNA, 1975 bp, Homo sapiens
gggccgcagcatggccgagccgctactcaggaaaaccttctcccgcctgcggggccgggagaaacttccccggaaaaagtcggacgccaaggagcgcggtaagcggagatcggtggggaacagggggcgccgagccccacccggcctgggagcggggtcccagggccccgaggacagacggtgggggggatcagggggagccccccgcaccccgctgcagactggggtgcctccagccaggggagggtaggggtcctggaaggaaggggctgggagggaggggggcgcggaccgttatgtgctgctggccggggatgccagcgctgcgggctccttgggaggcccgggagggggcctcgcccacgacaggaaatggggccgcgactgagggcctggagggtggaggggaggaggggctgggaggccgggacactggggcccagtcgggctgggcaaggggcatcgggagccctggaggcgcaggatgggagatgggaggcgtactcctgcaaaggaaagagaggggcggcccgtcaatcagagtagctgccccctccgcctcccacctactaacagtgacggcaactgcgcctgccttagccccaggaaactgtcccttttatacagatggggaaactgaggcacggagcaattgggtcatgtgcccagggccatcgacttaaacagctctttggactatgctacaaacagagaccctagagggtggacatcagaggtggccagaggaggagttcagcagggtagcaagtaaaaaccttagagaaacagctgcgtgggatagggggacccaggaaggaaggagttaaaggaggaaggccagaccattccatggacgtaccccttccccccaggccttcccaaagattcccaatgttcccagggaagggagaagggacagagatgcccaaacacaaacacacacaggaaacagcccaggacatgagacaggagaggagggagggaaggggaagtcccaaagcattgagcgtggggggtctggcctgggctgagggacaagggcccatcccaggatggcgacagagtttggaagacaggagggagggtaaaaggggcaggggactgggagtgactgtgctgcagggaatagaaaacccagctcctcactcctgagcacgtagtgcctgctgtgggctgtatacttttccaaaaggctcctggaagcctccctggacatggaaatcacatccccccatttcacaggaggatactgagcctcagagagggaagcgacttgcccaaggccacgcaggtgcaaagctccatgccacggttattgagagggtagaggaagtggagactggaacgcagtacctacgggccccaggaagcctgacttagaaccctgaggctgcagggatggagtccccttttgggatgccagggactgagtagggggtgctctaagctgataactgagatcgctagcctgtggctgcctattccaaacaaaacagcaggatccaaggaaccatgacttatcaggggccggccagggccgtacacagcatcccacccactgatcaattgcacagggctgctctgcaggcagtgaggggctgggtgggtctcactccccttgctctctgccaggccacccagcccagcgcccagagcccagccctccagagccagagccccaggctcccgaagggtcccaggccggagcagaggggccctccagccccgaggcatcaaggagccctgcacggggagcctacctgcaaagcctggagcccagtagccgccgatgggtgctgggtggggccaagccagctgaggacacctctttagggcctggggtacctggcactggggagcccgccggcgagatctggtacaaccccatccctgaggaagaccccagacctccagcacctgagcccccggggccacagcctggctcagctgagtcagagggcctggccccccaagg

SEQ ID NO: 1473 - DNA, 691 bp, Homo sapiens
ggccgggagaaaagccaggagcaaagtggcatggggacagggtggatgagtgacacctcagggacagacgaaccctagtggccaggtcttcaactgcctgtttgccctcggtagcctctggggtccaccccaactccacgtagccccccagaagcaaggaacgcaggctcagcatgccaggattaagcctgtgggtccaacagatgtgagctcaagtcctggctctgtcacttcctagctgtgcaacttagggcaagtgacttcacccttctgagcttccacctctgtcaatgtaaatatgaacctccctccccaggttcaaggatctgtccacttaggacatgaggcgctttgcatgggagttctgaacactgtcctctcctgcttcaaacagggtcttctcggtctccttgctcactgggccccagggccccaactttcctgaaggacctgtgcagggccctggagacacaaagatagatcctgcccagccctcccctcagggggcgctctatccagcgaaagacagacacatgggcattggcaggaaacagtcggagctcagagtcagaagcctctgctttcaccgttaaggacaggccaagacagcacagaagcagcccaggatggaaccgtgggaagccccgcaagtaaagaaaaggcaagggaggctgaggcaggaggattgctc

SEQ ID NO: 1474 - DNA, 14175 bp, Homo sapiens
gcatataggacacagtttattagaggccatcagacctcaggcaccaccagcatgtggagtctgagctgcccacctcctccaggaaggtcacttcgagtccgtgaaggaggcaggcaggtgtgggggagtgaccacaaccaaagtagcaaaagcacccctgtcccaggtgtcagagactagggtggaccccaaggatctcataacctgcactgaccctgagtattgaccctgagtgacctctgagcccgagtggccctgatgcttggcagtgacctgtgtctagtggggggactctgggacattatccccaaaagggttttaggcctcccctaggtcatgtattaaatagtttttccttataggaaccctctggacctctcccagcattgaactcctggcggggtgtttggccactaggtggtgggaggtagggatatatgggtccgtcttcacaatctgggcctcttccttatttaaggtgccagggtggtcagagatggtcctcggcttcctcaggctggacgtccgggcagcaggtggccctgggcacagcctcgctgtccaatttcgagagtagccgggctgtctcctgggtaatctcaaaatgcttgggcagcggggtgcggcgcagggggctgccctcaggggaggcagctgcagggctgggcccccgcccccgcaaactccctctgggcactgatgtgatgggggtctcctcgcacagcttggaagccaccagggccagactggacagctggtgggttacaggcctcacaccgccccggggatacttcactggctggcggctgaagtggccacgagactgtgtccccaggagtgagtcctctgggccttggctggacactgtgtacggggtgggtggtcagtgcagagcacctccaagttctctgtatatccccccaggagtcatcttttagcaagccaccctggggccagggcacccccagaactcctgagcctctctctaacatactcaccttcccctcccccatctttggtgtcttcagccacgtcctctctctggtcactctgtggagttggaatctgcagggagaaacccaagaatgagaccccaacactaaaatcccagttctttgagattcctggagagccaagggcttgttcctggacatgcaaaaggaatagccagtgcaaaggccctgaggtaggagcatgcctggtatgttaggacgcagccccaccctgtaatgaatgagggaaaggtggtaggaagtgagaccaaagaggagtgggcccaggtggctctgccagccacccctgactttgcacctactctgcactgggtgtggactaccattgaactcctcctatgcacagggcatggaccaccactgactgtgcacctgtcatcctttgcagttttggtgtttggggatagacgatgcccttataagtgtactgcttggccaggcatggtggtgcatgcctgtaatcccagcactttgggaggctgaggttggtggattatctgaggtcaggagttcgggaccagcctggccaacatggtgaaactccgtctctactagaaatacaaaatttagccgggcgtggtggtgcatgcctgtaatcccagctactagggaggctgaggcaggagaatcgcttggacctgggaggtggagattgcagtgagctcagatcatgcccctgcactccagtctgggtgacagaatgagactccgtctcaaaaataataataagtgtactgcttgcccttccagcatagagcagtgtcattcattgagtctggaccgtgggctccatgagggtgggaaaatccttgtttagcaaatggccagcccagggagtggctcagccctctccacattaggaccaggtggtgcctctgaactactatcctgggctgctctctgcaaccttaccaactttactgttccatccttagctaaatggttggcagtgtctacacatcagacactgtcccgagcactttatgaggcattccagctctcagagacccacagttcaccagcagccgcttcccagctctgggctgctgcaggagagatccttgctctcaggaatggcagatgcagcaagataccagcagcacaggccttgggcatggactgttctagcaatccggagcagcgggtgctgctatcttcctggttcacagctgagctctggatccagactggtgacctttgttaaagattctacgccaggcggccgggtgcagtggctccagcctgtaatcccagcactttgggaggccgaggcgggtggatcacaaggtcaggagatcgagaccatcctggctaacacggtgaaaccccgtctctactaaaaatacaaaaaaattagccgggtgtggtggcgggtgcctgtagtcccagctacttgggaggctgaggcaggagaatgacgtgaacctgggaggcagagcttgcagtgagccaagatggcaccactgcactctagcctgggtgacagagcgagactccatctcaaaaaaaaaaaaaagattctaggccgggtgcagtggctcatgcctgtaatcccagcactttgggaggctgaggagggcggatcgcctgaggtcaggagtttgagaccagcctgaccaacatggagaaacccctactctactaaaaatacaaaaaaaattagctgggtgtggtggtgcatgcctgtaatcccaactactctggaggctgaggcaggagaatcgcttgaatccaggaggtggaggttacggtgaacagagatcacgccatcgcactccaacctgggcaacaagaatgaaactccgtctaaaaaaataaaggattccaactgcggccgggtgtggtggctcacgcctataatcccagcactttgggaggctgaggtgggtgggttacttgaggtagggggttggagaccagcctggctaacatggcgaaaccttgtctctgaggcattagaattgcttgaacccgggaggcggaggttgtggtgagccgagatcgcaccactgcactccagttgggcaacacagtgagattctgtctccaaaaaaaaataaaagattccaactgcttacagtccccttttagggccattaactgctcagagccttcattgtttaatctgtaaatgattttcattaacactgtctacctctcaggactgtggagaggacaacaggaagcctctatagtgtcccctgcacagcaggtgcacattcagtggtggtctgtgcctgtgaatagcagatgcaaggtcaggatagctggcagagccacctgggcccactcctctttggtatcacttcataccaccttcctgtcattcattacaggatggggctgcgtcctaacacaccaggcacgatcctacctcagggcctttgcactggctgttccctttgcctggaacacccttcacctgatctccatgttgccagctcactccttcatgtccttccagtctttgctcaagtccgtctgctctctaagacgtgcccccaccatcctacttagtgatacaaactccacctcccaccgtgctgctccctggtgtcatgtgtcttactccactttttttttttttttttgaaacaaagtcttgctctattgtccaggctggagtgcagtggcatgctctcggctcactaaaacctctgcttcctgggctcaagcgattctcctgcctcagcctcctgagtagctgggattacaggtacacaccaccacacctggctaatttttgtatttttagtagagacaggtttctccttattggttggattagtctcgaactcctgacctcaggtgatttgcctgccccagcatcccaaagtgctgggattacaggcgtgtgccaccgcgcccagccattactctaccttttcatgatccattacccttatcatcatcacctcatcacattccagataactgactttgtgtcatgtatatggttgttctttccccactaaaacacaggcactgagagggcagggtctttggatatttagctcctggatgtatctgcaatgcctacgacaatgcttggcccaaaatacatgttcaataaatattctgttggaggaatgaatgatcacccatgttagtacctctgcagggctgtccccttttgttacatcatcactgcccactgctcattcctcactattccttccagaatgaacataagttaaatgaggaagggaggaagagaatgaaggaaattttaaaaaggaaggaaggtgaaagagaaggtaagagaattgaacagagataaggccctctccatagctgtgggcccagtgggttcttacctcggtaggtgtggccgtgggatgctgctccagggtactgtggtgctgggggtctgggccggggtctgaggctaggactgggggctgggagtctgggtcaaggtgcgggggtggcggttgggagctggttgtgaggggcccaggggctgggctggagtcttggggcgggggctcagtggcctgggggagctcatccatcccaaagatctgctcgtagtgcacgatgaggaactccacaagctgggcctgatgcccagagtccagcaggcaggtgacagggatggcgctggctgcccgcgggccgtccggcggccgcagcagtgtcggcccaaacacaatgcccaggttgttggcagacatcttgttttccataaatcgtgcagccaccctggggatggtgtgaagagaaaggtcagggtacaggatgcaagctcattggtctgagggtaagggtgggacacgcaggccagcctagaggtgacttgcccatgtcacaggtgtaagtcgtctgagaccagcagccacatatccagaactggaggtcaggggtcagtacccaaagttatgaatcatggattaaggttcagagttcagaaaacacaggtcaaaggtcagaggtcagtgtcaggggtcagccagggaagttagtagtcgcatgtccagggaaaagggtcgcgtttcaaggctcagggacccatgcacacctgaacagatgggccaccaggtgccgcagggtgttgtagttagagtcaggcagctgtaccaagagggtcttcagcgagcggataacctcagggctggggctgggggtcccagggtcgtccccagggtctgcatgcaaggtcttagccagagagatgaaggcgtcgtagaggtggaaggggatcacgggctcggtgagctgggggtggaacggagggcgcaacacgagtgtgggtgggctgtggagggctcctgcccgcgtccccctcagtgtcctgagcaccaacctcctgaagaaatcgcttgaggacactcgagacgtcatgaggcgagttccccgacagctccaccaacgctcggccattctcgaaagcctggcacagccgctccacacggacccgggacccgctgacccggtaaatgccctgcagggtgagggtgaaaaacagacacctggttcgtgataggccatcgattcggtcaggtcacttctggggatgatgaagggtcagggcagcacctgcacatccagggcacggtgttctatctcagccgtgcacttcgtgaccacaaagggtacctcctccgggaagtccctgggtagctgcaggaagtcaaccccaaaaaggggtgtccgggctgggagccgcctgtgtccacagaggatcaggagagtctccaggcagcgcttgtggcaggtcagaaagcactgtggggaaggtcacagggacagggaggtcattagggaccagtaggggaagagaaggttacaaggatcctcaaggaatgggggctcatgggagacatcaggttagggtgggtcccaggggcagaaaggctgtaggaatctcaggtcagggagatgatcaagggtcagcaaaggtcatttggtcattaacccaggccacacctcctcacactccgtcccgctgaccatgaaggcttcgcactcgcggcacttggctgggccccgcagtcgccgcagctggtgggtctgagccgcgctggacagtgtccacttcccgaaggggctgcccagcccattctccagcccgtctcccaggtctgcagggagacagggtcaggagtgcctggtgccctgccctgtcccatcctgacctaccctgcttcagcctcaccagggtctcgctcctcaaagtcatctgaggactcagtgcctgtggacgaagccttcaccagctgcctcgtgccagcgcctggggtcagaggaatcatgggagattcctgggctatgggaggcactcctggtttttagggcttccagaaccacccactaattcccaaggggtcagaggtcaggagggggattggacaggtcagtggttaagggttggagaattgggtcagcaacctgaggggggtggttcataagctggatcaagaggttgaggaaataggccgggcgcagtggctcacacctgtaatcccagcactttgggaagctgaggcaggaggatcacatgaggcaaggagtttgacaccagcctggccaacatggcaaaaccttgtctctactaaaaatacaaacattaaccaggcatggtggcaggcacctgtagtcccagctactcgggaggctgaggcacgagaatcgcttgaacctgggaggcggaggttgcagtgagccaagatcgtaccactgcgctccagcctgggcaacagagcaagactctgtctccctaaaaaaaaaaagaaagaaagaaaagaaaagaaaaggccgggcgtggtggcacacacctgtaatccctgcactttgggagaccgaggcaggtggatcacctgaggtcaggagttcgagatcagcctggccaacatggtgaaaccccgtctctactaaaaaatacaaaaatcagccggcgtggtagtgcacacctgtaatcccagctactccagaggctgagacaggagaatcgcttgaatctgggaggtggaggttgcagtgagccgagatcacgccactgcactccaggctgggcgacagaatgagactgtctcaaataaacaaacaaataaataaataaataatttttaaaaaggtaaaaaaagaggttgaggaaataggtcaggggtgtggggtaggtcagaggtcaaagatagttaaagattgagggtcagagcttggccaggggctggaggatggtcacaggtggagtgtgggtcaggaccaggtcctatccctacctgggctggaagtgggtgagtccagggaccgagactcgctgccgccacccacgctgtccacatcgctgcccggagtggggcctggagtccctaggtggcacaggtcaataaggatggtcccctgctcacaaaccccactcctgcagcccacctatgtgttggtggaacgaactcctggcaccactcccacctggccctcattgcactcaccttgccagcgccagcctgtgcccggatcctcccaagggcctggctcagctgaattctcatccagccttggaggaagaggcccagagagcttctttctgatgtccagaggggagctgagaagacagaagtttgaaggtttgaatcccaggaaactggcctggggtgatggcacccaggcatcatgtctaggtaccaactccaagcacttgggtctgcaaaccctgacacccagggcattgtggcccctgaaatacagtagccccacattcctgcccctgcccctaggactgggacaacccattcaccctcctatggcccccgagagcctggagtactaaattccactaaggctttgcgttctctaacctcgagtaaccagcctgcggtgccaacagcctggcatcgcgattccggggctcgttcccgactccctgctccagtgacccacctgttcaaggagggaaggaactcctggaaggagaaggcgggcggcgggggcggcggggcctcgggccgcagcgcccgtacaaactcctggtagcgctggcccggctcaaagggcgcacagcactcggccagggcggcgaaggcgcgggggccacgctctgcctgcgccccccgcagcccgaagagactcagcgtcacctgccgggtggagacagcaggttggggaggggcggagcctgggagcctgggggcagggccagagctggggcggggcttgagagacgcgaacgtggtcagggtttgggacgcacctgggcggcttaggaactagggcagtcggccaggggacccaggcatggtcagagcaggggctggtcatccaggggacaggacctcatggggcggagccgagacagtgggtctgggggcgggaactggctgtcgagggaaatggcctagtcctggtgtctccagggtggcttaggggcgaggagtggggcactcagtcggggccccaacggggtgaggggaggatggccttggggatgggcctcacccgcctcagcacttcatccccctgaaacaccagcttgcgcacgtgcgacacgattcgctgcttggcgatctccaggtcctgctgccgcgcgttggcctcgcggacacaggcctggtacagcgcctcggcctcctgcgcctggggaaacgggaggccaggagcggggtggggcgcgtgtgggcgagagtggagggcagggggcgccacagcgctacaggggctcggggccgggtgcccaccttggcctgggcctcctctcgcgagcgccgccgacgctcctgctgcttgctaggtcccggcgaggcctggggggccgagtcctcaggggacccctgggagcgtgcccgcaggtcctcgctgcgttgcacatactgcagctgggcgcgccgcagtgcctgcaccgcctcattctgggggatgatgagaaggtcagcgtcccggcctctctctcaccctacccttccaccaattccaagcctcaccatccgcttctgctccttcatccactgctccttgaactccttccgccacttctcaatctcagtccgtttggcggcgaggggctggcaagggttggggatggggatggagacgctgccttagggccaacccagaagcagccacccagtccttccattcctgcgccatgtgctttgccacctctggactctatttttttttttttcgagacggagttttgctcttgttgcccaggttggagtgcaagtgggcaatcatggctcactgcagcattgaacttgaactcttgagttcaagcaatcctccagcctcagcctctcagtagctaggactacaggcatgtgcactaggcctagttaatttaaaaaacaatttcttctttttttttttttttttggttggccaggtgtagtggctcatgcctttaatcccagcacttgggaggccaaagtgggcagatcacctgaggccaggagttcaagaccagcctgaccaacatggtgaaaccccgtctctacaaaaatacaaaaattataaagatgtgatggcacactcctatagtcccacctactcgggaggctgaggcaggagaatcacttgaacccgggaggcagaggttgcagtgagctgagatcatgccactgcactccagcctggatgataaagtgagactctgtctcaaaaaaaaaaataaataaataaattttttttggtagataaagacagggatctcactatgttgcccaggttagtctcgaactcctggcctcaagcaatcctccaccctcagcctcctagtagctagcactgcagacatgtgcaccaggcccagctaattaaaaaactttttttttttttttgtagagacagggggtctcactatgttgcccaggttggtctcaaactcctgggctcaagcaatcctccctccttggcccccagaagtgctgggattacaggcatgagccaccgtgccaggctggacccttttctgagtcagtattctcctcctggggtcttctccagacctgctctccccgacccctgagtccagaagtctcatgtagtcaccccatcctttctgcttggaagcagagacaccaaggctttcctcctgagaacactcagcacctcgttcccctccccacaaacaaaaacgaagtttttggctgggcgtggtggctcacgcctgtaatcccaccactttgggaagctgaggtaggtggattacctgaggtcaggagttggagaccagcctggccaacatggtgaaaccccatctgtactaaaaatacaaaaattagccgggcgtggtggcaggcgcctgtaatcccagctactcaggaggctgaggcaagtgaattgcttgaacccaagaagcggaggttgcagtgagctgagatcgcaccattgcaccccagcctgggcaaaagagcaagatattctgtctcaagaaaaaaagtaaagtgaagttttgcaattgcacaggaagcccagcttgaatctttgctgggtaaccttgggcaagttcccaagcatccccgggcctcagcttcctcatcaatgaaatggcgacgttggtagtggtgccttcctcccagcttgctgggaaacgaggggatcaggcctgaaggacagcaggatagcagggtgacctctgtaacattccaccctgcccccctcacctggtagtagtctcttttctgctgggccactgtctccatggccagggttcccaggctgagatcgtgctccagaaacagggtgtagatgtactgcagaggcatgtggctctggggaagacagagtggtgtaggaggatactgaagatctgtgggggacaaaggtggggttctagggggcttgggctctccgggggggtctggtcatgactacctgctgttgaatggacaccttgccagcttcagcgatcttcatggtgctcttagcaaactccagctctgggggaagagagagccgggctctgggtctagctggggtctggggactgcctggtaactggggctgggcggaagaggtcctcaccatagctggctctcttttcagtccaggcaagcagttccttggcatagcggctccaggtcttggcatattccagggctgcgtccacacccccctttgtccgaatgagccgcaagtccagttcctcccctggggaagatggatggacctctgacctttgcaccctagtctgctatggatgtcttccctaagcccccagaccagcccagtggcacctgtcctacagcctcacagctccccaaacactactttgggatcacttgtcctggttgcaattttacagattcactgttttttgttttttattttttattattttattatttatttatttatttttgagactgtgtttcgctcttgttgcccaggctagagtgcaatggcgcgattttggctcaccaaaacctctgcctcccgggttcaagcgattctcctgcctcagcctcctgagtagctgggattacaggcatgcgccaccatgcccggctaattttttgtatttttagtagagacgaggtttctctatgttggtcaggctggtctcgaactcccaatctcaggtgatctgcccgcctcggcctcccaaagtgctgggattacaggcatgagccaccgtgcccggcctgtgtttgatgggtttttttatttttatttttgaggcggagtctcgctctgtcgctcaggctggagtgcaatggccctattttgcctcactgcaagctccgcctcctgggttcccgccattctcctgcctcagcctcccgagtatctgggactacaggcactcgccactgcgcccggctaaatttttttgtatttttagtagagatggggtttcaccatgttagccaggatggtctcgatctcctgacctcgtggtccacccgcctcagcctccaaagtgctgggattacaggcgtgagccactgcgtccggccttgtgtttgatttttttggacatggtcttgctctgtcatccaggctggagtgcagtggcacaatcgtatctcactgcagcctcaaagtcctgggcttaatcagtcctccagcctcagcttccaaagtagctgggactacaggcacacaccaccacacccagctaattaaaaaaatattttttcttttggtagggatggtgtcttactgttgcccagcatggtcacgaattcctggcttcaagtgatcctcctacctcagcctccaccctgcctggggtctccctgagggctgggactgagatctgttgtgtgtactgccatattcccaaaacctaaacgatgccttgcatggaacaggggatcagtggtgatttgttgaaggaaagactcctgtctgtccccactgtcctggcctccagacccccctacctgtgaggggtacaggaccctctggggaggggccgctccaacagctggcttcgttggtctgtgcgggagggagacagtattcagaagcaaacagggcaggggcctggccttcctaaggccccctctgcttgaggtcttcctccctgttcccctactccccactcacaacagtggctgtaggggtcttgtcaggttctgggtcttctgagagtagagggtctccagccagcatctcaagggtcctgggggataaaggtgtgtcaggatgccaccttacacccagtctgtcctgccaaggggtgctggggaccttagggttgtttgtggcaaacatcacctctgtggcatctcttgtgtctgggaggtctgaagaatggtgttttgggggaatcaggtgagttttttttaaataggacttgaaaaagcatctgaagggccccagataactttgaggttcatagagtgggattatagggatcgcaaatattttaaggggttacaaggatatgtaggggttctaggaccactttggggatttccagtctatttagggggacacttttaggataccgaggcattttggagggtcccatcctagacttctctggttattaggtatgtaggtccagatgttacaggttccaaatgggactgcaaggcacctaaatggttaggggcttggggcatcttggcaggatttgggggtgatccaggctcagactcacacgttccccagtgagatttcgaggttgtccaggctccggaagatgtcactgtacctcttcctgccctcaggacctggggggagtcctaggggaggggagtgtaatacatgggctaaccactgcctccctccacccacggcacctcaaccagtctcatttggagggggtggaagagaaagggaagagtgagagagagaaagagagggctggggggggcttggttggggccaactcgaggcaggcagatggactcacacaccaccagagaccagagacagctgctcggggaacagagacacccactccctgggtctgcctgcacccagaagcaaaccaacaaaacagatgccccagatgcaaccaggctgtcccgagaagaaagccggtctgacaatggaaccacgggctagacagatggaaatacacaagggacagccaggcagagcctggggcagaaacacacatggagagactgaagccgtgagggacataaagaccgaatgacactccacatacacaacacagacacaaagacggccggaaacaccaagtcggaccccgccacatttctactgctgcccccctgccccctctcctaaggggcctagaccagcactgccgactccccagggctacagaggggccctgtggggatcctaccgcgttgccctctccctcagcagtcgtggcaccctgcccccatcacaaaaatcagaagcagaagcagtcacttccccttcctgggccccctcccccaggcgtctggggtgagggatcaaaagggggagggggagtgaagggctggggtcctgaacccatccgggcacagggctccccacaatggaggatccctgggtccttcccattcaggaactcctctcctggctctcaggacggagcgggacaagtgtgtgccctcaatgtaggaagcaggggatggtcgggggaggcccctcccggatccccgaccccctacccggctctgctgcgtccatatctgggcccggggatcgctctgcagggaccgggatggggatggggtcgcgcgccggcggggccgagccccgatttcctgccgccgcagccgccgccgccgcctcggttccgcgtcgc

SEQ ID NO: 1475 - DNA, 406 bp, Homo sapiens
tggcgtgactcagccgggtgctgcgacccagctccaactgcctttacgtaggtgctgcagggtgtttgatgatgcaagaaggaggccttgaggccgggcgcagtggctcacgcctgtaatccctgcattttgggaggccgatgcgggacgatcacgagatcaggagatcgagaccatcctggccaacatgctgaaaccccgtctctactaaaaatacaaaaaaattagccgggcatggtggcaggcgcctgtagtcccagctactcgggaggctgaggcaggagaatcgcttgaacccgggaggtggaggttgcagtgagcggagatcgtgccactgcactccaacctggagacagagcaaaactccgtctcaaaaaaaaaaaaaaaaaaaaaaaaaaaagaggcc

SEQ ID NO: 1476 - DNA, 287 bp, Homo sapiens
ttgtttgtttttcttttgagttggagtctcgctctgttgcccaggctggagtgcagtggcgttatctcggctcactgcaagctccacctcctgggttcacgccattctcctgcctcagcctcccgagtaactgggactacaggcactcgccaccatgcctggctaattttttgtatttttagtagagatggggtttcactgtgttagccaggatggtctcgatctcctgaccttgtgatgggcccgccttggcctcccaaagtgctgggattacaggcttgagccac

SEQ ID NO: 1477 - DNA, 418 bp, Homo sapiens
aagcacttgaagccgtcgatcttgctctccacctcctgcaggtcaagggcagcggcggggggcgtgctaagggtcaggaagaagttggcgcccaccatctcgtccttctcggccttcctcttgccctgcttccaggctttctcgtcggtgctgctggggcacgtcaggaagtgctggaagacgtcgcactgcgccagcactgggtggctggccatgtggttcatccaccagatcaggcccttcctgcgcttagagatgaagtcctcctcgaagcggccggtggcctgcttctcgggcaggtggggcacggagatgaccgggaacttctccgccaggcgcgcgtacagccagtcgaagtgcttgtagcgccgatgcaccggcacctgcgtgtgcgtgggcaccagcttgtaggagatgt

SEQ ID NO: 1478 - DNA, 845 bp, Homo sapiens
cccgtcgttttacaacgtcgagactgggaaaaccctggcgttacccaacttaatcgccttgcagcacatccccctttcgccagctggcgtaatagcgaagaggcccgcaccgatcgcccttcccaacagttgcgcagcctgaatggcgaatggcgcctgatgcggtattttctccttacgcatctgtgcgggatttcacaccgcatatggtgcactctcagtacaatctgctctgatgccgcatagttaagccagccccgacacccgccaacacccgctgacgcgccctgacgggcttgtctgctcccggcatccgcttacagacaagctgtgaccgtctccgggagctgcatgtgtcagaggttttcaccgtcatcaccgaaacgcgcgagacgaaagggcctcgtgatacgcctatttttataggttaatgtcatgataataatgggttcttagacgtcaggtggcacttttcggggaaatgtgcgcggaacccctatttgtttatttttctaaatacattcaaatatgtatccgctcatgagacaataaccctgataaatgcttcaataatattgaaaaaggaagagtatgagtattcaacatttccgtgtcgcccttattcccttttttgcggcattttgccttcctgtttttgctcacccagaaacgctggtgaaagtaaaagatgctgaagatcagttgggtgcacgagtgggttacatcgaactggatctcaacagcggtaagatccttgagagttttcgccccgaagaacgttttccaatgatgagcacttttaaagttctgctatgtggcgcggtattatcccgtattgacgccgg

SEQ ID NO: 1479 - DNA, 776 bp, Homo sapiens
  SITE (709): n equals a,t,g, or c
  SITE (738): n equals a,t,g, or c
tacaacgtcgtgactgggaaaaccctggcgttacccaacttaatcgccttgcagcacatccccctttcgccagctggcgtaatagcgaagaggcccgcaccgatcgcccttcccaacagttgcgcagcctgaatggcgaatggcgcctgatgcggtattttctccttacgcatctgtgcggtatttcacaccgcatatggtgcactctcagtacaatctgctctgatgccgcatagttaagccagccccgacacccgccaacacccgctgacgcgccctgacgggcttgactgctcccggcatccgcttacagacaagctgtgaccgtctccgggagctgcatgtgtcagaggttttcaccgtcatcaccgaaacgcgcgagacgaaagggcctcgtgatacgcctatttttataggttaatgtcatgataataatggtttcttagacgtcaggtggcacttttcggggaaatgtgcgcggaacccctatttgtttatttttctaaatacattcaaatatgtatccgctcatgagacaataaccctgataaatgcttcaataatattgccaaaggaagagtatgagtattcaacatttccgtgtcgcccttattccctttattgcggcattgagcctgtctgtttttgctcacccagaaacgctggtgaaagtaaaagatgctgaagatcagttgggtgcacgagtggngtacatcgaactggatctcaacagcggtnagatcctcgagaggtttcgcccccgaagaacgtttttc

SEQ ID NO: 1480 - DNA, 240 bp, Homo sapiens
cccgtacgccagcggttccgggaaaggggagtcaatatcaccgtccagcagccgttgcagcgcctgcgttgttcggcaagtggacgcgtgactgagcgataaaccacgcgccagaggatcagaatcagtgcgcaaagtgaaaccatccccagcaataacaggctgtatgcccgcgtgcactcgctttttccagatgcgccagtccgtgctgattacgcagctcaaggtgtcgaccagctg

SEQ ID NO: 1481 - DNA, 150 bp, Homo sapiens
ccgcatcaggcgccattcgccattcaggctgcgcaactgttgggaagggcgatcggtgcgggcctcttcgctattacgccagctggcgaaagggggatgtgctgcaaggcgattaagttgggtaacgccagggttttcccagtcacgacg

(The sequence listing continues in the following parts.)
